United States Patent Application Publication US 2025/0018062 A1 - sequence listing, part 2

SEQ ID NO: 1445 - DNA, 1347 bp, synthetic construct
  misc_feature 1..1347: note = source = /note="Description of Artificial Sequence: Synthetic coding sequence"
  source 1..1347: mol_type = other DNA
atgcgcctgctggccaagatcatctgcctgatgctgtgggccatctgcgtggccgaggactgcaacgagctgcccccccgccgcaacaccgagatcctgaccggcagctggagcgaccagacctaccccgagggcacccaggccatctacaagtgccgccccggctaccgcagcctgggcaacgtgatcatggtgtgccgcaagggcgagtgggtggccctgaaccccctgcgcaagtgccagaagcgcccctgcggccaccccggcgacacccccttcggcaccttcaccctgaccggcggcaacgtgttcgagtacggcgtgaaggccgtgtacacctgcaacgagggctaccagctgctgggcgagatcaactaccgcgagtgcgacaccgacggctggaccaacgacatccccatctgcgaggtggtgaagtgcctgcccgtgaccgcccccgagaacggcaagatcgtgagcagcgccatggagcccgaccgcgagtaccacttcggccaggccgtgcgcttcgtgtgcaacagcggctacaagatcgagggcgacgaggagatgcactgcagcgacgacggcttctggagcaaggagaagcccaagtgcgtggagatcagctgcaagagccccgacgtgatcaacggcagccccatcagccagaagatcatctacaaggagaacgagcgcttccagtacaagtgcaacatgggctacgagtacagcgagcgcggcgacgccgtgtgcaccgagagcggctggcgccccctgcccagctgcgaggagaagagctgcgacaacccctacatccccaacggcgactacagccccctgcgcatcaagcaccgcaccggcgacgagatcacctaccagtgccgcaacggcttctaccccgccacccgcggcaacaccgccaagtgcaccagcaccggctggatccccgccccccgctgcaccctgaagccctgcgactaccccgacatcaagcacggcggcctgtaccacgagaacatgcgccgcccctacttccccgtggccgtgggcaagtactacagctactactgcgacgagcacttcgagacccccagcggcagctactgggaccacatccactgcacccaggacggctggagccccgccgtgccctgcctgcgcaagtgctacttcccctacctggagaacggctacaaccagaaccacggccgcaagttcgtgcagggcaagagcatcgacgtggcctgccaccccggctacgccctgcccaaggcccagaccaccgtgacctgcatggagaacggctggagccccaccccccgctgcatccgcgtgagcttcaccctg

SEQ ID NO: 1446 - DNA, 570 bp, synthetic construct
  misc_feature 1..570: note = source = /note="Description of Artificial Sequence: Synthetic coding sequence"
  source 1..570: mol_type = other DNA
atggccgccggcgagctggagggcggcaagcccctgagcggcctgctgaacgccctggcccaggacaccttccacggctaccccggcatcaccgaggagctgctgcgcagccagctgtaccccgaggtgccccccgaggagttccgccccttcctggccaagatgcgcggcatcctgaagagcatcgccagcgccgacatggacttcaaccagctggaggccttcctgaccgcccagaccaagaagcagggcggcatcaccagcgaccaggccgccgtgatcagcaagttctggaagagccacaagaccaagatccgcgagagcctgatgaaccagagccgctggaacagcggcctgcgcggcctgagctggcgcgtggacggcaagagccagagccgccacagcgcccagatccacacccccgtggccatcatcgagctggagctgggcaagtacggccaggagagcgagttcctgtgcctggagttcgacgaggtgaaggtgaaccagatcctgaagaccctgagcgaggtggaggagagcatcagcaccctgatcagccagcccaac

SEQ ID NO: 1447 - DNA, 111 bp, synthetic construct
  misc_feature 1..111: note = source = /note="Description of Artificial Sequence: Synthetic coding sequence"
  source 1..111: mol_type = other DNA
caggagagcgagttcctgtgcctggagttcgacgaggtgaaggtgaaccagatcctgaagaccctgagcgaggtggaggagagcatcagcaccctgatcagccagcccaac

SEQ ID NO: 1448 - DNA, 93 bp, synthetic construct
  misc_feature 1..93: note = source = /note="Description of Artificial Sequence: Synthetic coding sequence"
  source 1..93: mol_type = other DNA
tgcctggagttcgacgaggtgaaggtgaaccagatcctgaagaccctgagcgaggtggaggagagcatcagcaccctgatcagccagcccaac

SEQ ID NO: 1449 - DNA, 477 bp, synthetic construct
  misc_feature 1..477: note = source = /note="Description of Artificial Sequence: Synthetic coding sequence"
  source 1..477: mol_type = other DNA
atggccgccggcgagctggagggcggcaagcccctgagcggcctgctgaacgccctggcccaggacaccttccacggctaccccggcatcaccgaggagctgctgcgcagccagctgtaccccgaggtgccccccgaggagttccgccccttcctggccaagatgcgcggcatcctgaagagcatcgccagcgccgacatggacttcaaccagctggaggccttcctgaccgcccagaccaagaagcagggcggcatcaccagcgaccaggccgccgtgatcagcaagttctggaagagccacaagaccaagatccgcgagagcctgatgaaccagagccgctggaacagcggcctgcgcggcctgagctggcgcgtggacggcaagagccagagccgccacagcgcccagatccacacccccgtggccatcatcgagctggagctgggcaagtacggccaggtgcactgcaaccag

SEQ ID NO: 1450 - DNA, 4440 bp, synthetic construct
  misc_feature 1..4440: note = source = /note="Description of Artificial Sequence: Synthetic coding sequence"
  source 1..4440: mol_type = other DNA
atgcagcgcagccccctggagaaggccagcgtggtgagcaagctgttcttcagctggacccgccccatcctgcgcaagggctaccgccagcgcctggagctgagcgacatctaccagatccccagcgtggacagcgccgacaacctgagcgagaagctggagcgcgagtgggaccgcgagctggccagcaagaagaaccccaagctgatcaacgccctgcgccgctgcttcttctggcgcttcatgttctacggcatcttcctgtacctgggcgaggtgaccaaggccgtgcagcccctgctgctgggccgcatcatcgccagctacgaccccgacaacaaggaggagcgcagcatcgccatctacctgggcatcggcctgtgcctgctgttcatcgtgcgcaccctgctgctgcaccccgccatcttcggcctgcaccacatcggcatgcagatgcgcatcgccatgttcagcctgatctacaagaagaccctgaagctgagcagccgcgtgctggacaagatcagcatcggccagctggtgagcctgctgagcaacaacctgaacaagttcgacgagggcctggccctggcccacttcgtgtggatcgcccccctgcaggtggccctgctgatgggcctgatctgggagctgctgcaggccagcgccttctgcggcctgggcttcctgatcgtgctggccctgttccaggccggcctgggccgcatgatgatgaagtaccgcgaccagcgcgccggcaagatcagcgagcgcctggtgatcaccagcgagatgatcgagaacatccagagcgtgaaggcctactgctgggaggaggccatggagaagatgatcgagaacctgcgccagaccgagctgaagctgacccgcaaggccgcctacgtgcgctacttcaacagcagcgccttcttcttcagcggcttcttcgtggtgttcctgagcgtgctgccctacgccctgatcaagggcatcatcctgcgcaagatcttcaccaccatcagcttctgcatcgtgctgcgcatggccgtgacccgccagttcccctgggccgtgcagacctggtacgacagcctgggcgccatcaacaagatccaggacttcctgcagaagcaggagtacaagaccctggagtacaacctgaccaccaccgaggtggtgatggagaacgtgaccgccttctgggaggagggcttcggcgagctgttcgagaaggccaagcagaacaacaacaaccgcaagaccagcaacggcgacgacagcctgttcttcagcaacttcagcctgctgggcacccccgtgctgaaggacatcaacttcaagatcgagcgcggccagctgctggccgtggccggcagcaccggcgccggcaagaccagcctgctgatggtgatcatgggcgagctggagcccagcgagggcaagatcaagcacagcggccgcatcagcttctgcagccagttcagctggatcatgcccggcaccatcaaggagaacatcatcttcggcgtgagctacgacgagtaccgctaccgcagcgtgatcaaggcctgccagctggaggaggacatcagcaagttcgccgagaaggacaacatcgtgctgggcgagggcggcatcaccctgagcggcggccagcgcgcccgcatcagcctggcccgcgccgtgtacaaggacgccgacctgtacctgctggacagccccttcggctacctggacgtgctgaccgagaaggagatcttcgagagctgcgtgtgcaagctgatggccaacaagacccgcatcctggtgaccagcaagatggagcacctgaagaaggccgacaagatcctgatcctgcacgagggcagcagctacttctacggcaccttcagcgagctgcagaacctgcagcccgacttcagcagcaagctgatgggctgcgacagcttcgaccagttcagcgccgagcgccgcaacagcatcctgaccgagaccctgcaccgcttcagcctggagggcgacgcccccgtgagctggaccgagaccaagaagcagagcttcaagcagaccggcgagttcggcgagaagcgcaagaacagcatcctgaaccccatcaacagcatccgcaagttcagcatcgtgcagaagacccccctgcagatgaacggcatcgaggaggacagcgacgagcccctggagcgccgcctgagcctggtgcccgacagcgagcagggcgaggccatcctgccccgcatcagcgtgatcagcaccggccccaccctgcaggcccgccgccgccagagcgtgctgaacctgatgacccacagcgtgaaccagggccagaacatccaccgcaagaccaccgccagcacccgcaaggtgagcctggccccccaggccaacctgaccgagctggacatctacagccgccgcctgagccaggagaccggcctggagatcagcgaggagatcaacgaggaggacctgaaggagtgcttcttcgacgacatggagagcatccccgccgtgaccacctggaacacctacctgcgctacatcaccgtgcacaagagcctgatcttcgtgctgatctggtgcctggtgatcttcctggccgaggtggccgccagcctggtggtgctgtggctgctgggcaacacccccctgcaggacaagggcaacagcacccacagccgcaacaacagctacgccgtgatcatcaccagcaccagcagctactacgtgttctacatctacgtgggcgtggccgacaccctgctggccatgggcttcttccgcggcctgcccctggtgcacaccctgatcaccgtgagcaagatcctgcaccacaagatgctgcacagcgtgctgcaggcccccatgagcaccctgaacaccctgaaggccggcggcatcctgaaccgcttcagcaaggacatcgccatcctggacgacctgctgcccctgaccatcttcgacttcatccagctgctgctgatcgtgatcggcgccatcgccgtggtggccgtgctgcagccctacatcttcgtggccaccgtgcccgtgatcgtggccttcatcatgctgcgcgcctacttcctgcagaccagccagcagctgaagcagctggagagcgagggccgcagccccatcttcacccacctggtgaccagcctgaagggcctgtggaccctgcgcgccttcggccgccagccctacttcgagaccctgttccacaaggccctgaacctgcacaccgccaactggttcctgtacctgagcaccctgcgctggttccagatgcgcatcgagatgatcttcgtgatcttcttcatcgccgtgaccttcatcagcatcctgaccaccggcgagggcgagggccgcgtgggcatcatcctgaccctggccatgaacatcatgagcaccctgcagtgggccgtgaacagcagcatcgacgtggacagcctgatgcgcagcgtgagccgcgtgttcaagttcatcgacatgcccaccgagggcaagcccaccaagagcaccaagccctacaagaacggccagctgagcaaggtgatgatcatcgagaacagccacgtgaagaaggacgacatctggcccagcggcggccagatgaccgtgaaggacctgaccgccaagtacaccgagggcggcaacgccatcctggagaacatcagcttcagcatcagccccggccagcgcgtgggcctgctgggccgcaccggcagcggcaagagcaccctgctgagcgccttcctgcgcctgctgaacaccgagggcgagatccagatcgacggcgtgagctgggacagcatcaccctgcagcagtggcgcaaggccttcggcgtgatcccccagaaggtgttcatcttcagcggcaccttccgcaagaacctggacccctacgagcagtggagcgaccaggagatctggaaggtggccgacgaggtgggcctgcgcagcgtgatcgagcagttccccggcaagctggacttcgtgctggtggacggcggctgcgtgctgagccacggccacaagcagctgatgtgcctggcccgcagcgtgctgagcaaggccaagatcctgctgctggacgagcccagcgcccacctggaccccgtgacctaccagatcatccgccgcaccctgaagcaggccttcgccgactgcaccgtgatcctgtgcgagcaccgcatcgaggccatgctggagtgccagcagttcctggtgatcgaggagaacaaggtgcgccagtacgacagcatccagaagctgctgaacgagcgcagcctgttccgccaggccatcagccccagcgaccgcgtgaagctgttcccccaccgcaacagcagcaagtgcaagagcaagccccagatcgccgccctgaaggaggagaccgaggaggaggtgcaggacacccgcctg

SEQ ID NO: 1451 - DNA, 4314 bp, synthetic construct
  misc_feature 1..4314: note = source = /note="Description of Artificial Sequence: Synthetic coding sequence"
  source 1..4314: mol_type = other DNA
atgcagcgcagccccctggagaaggccagcgtggtgagcaagctgttcttcagctggacccgccccatcctgcgcaagggctaccgccagcgcctggagctgagcgacatctaccagatccccagcgtggacagcgccgacaacctgagcgagaagctggagcgcgagtgggaccgcgagctggccagcaagaagaaccccaagctgatcaacgccctgcgccgctgcttcttctggcgcttcatgttctacggcatcttcctgtacctgggcgaggtgaccaaggccgtgcagcccctgctgctgggccgcatcatcgccagctacgaccccgacaacaaggaggagcgcagcatcgccatctacctgggcatcggcctgtgcctgctgttcatcgtgcgcaccctgctgctgcaccccgccatcttcggcctgcaccacatcggcatgcagatgcgcatcgccatgttcagcctgatctacaagaagggcctggccctggcccacttcgtgtggatcgcccccctgcaggtggccctgctgatgggcctgatctgggagctgctgcaggccagcgccttctgcggcctgggcttcctgatcgtgctggccctgttccaggccggcctgggccgcatgatgatgaagtaccgcgaccagcgcgccggcaagatcagcgagcgcctggtgatcaccagcgagatgatcgagaacatccagagcgtgaaggcctactgctgggaggaggccatggagaagatgatcgagaacctgcgccagaccgagctgaagctgacccgcaaggccgcctacgtgcgctacttcaacagcagcgccttcttcttcagcggcttcttcgtggtgttcctgagcgtgctgccctacgccctgatcaagggcatcatcctgcgcaagatcttcaccaccatcagcttctgcatcgtgctgcgcatggccgtgacccgccagttcccctgggccgtgcagacctggtacgacagcctgggcgccatcaacaagatccaggacttcctgcagaagcaggagtacaagaccctggagtacaacctgaccaccaccgaggtggtgatggagaacgtgaccgccttctgggaggagggcttcggcgagctgttcgagaaggccaagcagaacaacaacaaccgcaagaccagcaacggcgacgacagcctgttcttcagcaacttcagcctgctgggcacccccgtgctgaaggacatcaacttcaagatcgagcgcggccagctgctggccgtggccggcagcaccggcgccggcaagaccagcctgctgatggtgatcatgggcgagctggagcccagcgagggcaagatcaagcacagcggccgcatcagcttctgcagccagttcagctggatcatgcccggcaccatcaaggagaacatcatcttcggcgtgagctacgacgagtaccgctaccgcagcgtgatcaaggcctgccagctggaggaggacatcagcaagttcgccgagaaggacaacatcgtgctgggcgagggcggcatcaccctgagcggcggccagcgcgcccgcatcagcctggcccgcgccgtgtacaaggacgccgacctgtacctgctggacagccccttcggctacctggacgtgctgaccgagaaggagatcttcgagagctgcgtgtgcaagctgatggccaacaagacccgcatcctggtgaccagcaagatggagcacctgaagaaggccgacaagatcctgatcctgcacgagggcagcagctacttctacggcaccttcagcgagctgcagaacctgcagcccgacttcagcagcaagctgatgggctgcgacagcttcgaccagttcagcgccgagcgccgcaacagcatcctgaccgagaccctgcaccgcttcagcctggagggcgacgcccccgtgagctggaccgagaccaagaagcagagcttcaagcagaccggcgagttcggcgagaagcgcaagaacagcatcctgaaccccatcaacagcatccgcaagttcagcatcgtgcagaagacccccctgcagatgaacggcatcgaggaggacagcgacgagcccctggagcgccgcctgagcctggtgcccgacagcgagcagggcgaggccatcctgccccgcatcagcgtgatcagcaccggccccaccctgcaggcccgccgccgccagagcgtgctgaacctgatgacccacagcgtgaaccagggccagaacatccaccgcaagaccaccgccagcacccgcaaggtgagcctggccccccaggccaacctgaccgagctggacatctacagccgccgcctgagccaggagaccggcctggagatcagcgaggagatcaacgaggaggacctgaaggagtgcttcttcgacgacatggagagcatccccgccgtgaccacctggaacacctacctgcgctacatcaccgtgcacaagagcctgatcttcgtgctgatctggtgcctggtgatcttcctggccgaggtggccgccagcctggtggtgctgtggctgctgggcaacacccccctgcaggacaagggcaacagcacccacagccgcaacaacagctacgccgtgatcatcaccagcaccagcagctactacgtgttctacatctacgtgggcgtggccgacaccctgctggccatgggcttcttccgcggcctgcccctggtgcacaccctgatcaccgtgagcaagatcctgcaccacaagatgctgcacagcgtgctgcaggcccccatgagcaccctgaacaccctgaaggccggcggcatcctgaaccgcttcagcaaggacatcgccatcctggacgacctgctgcccctgaccatcttcgacttcatccagctgctgctgatcgtgatcggcgccatcgccgtggtggccgtgctgcagccctacatcttcgtggccaccgtgcccgtgatcgtggccttcatcatgctgcgcgcctacttcctgcagaccagccagcagctgaagcagctggagagcgagggccgcagccccatcttcacccacctggtgaccagcctgaagggcctgtggaccctgcgcgccttcggccgccagccctacttcgagaccctgttccacaaggccctgaacctgcacaccgccaactggttcctgtacctgagcaccctgcgctggttccagatgcgcatcgagatgatcttcgtgatcttcttcatcgccgtgaccttcatcagcatcctgaccaccggcgagggcgagggccgcgtgggcatcatcctgaccctggccatgaacatcatgagcaccctgcagtgggccgtgaacagcagcatcgacgtggacagcctgatgcgcagcgtgagccgcgtgttcaagttcatcgacatgcccaccgagggcaagcccaccaagagcaccaagccctacaagaacggccagctgagcaaggtgatgatcatcgagaacagccacgtgaagaaggacgacatctggcccagcggcggccagatgaccgtgaaggacctgaccgccaagtacaccgagggcggcaacgccatcctggagaacatcagcttcagcatcagccccggccagcgcgtgggcctgctgggccgcaccggcagcggcaagagcaccctgctgagcgccttcctgcgcctgctgaacaccgagggcgagatccagatcgacggcgtgagctgggacagcatcaccctgcagcagtggcgcaaggccttcggcgtgatcccccagaaggtgttcatcttcagcggcaccttccgcaagaacctggacccctacgagcagtggagcgaccaggagatctggaaggtggccgacgaggtgggcctgcgcagcgtgatcgagcagttccccggcaagctggacttcgtgctggtggacggcggctgcgtgctgagccacggccacaagcagctgatgtgcctggcccgcagcgtgctgagcaaggccaagatcctgctgctggacgagcccagcgcccacctggaccccgtgacctaccagatcatccgccgcaccctgaagcaggccttcgccgactgcaccgtgatcctgtgcgagcaccgcatcgaggccatgctggagtgccagcagttcctggtgatcgaggagaacaaggtgcgccagtacgacagcatccagaagctgctgaacgagcgcagcctgttccgccaggccatcagccccagcgaccgcgtgaagctgttcccccaccgcaacagcagcaagtgcaagagcaagccccagatcgccgccctgaag

SEQ ID NO: 1452 - DNA, 4257 bp, synthetic construct
  misc_feature 1..4257: note = source = /note="Description of Artificial Sequence: Synthetic coding sequence"
  source 1..4257: mol_type = other DNA
atgcagcgcagccccctggagaaggccagcgtggtgagcaagctgttcttcagctggacccgccccatcctgcgcaagggctaccgccagcgcctggagctgagcgacatctaccagatccccagcgtggacagcgccgacaacctgagcgagaagctggagcgcgagtgggaccgcgagctggccagcaagaagaaccccaagctgatcaacgccctgcgccgctgcttcttctggcgcttcatgttctacggcatcttcctgtacctgggcgaggtgaccaaggccgtgcagcccctgctgctgggccgcatcatcgccagctacgaccccgacaacaaggaggagcgcagcatcgccatctacctgggcatcggcctgtgcctgctgttcatcgtgcgcaccctgctgctgcaccccgccatcttcggcctgcaccacatcggcatgcagatgcgcatcgccatgttcagcctgatctacaagaagaccctgaagctgagcagccgcgtgctggacaagatcagcatcggccagctggtgagcctgctgagcaacaacctgaacaagttcgacgagggcctggccctggcccacttcgtgtggatcgcccccctgcaggtggccctgctgatgggcctgatctgggagctgctgcaggccagcgccttctgcggcctgggcttcctgatcgtgctggccctgttccaggccggcctgggccgcatgatgatgaagtaccgcgaccagcgcgccggcaagatcagcgagcgcctggtgatcaccagcgagatgatcgagaacatccagagcgtgaaggcctactgctgggaggaggccatggagaagatgatcgagaacctgcgccagaccgagctgaagctgacccgcaaggccgcctacgtgcgctacttcaacagcagcgccttcttcttcagcggcttcttcgtggtgttcctgagcgtgctgccctacgccctgatcaagggcatcatcctgcgcaagatcttcaccaccatcagcttctgcatcgtgctgcgcatggccgtgacccgccagttcccctgggccgtgcagacctggtacgacagcctgggcgccatcaacaagatccaggacttcctgcagaagcaggagtacaagaccctggagtacaacctgaccaccaccgaggtggtgatggagaacgtgaccgccttctgggaggagaccagcctgctgatggtgatcatgggcgagctggagcccagcgagggcaagatcaagcacagcggccgcatcagcttctgcagccagttcagctggatcatgcccggcaccatcaaggagaacatcatcttcggcgtgagctacgacgagtaccgctaccgcagcgtgatcaaggcctgccagctggaggaggacatcagcaagttcgccgagaaggacaacatcgtgctgggcgagggcggcatcaccctgagcggcggccagcgcgcccgcatcagcctggcccgcgccgtgtacaaggacgccgacctgtacctgctggacagccccttcggctacctggacgtgctgaccgagaaggagatcttcgagagctgcgtgtgcaagctgatggccaacaagacccgcatcctggtgaccagcaagatggagcacctgaagaaggccgacaagatcctgatcctgcacgagggcagcagctacttctacggcaccttcagcgagctgcagaacctgcagcccgacttcagcagcaagctgatgggctgcgacagcttcgaccagttcagcgccgagcgccgcaacagcatcctgaccgagaccctgcaccgcttcagcctggagggcgacgcccccgtgagctggaccgagaccaagaagcagagcttcaagcagaccggcgagttcggcgagaagcgcaagaacagcatcctgaaccccatcaacagcatccgcaagttcagcatcgtgcagaagacccccctgcagatgaacggcatcgaggaggacagcgacgagcccctggagcgccgcctgagcctggtgcccgacagcgagcagggcgaggccatcctgccccgcatcagcgtgatcagcaccggccccaccctgcaggcccgccgccgccagagcgtgctgaacctgatgacccacagcgtgaaccagggccagaacatccaccgcaagaccaccgccagcacccgcaaggtgagcctggccccccaggccaacctgaccgagctggacatctacagccgccgcctgagccaggagaccggcctggagatcagcgaggagatcaacgaggaggacctgaaggagtgcttcttcgacgacatggagagcatccccgccgtgaccacctggaacacctacctgcgctacatcaccgtgcacaagagcctgatcttcgtgctgatctggtgcctggtgatcttcctggccgaggtggccgccagcctggtggtgctgtggctgctgggcaacacccccctgcaggacaagggcaacagcacccacagccgcaacaacagctacgccgtgatcatcaccagcaccagcagctactacgtgttctacatctacgtgggcgtggccgacaccctgctggccatgggcttcttccgcggcctgcccctggtgcacaccctgatcaccgtgagcaagatcctgcaccacaagatgctgcacagcgtgctgcaggcccccatgagcaccctgaacaccctgaaggccggcggcatcctgaaccgcttcagcaaggacatcgccatcctggacgacctgctgcccctgaccatcttcgacttcatccagctgctgctgatcgtgatcggcgccatcgccgtggtggccgtgctgcagccctacatcttcgtggccaccgtgcccgtgatcgtggccttcatcatgctgcgcgcctacttcctgcagaccagccagcagctgaagcagctggagagcgagggccgcagccccatcttcacccacctggtgaccagcctgaagggcctgtggaccctgcgcgccttcggccgccagccctacttcgagaccctgttccacaaggccctgaacctgcacaccgccaactggttcctgtacctgagcaccctgcgctggttccagatgcgcatcgagatgatcttcgtgatcttcttcatcgccgtgaccttcatcagcatcctgaccaccggcgagggcgagggccgcgtgggcatcatcctgaccctggccatgaacatcatgagcaccctgcagtgggccgtgaacagcagcatcgacgtggacagcctgatgcgcagcgtgagccgcgtgttcaagttcatcgacatgcccaccgagggcaagcccaccaagagcaccaagccctacaagaacggccagctgagcaaggtgatgatcatcgagaacagccacgtgaagaaggacgacatctggcccagcggcggccagatgaccgtgaaggacctgaccgccaagtacaccgagggcggcaacgccatcctggagaacatcagcttcagcatcagccccggccagcgcgtgggcctgctgggccgcaccggcagcggcaagagcaccctgctgagcgccttcctgcgcctgctgaacaccgagggcgagatccagatcgacggcgtgagctgggacagcatcaccctgcagcagtggcgcaaggccttcggcgtgatcccccagaaggtgttcatcttcagcggcaccttccgcaagaacctggacccctacgagcagtggagcgaccaggagatctggaaggtggccgacgaggtgggcctgcgcagcgtgatcgagcagttccccggcaagctggacttcgtgctggtggacggcggctgcgtgctgagccacggccacaagcagctgatgtgcctggcccgcagcgtgctgagcaaggccaagatcctgctgctggacgagcccagcgcccacctggaccccgtgacctaccagatcatccgccgcaccctgaagcaggccttcgccgactgcaccgtgatcctgtgcgagcaccgcatcgaggccatgctggagtgccagcagttcctggtgatcgaggagaacaaggtgcgccagtacgacagcatccagaagctgctgaacgagcgcagcctgttccgccaggccatcagccccagcgaccgcgtgaagctgttcccccaccgcaacagcagcaagtgcaagagcaagccccagatcgccgccctgaaggaggagaccgaggaggaggtgcaggacacccgcctg

SEQ ID NO: 1453 - DNA, 567 bp, synthetic construct
  misc_feature 1..567: note = source = /note="Description of Artificial Sequence: Synthetic coding sequence"
  source 1..567: mol_type = other DNA
aagggcctgtggaccctgcgcgccttcggccgccagccctacttcgagaccctgttccacaaggccctgaacctgcacaccgccaactggttcctgtacctgagcaccctgcgctggttccagatgcgcatcgagatgatcttcgtgatcttcttcatcgccgtgaccttcatcagcatcctgaccaccggcgagggcgagggccgcgtgggcatcatcctgaccctggccatgaacatcatgagcaccctgcagtgggccgtgaacagcagcatcgacgtggacagcctgatgcgcagcgtgagccgcgtgttcaagttcatcgacatgcccaccgagggcaagcccaccaagagcaccaagccctacaagaacggccagctgagcaaggtgatgatcatcgagaacagccacgtgaagaaggacgacatctggcccagcggcggccagatgaccgtgaaggacctgaccgccaagtacaccgagggcggcaacgccatcctggagaacatcagcttcagcatcagccccggccagcgcgtgcgcttcgagcactgcctgctgtgc

SEQ ID NO: 1454 - DNA, 1101 bp, synthetic construct
  misc_feature 1..1101: note = source = /note="Description of Artificial Sequence: Synthetic coding sequence"
  source 1..1101: mol_type = other DNA
atgatccgcaactggctgaccatcttcatcctgttccccctgaagctggtggagaagtgcgagagcagcgtgagcctgaccgtgccccccgtggtgaagctggagaacggcagcagcaccaacgtgagcctgaccctgcgcccccccctgaacgccaccctggtgatcaccttcgagatcaccttccgcagcaagaacatcaccatcctggagctgcccgacgaggtggtggtgccccccggcgtgaccaacagcagcttccaggtgaccagccagaacgtgggccagctgaccgtgtacctgcacggcaaccacagcaaccagaccggcccccgcatccgcttcctggtgatccgcagcagcgccatcagcatcatcaaccaggtgatcggctggatctacttcgtggcctggagcatcagcttctacccccaggtgatcatgaactggcgccgcaagagcgtgatcggcctgagcttcgacttcgtggccctgaacctgaccggcttcgtggcctacagcgtgttcaacatcggcctgctgtgggtgccctacatcaaggagcagttcctgctgaagtaccccaacggcgtgaaccccgtgaacagcaacgacgtgttcttcagcctgcacgccgtggtgctgaccctgatcatcatcgtgcagtgctgcctgtacgagcgcggcggccagcgcgtgagctggcccgccatcggcttcctggtgctggcctggctgttcgccttcgtgaccatgatcgtggccgccgtgggcgtgaccacctggctgcagttcctgttctgcttcagctacatcaagctggccgtgaccctggtgaagtacttcccccaggcctacatgaacttctactacaagagcaccgagggctggagcatcggcaacgtgctgctggacttcaccggcggcagcttcagcctgctgcagatgttcctgcagagctacaacaacgaccagtggaccctgatcttcggcgaccccaccaagttcggcctgggcgtgttcagcatcgtgttcgacgtggtgttcttcatccagcacttctgcctgtaccgcaagcgccccggctacgaccagctgaac

SEQ ID NO: 1455 - DNA, 660 bp, synthetic construct
  misc_feature 1..660: note = source = /note="Description of Artificial Sequence: Synthetic coding sequence"
  source 1..660: mol_type = other DNA
atgaactggcgccgcaagagcgtgatcggcctgagcttcgacttcgtggccctgaacctgaccggcttcgtggcctacagcgtgttcaacatcggcctgctgtgggtgccctacatcaaggagcagttcctgctgaagtaccccaacggcgtgaaccccgtgaacagcaacgacgtgttcttcagcctgcacgccgtggtgctgaccctgatcatcatcgtgcagtgctgcctgtacgagcgcggcggccagcgcgtgagctggcccgccatcggcttcctggtgctggcctggctgttcgccttcgtgaccatgatcgtggccgccgtgggcgtgaccacctggctgcagttcctgttctgcttcagctacatcaagctggccgtgaccctggtgaagtacttcccccaggcctacatgaacttctactacaagagcaccgagggctggagcatcggcaacgtgctgctggacttcaccggcggcagcttcagcctgctgcagatgttcctgcagagctacaacaacgaccagtggaccctgatcttcggcgaccccaccaagttcggcctgggcgtgttcagcatcgtgttcgacgtggtgttcttcatccagcacttctgcctgtaccgcaagcgccccggctacgaccagctgaac

SEQ ID NO: 1456 - DNA, 876 bp, synthetic construct
  misc_feature 1..876: note = source = /note="Description of Artificial Sequence: Synthetic coding sequence"
  source 1..876: mol_type = other DNA
atgtgcccccgcatccgcttcctggtgatccgcagcagcgccatcagcatcatcaaccaggtgatcggctggatctacttcgtggcctggagcatcagcttctacccccaggtgatcatgaactggcgccgcaagagcgtgatcggcctgagcttcgacttcgtggccctgaacctgaccggcttcgtggcctacagcgtgttcaacatcggcctgctgtgggtgccctacatcaaggagcagttcctgctgaagtaccccaacggcgtgaaccccgtgaacagcaacgacgtgttcttcagcctgcacgccgtggtgctgaccctgatcatcatcgtgcagtgctgcctgtacgagcgcggcggccagcgcgtgagctggcccgccatcggcttcctggtgctggcctggctgttcgccttcgtgaccatgatcgtggccgccgtgggcgtgaccacctggctgcagttcctgttctgcttcagctacatcaagctggccgtgaccctggtgaagtacttcccccaggcctacatgaacttctactacaagagcaccgagggctggagcatcggcaacgtgctgctggacttcaccggcggcagcttcagcctgctgcagatgttcctgcagagctacaacaacgaccagtggaccctgatcttcggcgaccccaccaagttcggcctgggcgtgttcagcatcgtgttcgacgtggtgttcttcatccagcacttctgcctgtaccgcaagcgccccggcctgcaggccgcccgcaccggcagcggcagccgcctgcgccaggactgggcccccagcctgcagcccaaggccctgccccagaccaccagcgtgagcgccagcagcctgaagggc

SEQ ID NO: 1457 - DNA, 225 bp, synthetic construct
  misc_feature 1..225: note = source = /note="Description of Artificial Sequence: Synthetic coding sequence"
  source 1..225: mol_type = other DNA
atgatccgcaactggctgaccatcttcatcctgttccccctgaagctggtggagaagtgcgagagcagcgtgagcctgaccgtgccccccgtggtgaagctggagaacggcagcagcaccaacgtgagcctgaccctgcgcccccccctgaacgccaccctggtgatcaccttcgagatcaccttccgcagcaagaacatcaccatcctggagctgcccgacgag

SEQ ID NO: 1458 - DNA, 6240 bp, synthetic construct
  misc_feature 1..6240: note = source = /note="Description of Artificial Sequence: Synthetic coding sequence"
  source 1..6240: mol_type = other DNA
atgctgcgcgtgttcatcctgtacgccgagaacgtgcacacccccgacaccgacatcagcgacgcctactgcagcgccgtgttcgccggcgtgaagaagcgcaccaaggtgatcaagaacagcgtgaaccccgtgtggaacgagggcttcgagtgggacctgaagggcatccccctggaccagggcagcgagctgcacgtggtggtgaaggaccacgagaccatgggccgcaaccgcttcctgggcgaggccaaggtgcccctgcgcgaggtgctggccacccccagcctgagcgccagcttcaacgcccccctgctggacaccaagaagcagcccaccggcgccagcctggtgctgcaggtgagctacacccccctgcccggcgccgtgcccctgttccccccccccacccccctggagcccagccccaccctgcccgacctggacgtggtggccgacaccggcggcgaggaggacaccgaggaccagggcctgaccggcgacgaggccgagcccttcctggaccagagcggcggccccggcgcccccaccaccccccgcaagctgcccagccgcccccccccccactaccccggcatcaagcgcaagcgcagcgcccccaccagccgcaagctgctgagcgacaagccccaggacttccagatccgcgtgcaggtgatcgagggccgccagctgcccggcgtgaacatcaagcccgtggtgaaggtgaccgccgccggccagaccaagcgcacccgcatccacaagggcaacagccccctgttcaacgagaccctgttcttcaacctgttcgacagccccggcgagctgttcgacgagcccatcttcatcaccgtggtggacagccgcagcctgcgcaccgacgccctgctgggcgagttccgcatggacgtgggcaccatctaccgcgagccccgccacgcctacctgcgcaagtggctgctgctgagcgaccccgacgacttcagcgccggcgcccgcggctacctgaagaccagcctgtgcgtgctgggccccggcgacgaggcccccctggagcgcaaggaccccagcgaggacaaggaggacatcgagagcaacctgctgcgccccaccggcgtggccctgcgcggcgcccacttctgcctgaaggtgttccgcgccgaggacctgccccagatggacgacgccgtgatggacaacgtgaagcagatcttcggcttcgagagcaacaagaagaacctggtggaccccttcgtggaggtgagcttcgccggcaagatgctgtgcagcaagatcctggagaagaccgccaacccccagtggaaccagaacatcaccctgcccgccatgttccccagcatgtgcgagaagatgcgcatccgcatcatcgactgggaccgcctgacccacaacgacatcgtggccaccacctacctgagcatgagcaagatcagcgcccccggcggcgagatcgaggaggagcccgccggcgccgtgaagcccagcaaggccagcgacctggacgactacctgggcttcctgcccaccttcggcccctgctacatcaacctgtacggcagcccccgcgagttcaccggcttccccgacccctacaccgagctgaacaccggcaagggcgagggcgtggcctaccgcggccgcctgctgctgagcctggagaccaagctggtggagcacagcgagcagaaggtggaggacctgcccgccgacgacatcctgcgcgtggagaagtacctgcgccgccgcaagtacagcctgttcgccgccttctacagcgccaccatgctgcaggacgtggacgacgccatccagttcgaggtgagcatcggcaactacggcaacaagttcgacatgacctgcctgcccctggccagcaccacccagtacagccgcgccgtgttcgacggctgccactactactacctgccctggggcaacgtgaagcccgtggtggtgctgagcagctactgggaggacatcagccaccgcatcgagacccagaaccagctgctgggcatcgccgaccgcctggaggccggcctggagcaggtgcacctggccctgaaggcccagtgcagcaccgaggacgtggacagcctggtggcccagctgaccgacgagctgatcgccggctgcagccagcccctgggcgacatccacgagacccccagcgccacccacctggaccagtacctgtaccagctgcgcacccaccacctgagccagatcaccgaggccgccctggccctgaagctgggccacagcgagctgcccgccgccctggagcaggccgaggactggctgctgcgcctgcgcgccctggccgaggagccccagaacagcctgcccgacatcgtgatctggatgctgcagggcgacaagcgcgtggcctaccagcgcgtgcccgcccaccaggtgctgttcagccgccgcggcgccaactactgcggcaagaactgcggcaagctgcagaccatcttcctgaagtaccccatggagaaggtgcccggcgcccgcatgcccgtgcagatccgcgtgaagctgtggttcggcctgagcgtggacgagaaggagttcaaccagttcgccgagggcaagctgagcgtgttcgccgagacctacgagaacgagaccaagctggccctggtgggcaactggggcaccaccggcctgacctaccccaagttcagcgacgtgaccggcaagatcaagctgcccaaggacagcttccgccccagcgccggctggacctgggccggcgactggttcgtgtgccccgagaagaccctgctgcacgacatggacgccggccacctgagcttcgtggaggaggtgttcgagaaccagacccgcctgcccggcggccagtggatctacatgagcgacaactacaccgacgtgaacggcgagaaggtgctgcccaaggacgacatcgagtgccccctgggctggaagtgggaggacgaggagtggagcaccgacctgaaccgcgccgtggacgagcagggctgggagtacagcatcaccatcccccccgagcgcaagcccaagcactgggtgcccgccgagaagatgtactacacccaccgccgccgccgctgggtgcgcctgcgccgccgcgacctgagccagatggaggccctgaagcgccaccgccaggccgaggccgagggcgagggctgggagtacgccagcctgttcggctggaagttccacctggagtaccgcaagaccgacgccttccgccgccgccgctggcgccgccgcatggagcccctggagaagaccggccccgccgccgtgttcgccctggagggcgccctgggcggcgtgatggacgacaagagcgaggacagcatgagcgtgagcaccctgagcttcggcgtgaaccgccccaccatcagctgcatcttcgactacggcaaccgctaccacctgcgctgctacatgtaccaggcccgcgacctggccgccatggacaaggacagcttcagcgacccctacgccatcgtgagcttcctgcaccagagccagaagaccgtggtggtgaagaacaccctgaaccccacctgggaccagaccctgatcttctacgagatcgagatcttcggcgagcccgccaccgtggccgagcagccccccagcatcgtggtggagctgtacgaccacgacacctacggcgccgacgagttcatgggccgctgcatctgccagcccagcctggagcgcatgccccgcctggcctggttccccctgacccgcggcagccagcccagcggcgagctgctggccagcttcgagctgatccagcgcgagaagcccgccatccaccacatccccggcttcgaggtgcaggagaccagccgcatcctggacgagagcgaggacaccgacctgccctacccccccccccagcgcgaggccaacatctacatggtgccccagaacatcaagcccgccctgcagcgcaccgccatcgagatcctggcctggggcctgcgcaacatgaagagctaccagctggccaacatcagcagccccagcctggtggtggagtgcggcggccagaccgtgcagagctgcgtgatccgcaacctgcgcaagaaccccaacttcgacatctgcaccctgttcatggaggtgatgctgccccgcgaggagctgtactgcccccccatcaccgtgaaggtgatcgacaaccgccagttcggccgccgccccgtggtgggccagtgcaccatccgcagcctggagagcttcctgtgcgacccctacagcgccgagagccccagcccccagggcggccccgacgacgtgagcctgctgagccccggcgaggacgtgctgatcgacatcgacgacaaggagcccctgatccccatccaggaggaggagttcatcgactggtggagcaagttcttcgccagcatcggcgagcgcgagaagtgcggcagctacctggagaaggacttcgacaccctgaaggtgtacgacacccagctggagaacgtggaggccttcgagggcctgagcgacttctgcaacaccttcaagctgtaccgcggcaagacccaggaggagaccgaggaccccagcgtgatcggcgagttcaagggcctgttcaagatctaccccctgcccgaggaccccgccatccccatgcccccccgccagttccaccagctggccgcccagggcccccaggagtgcctggtgcgcatctacatcgtgcgcgccttcggcctgcagcccaaggaccccaacggcaagtgcgacccctacatcaagatcagcatcggcaagaagagcgtgagcgaccaggacaactacatcccctgcaccctggagcccgtgttcggcaagatgttcgagctgacctgcaccctgcccctggagaaggacctgaagatcaccctgtacgactacgacctgctgagcaaggacgagaagatcggcgagaccgtggtggacctggagaaccgcctgctgagcaagttcggcgcccgctgcggcctgccccagacctactgcgtgagcggccccaaccagtggcgcgaccagctgcgccccagccagctgctgcacctgttctgccagcagcaccgcgtgaaggcccccgtgtaccgcaccgaccgcgtgatgttccaggacaaggagtacagcatcgaggagatcgaggccggccgcatccccaacccccacctgggccccgtggaggagcgcctggccctgcacgtgctgcagcagcagggcctggtgcccgagcacgtggagagccgccccctgtacagccccctgcagcccgacatcgagcagggcaagctgcagatgtgggtggacctgttccccaaggccctgggccgccccggcccccccttcaacatcaccccccgccgcgcccgccgcttcttcctgcgctgcatcatctggaacacccgcgacgtgatcctggacgacctgagcctgaccggcgagaagatgagcgacatctacgtgaagggctggatgatcggcttcgaggagcacaagcagaagaccgacgtgcactaccgcagcctgggcggcgagggcaacttcaactggcgcttcatcttccccttcgactacctgcccgccgagcaggtgtgcaccatcgccaagaaggacgccttctggcgcctggacaagaccgagagcaagatccccgcccgcgtggtgttccagatctgggacaacgacaagttcagcttcgacgacttcctgggcagcctgcagctggacctgaaccgcatgcccaagcccgccaagaccgccaagaagtgcagcctggaccagctggacgacgccttccaccccgagtggttcgtgagcctgttcgagcagaagaccgtgaagggctggtggccctgcgtggccgaggagggcgagaagaagatcctggccggcaagctggagatgaccctggagatcgtggccgagagcgagcacgaggagcgccccgccggccagggccgcgacgagcccaacatgaaccccaagctggaggacccccgccgccccgacaccagcttcctgtggttcaccagcccctacaagaccatgaagttcatcctgtggcgccgcttccgctgggccatcatcctgttcatcatcctgttcatcctgctgctgttcctggccatcttcatctacgccttccccaactacgccgccatgaagctggtgaagcccttcagc

SEQ ID NO: 1459 - DNA, 6243 bp, synthetic construct
  misc_feature 1..6243: note = source = /note="Description of Artificial Sequence: Synthetic coding sequence"
  source 1..6243: mol_type = other DNA
atgctgtgctgcctgctggtgcgcgccagcaacctgcccagcgccaagaaggaccgccgcagcgaccccgtggccagcctgaccttccgcggcgtgaagaagcgcaccaaggtgatcaagaacagcgtgaaccccgtgtggaacgagggcttcgagtgggacctgaagggcatccccctggaccagggcagcgagctgcacgtggtggtgaaggaccacgagaccatgggccgcaaccgcttcctgggcgaggccaaggtgcccctgcgcgaggtgctggccacccccagcctgagcgccagcttcaacgcccccctgctggacaccaagaagcagcccaccggcgccagcctggtgctgcaggtgagctacacccccctgcccggcgccgtgcccctgttccccccccccacccccctggagcccagccccaccctgcccgacctggacgtggtggccgacaccggcggcgaggaggacaccgaggaccagggcctgaccggcgacgaggccgagcccttcctggaccagagcggcggccccggcgcccccaccaccccccgcaagctgcccagccgcccccccccccactaccccggcatcaagcgcaagcgcagcgcccccaccagccgcaagctgctgagcgacaagccccaggacttccagatccgcgtgcaggtgatcgagggccgccagctgcccggcgtgaacatcaagcccgtggtgaaggtgaccgccgccggccagaccaagcgcacccgcatccacaagggcaacagccccctgttcaacgagaccctgttcttcaacctgttcgacagccccggcgagctgttcgacgagcccatcttcatcaccgtggtggacagccgcagcctgcgcaccgacgccctgctgggcgagttccgcatggacgtgggcaccatctaccgcgagccccgccacgcctacctgcgcaagtggctgctgctgagcgaccccgacgacttcagcgccggcgcccgcggctacctgaagaccagcctgtgcgtgctgggccccggcgacgaggcccccctggagcgcaaggaccccagcgaggacaaggaggacatcgagagcaacctgctgcgccccaccggcgtggccctgcgcggcgcccacttctgcctgaaggtgttccgcgccgaggacctgccccagatggacgacgccgtgatggacaacgtgaagcagatcttcggcttcgagagcaacaagaagaacctggtggaccccttcgtggaggtgagcttcgccggcaagatgctgtgcagcaagatcctggagaagaccgccaacccccagtggaaccagaacatcaccctgcccgccatgttccccagcatgtgcgagaagatgcgcatccgcatcatcgactgggaccgcctgacccacaacgacatcgtggccaccacctacctgagcatgagcaagatcagcgcccccggcggcgagatcgaggaggagcccgccggcgccgtgaagcccagcaaggccagcgacctggacgactacctgggcttcctgcccaccttcggcccctgctacatcaacctgtacggcagcccccgcgagttcaccggcttccccgacccctacaccgagctgaacaccggcaagggcgagggcgtggcctaccgcggccgcctgctgctgagcctggagaccaagctggtggagcacagcgagcagaaggtggaggacctgcccgccgacgacatcctgcgcgtggagaagtacctgcgccgccgcaagtacagcctgttcgccgccttctacagcgccaccatgctgcaggacgtggacgacgccatccagttcgaggtgagcatcggcaactacggcaacaagttcgacatgacctgcctgcccctggccagcaccacccagtacagccgcgccgtgttcgacggctgccactactactacctgccctggggcaacgtgaagcccgtggtggtgctgagcagctactgggaggacatcagccaccgcatcgagacccagaaccagctgctgggcatcgccgaccgcctggaggccggcctggagcaggtgcacctggccctgaaggcccagtgcagcaccgaggacgtggacagcctggtggcccagctgaccgacgagctgatcgccggctgcagccagcccctgggcgacatccacgagacccccagcgccacccacctggaccagtacctgtaccagctgcgcacccaccacctgagccagatcaccgaggccgccctggccctgaagctgggccacagcgagctgcccgccgccctggagcaggccgaggactggctgctgcgcctgcgcgccctggccgaggagccccagaacagcctgcccgacatcgtgatctggatgctgcagggcgacaagcgcgtggcctaccagcgcgtgcccgcccaccaggtgctgttcagccgccgcggcgccaactactgcggcaagaactgcggcaagctgcagaccatcttcctgaagtaccccatggagaaggtgcccggcgcccgcatgcccgtgcagatccgcgtgaagctgtggttcggcctgagcgtggacgagaaggagttcaaccagttcgccgagggcaagctgagcgtgttcgccgagacctacgagaacgagaccaagctggccctggtgggcaactggggcaccaccggcctgacctaccccaagttcagcgacgtgaccggcaagatcaagctgcccaaggacagcttccgccccagcgccggctggacctgggccggcgactggttcgtgtgccccgagaagaccctgctgcacgacatggacgccggccacctgagcttcgtggaggaggtgttcgagaaccagacccgcctgcccggcggccagtggatctacatgagcgacaactacaccgacgtgaacggcgagaaggtgctgcccaaggacgacatcgagtgccccctgggctggaagtgggaggacgaggagtggagcaccgacctgaaccgcgccgtggacgagcagggctgggagtacagcatcaccatcccccccgagcgcaagcccaagcactgggtgcccgccgagaagatgtactacacccaccgccgccgccgctgggtgcgcctgcgccgccgcgacctgagccagatggaggccctgaagcgccaccgccaggccgaggccgagggcgagggctgggagtacgccagcctgttcggctggaagttccacctggagtaccgcaagaccgacgccttccgccgccgccgctggcgccgccgcatggagcccctggagaagaccggccccgccgccgtgttcgccctggagggcgccctgggcggcgtgatggacgacaagagcgaggacagcatgagcgtgagcaccctgagcttcggcgtgaaccgccccaccatcagctgcatcttcgactacggcaaccgctaccacctgcgctgctacatgtaccaggcccgcgacctggccgccatggacaaggacagcttcagcgacccctacgccatcgtgagcttcctgcaccagagccagaagaccgtggtggtgaagaacaccctgaaccccacctgggaccagaccctgatcttctacgagatcgagatcttcggcgagcccgccaccgtggccgagcagccccccagcatcgtggtggagctgtacgaccacgacacctacggcgccgacgagttcatgggccgctgcatctgccagcccagcctggagcgcatgccccgcctggcctggttccccctgacccgcggcagccagcccagcggcgagctgctggccagcttcgagctgatccagcgcgagaagcccgccatccaccacatccccggcttcgaggtgcaggagaccagccgcatcctggacgagagcgaggacaccgacctgccctacccccccccccagcgcgaggccaacatctacatggtgccccagaacatcaagcccgccctgcagcgcaccgccatcgagatcctggcctggggcctgcgcaacatgaagagctaccagctggccaacatcagcagccccagcctggtggtggagtgcggcggccagaccgtgcagagctgcgtgatccgcaacctgcgcaagaaccccaacttcgacatctgcaccctgttcatggaggtgatgctgccccgcgaggagctgtactgcccccccatcaccgtgaaggtgatcgacaaccgccagttcggccgccgccccgtggtgggccagtgcaccatccgcagcctggagagcttcctgtgcgacccctacagcgccgagagccccagcccccagggcggccccgacgacgtgagcctgctgagccccggcgaggacgtgctgatcgacatcgacgacaaggagcccctgatccccatccaggaggaggagttcatcgactggtggagcaagttcttcgccagcatcggcgagcgcgagaagtgcggcagctacctggagaaggacttcgacaccctgaaggtgtacgacacccagctggagaacgtggaggccttcgagggcctgagcgacttctgcaacaccttcaagctgtaccgcggcaagacccaggaggagaccgaggaccccagcgtgatcggcgagttcaagggcctgttcaagatctaccccctgcccgaggaccccgccatccccatgcccccccgccagttccaccagctggccgcccagggcccccaggagtgcctggtgcgcatctacatcgtgcgcgccttcggcctgcagcccaaggaccccaacggcaagtgcgacccctacatcaagatcagcatcggcaagaagagcgtgagcgaccaggacaactacatcccctgcaccctggagcccgtgttcggcaagatgttcgagctgacctgcaccctgcccctggagaaggacctgaagatcaccctgtacgactacgacctgctgagcaaggacgagaagatcggcgagaccgtggtggacctggagaaccgcctgctgagcaagttcggcgcccgctgcggcctgccccagacctactgcgtgagcggccccaaccagtggcgcgaccagctgcgccccagccagctgctgcacctgttctgccagcagcaccgcgtgaaggcccccgtgtaccgcaccgaccgcgtgatgttccaggacaaggagtacagcatcgaggagatcgaggccggccgcatccccaacccccacctgggccccgtggaggagcgcctggccctgcacgtgctgcagcagcagggcctggtgcccgagcacgtggagagccgccccctgtacagccccctgcagcccgacatcgagcagggcaagctgcagatgtgggtggacctgttccccaaggccctgggccgccccggcccccccttcaacatcaccccccgccgcgcccgccgcttcttcctgcgctgcatcatctggaacacccgcgacgtgatcctggacgacctgagcctgaccggcgagaagatgagcgacatctacgtgaagggctggatgatcggcttcgaggagcacaagcagaagaccgacgtgcactaccgcagcctgggcggcgagggcaacttcaactggcgcttcatcttccccttcgactacctgcccgccgagcaggtgtgcaccatcgccaagaaggacgccttctggcgcctggacaagaccgagagcaagatccccgcccgcgtggtgttccagatctgggacaacgacaagttcagcttcgacgacttcctgggcagcctgcagctggacctgaaccgcatgcccaagcccgccaagaccgccaagaagtgcagcctggaccagctggacgacgccttccaccccgagtggttcgtgagcctgttcgagcagaagaccgtgaagggctggtggccctgcgtggccgaggagggcgagaagaagatcctggccggcaagctggagatgaccctggagatcgtggccgagagcgagcacgaggagcgccccgccggccagggccgcgacgagcccaacatgaaccccaagctggaggacccccgccgccccgacaccagcttcctgtggttcaccagcccctacaagaccatgaagttcatcctgtggcgccgcttccgctgggccatcatcctgttcatcatcctgttcatcctgctgctgttcctggccatcttcatctacgccttccccaactacgccgccatgaagctggtgaagcccttcagc

SEQ ID NO: 1460 - DNA, 6306 bp, synthetic construct
  misc_feature 1..6306: note = source = /note="Description of Artificial Sequence: Synthetic coding sequence"
  source 1..6306: mol_type = other DNA
atgctgtgctgcctgctggtgcgcgccagcaacctgcccagcgccaagaaggaccgccgcagcgaccccgtggccagcctgaccttccgcggcgtgaagaagcgcaccaaggtgatcaagaacagcgtgaaccccgtgtggaacgagggcttcgagtgggacctgaagggcatccccctggaccagggcagcgagctgcacgtggtggtgaaggaccacgagaccatgggccgcaaccgcttcctgggcgaggccaaggtgcccctgcgcgaggtgctggccacccccagcctgagcgccagcttcaacgcccccctgctggacaccaagaagcagcccaccggcgccagcctggtgctgcaggtgagctacacccccctgcccggcgccgtgcccctgttccccccccccacccccctggagcccagccccaccctgcccgacctggacgtggtggccgacaccggcggcgaggaggacaccgaggaccagggcctgaccggcgacgaggccgagcccttcctggaccagagcggcggccccggcgcccccaccaccccccgcaagctgcccagccgcccccccccccactaccccggcatcaagcgcaagcgcagcgcccccaccagccgcaagctgctgagcgacaagccccaggacttccagatccgcgtgcaggtgatcgagggccgccagctgcccggcgtgaacatcaagcccgtggtgaaggtgaccgccgccggccagaccaagcgcacccgcatccacaagggcaacagccccctgttcaacgagaccctgttcttcaacctgttcgacagccccggcgagctgttcgacgagcccatcttcatcaccgtggtggacagccgcagcctgcgcaccgacgccctgctgggcgagttccgcatggacgtgggcaccatctaccgcgagccccgccacgcctacctgcgcaagtggctgctgctgagcgaccccgacgacttcagcgccggcgcccgcggctacctgaagaccagcctgtgcgtgctgggccccggcgacgaggcccccctggagcgcaaggaccccagcgaggacaaggaggacatcgagagcaacctgctgcgccccaccggcgtggccctgcgcggcgcccacttctgcctgaaggtgttccgcgccgaggacctgccccagatggacgacgccgtgatggacaacgtgaagcagatcttcggcttcgagagcaacaagaagaacctggtggaccccttcgtggaggtgagcttcgccggcaagatgctgtgcagcaagatcctggagaagaccgccaacccccagtggaaccagaacatcaccctgcccgccatgttccccagcatgtgcgagaagatgcgcatccgcatcatcgactgggaccgcctgacccacaacgacatcgtggccaccacctacctgagcatgagcaagatcagcgcccccggcggcgagatcgaggaggagcccgccggcgccgtgaagcccagcaaggccagcgacctggacgactacctgggcttcctgcccaccttcggcccctgctacatcaacctgtacggcagcccccgcgagttcaccggcttccccgacccctacaccgagctgaacaccggcaagggcgagggcgtggcctaccgcggccgcctgctgctgagcctggagaccaagctggtggagcacagcgagcagaaggtggaggacctgcccgccgacgacatcctgcgcgtggagaagtacctgcgccgccgcaagtacagcctgttcgccgccttctacagcgccaccatgctgcaggacgtggacgacgccatccagttcgaggtgagcatcggcaactacggcaacaagttcgacatgacctgcctgcccctggccagcaccacccagtacagccgcgccgtgttcgacggctgccactactactacctgccctggggcaacgtgaagcccgtggtggtgctgagcagctactgggaggacatcagccaccgcatcgagacccagaaccagctgctgggcatcgccgaccgcctggaggccggcctggagcaggtgcacctggccctgaaggcccagtgcagcaccgaggacgtggacagcctggtggcccagctgaccgacgagctgatcgccggctgcagccagcccctgggcgacatccacgagacccccagcgccacccacctggaccagtacctgtaccagctgcgcacccaccacctgagccagatcaccgaggccgccctggccctgaagctgggccacagcgagctgcccgccgccctggagcaggccgaggactggctgctgcgcctgcgcgccctggccgaggagccccagaacagcctgcccgacatcgtgatctggatgctgcagggcgacaagcgcgtggcctaccagcgcgtgcccgcccaccaggtgctgttcagccgccgcggcgccaactactgcggcaagaactgcggcaagctgcagaccatcttcctgaagtaccccatggagaaggtgcccggcgcccgcatgcccgtgcagatccgcgtgaagctgtggttcggcctgagcgtggacgagaaggagttcaaccagttcgccgagggcaagctgagcgtgttcgccgagacctacgagaacgagaccaagctggccctggtgggcaactggggcaccaccggcctgacctaccccaagttcagcgacgtgaccggcaagatcaagctgcccaaggacagcttccgccccagcgccggctggacctgggccggcgactggttcgtgtgccccgagaagaccctgctgcacgacatggacgccggccacctgagcttcgtggaggaggtgttcgagaaccagacccgcctgcccggcggccagtggatctacatgagcgacaactacaccgacgtgaacggcgagaaggtgctgcccaaggacgacatcgagtgccccctgggctggaagtgggaggacgaggagtggagcaccgacctgaaccgcgccgtggacgagcagggctgggagtacagcatcaccatcccccccgagcgcaagcccaagcactgggtgcccgccgagaagatgtactacacccaccgccgccgccgctgggtgcgcctgcgccgccgcgacctgagccagatggaggccctgaagcgccaccgccaggccgaggccgagggcgagggctgggagtacgccagcctgttcggctggaagttccacctggagtaccgcaagaccgacgccttccgccgccgccgctggcgccgccgcatggagcccctggagaagaccggccccgccgccgtgttcgccctggagggcgccctgggcggcgtgatggacgacaagagcgaggacagcatgagcgtgagcaccctgagcttcggcgtgaaccgccccaccatcagctgcatcttcgactacggcaaccgctaccacctgcgctgctacatgtaccaggcccgcgacctggccgccatggacaaggacagcttcagcgacccctacgccatcgtgagcttcctgcaccagagccagaagaccgtggtggtgaagaacaccctgaaccccacctgggaccagaccctgatcttctacgagatcgagatcttcggcgagcccgccaccgtggccgagcagccccccagcatcgtggtggagctgtacgaccacgacacctacggcgccgacgagttcatgggccgctgcatctgccagcccagcctggagcgcatgccccgcctggcctggttccccctgacccgcggcagccagcccagcggcgagctgctggccagcttcgagctgatccagcgcgagaagcccgccatccaccacatccccggcttcgaggtgcaggagaccagccgcatcctggacgagagcgaggacaccgacctgccctacccccccccccagcgcgaggccaacatctacatggtgccccagaacatcaagcccgccctgcagcgcaccgccatcgagatcctggcctggggcctgcgcaacatgaagagctaccagctggccaacatcagcagccccagcctggtggtggagtgcggcggccagaccgtgcagagctgcgtgatccgcaacctgcgcaagaaccccaacttcgacatctgcaccctgttcatggaggtgatgctgccccgcgaggagctgtactgcccccccatcaccgtgaaggtgatcgacaaccgccagttcggccgccgccccgtggtgggccagtgcaccatccgcagcctggagagcttcctgtgcgacccctacagcgccgagagccccagcccccagggcggccccgacgacgtgagcctgctgagccccggcgaggacgtgctgatcgacatcgacgacaaggagcccctgatccccatccagctggccgacggcctgagcagcctggcccccaccaacaccgccagcccccccagcagcccccacgaggaggagttcatcgactggtggagcaagttcttcgccagcatcggcgagcgcgagaagtgcggcagctacctggagaaggacttcgacaccctgaaggtgtacgacacccagctggagaacgtggaggccttcgagggcctgagcgacttctgcaacaccttcaagctgtaccgcggcaagacccaggaggagaccgaggaccccagcgtgatcggcgagttcaagggcctgttcaagatctaccccctgcccgaggaccccgccatccccatgcccccccgccagttccaccagctggccgcccagggcccccaggagtgcctggtgcgcatctacatcgtgcgcgccttcggcctgcagcccaaggaccccaacggcaagtgcgacccctacatcaagatcagcatcggcaagaagagcgtgagcgaccaggacaactacatcccctgcaccctggagcccgtgttcggcaagatgttcgagctgacctgcaccctgcccctggagaaggacctgaagatcaccctgtacgactacgacctgctgagcaaggacgagaagatcggcgagaccgtggtggacctggagaaccgcctgctgagcaagttcggcgcccgctgcggcctgccccagacctactgcgtgagcggccccaaccagtggcgcgaccagctgcgccccagccagctgctgcacctgttctgccagcagcaccgcgtgaaggcccccgtgtaccgcaccgaccgcgtgatgttccaggacaaggagtacagcatcgaggagatcgaggccggccgcatccccaacccccacctgggccccgtggaggagcgcctggccctgcacgtgctgcagcagcagggcctggtgcccgagcacgtggagagccgccccctgtacagccccctgcagcccgacatcgagcagggcaagctgcagatgtgggtggacctgttccccaaggccctgggccgccccggcccccccttcaacatcaccccccgccgcgcccgccgcttcttcctgcgctgcatcatctggaacacccgcgacgtgatcctggacgacctgagcctgaccggcgagaagatgagcgacatctacgtgaagggctggatgatcggcttcgaggagcacaagcagaagaccgacgtgcactaccgcagcctgggcggcgagggcaacttcaactggcgcttcatcttccccttcgactacctgcccgccgagcaggtgtgcaccatcgccaagaaggacgccttctggcgcctggacaagaccgagagcaagatccccgcccgcgtggtgttccagatctgggacaacgacaagttcagcttcgacgacttcctgggcagcctgcagctggacctgaaccgcatgcccaagcccgccaagaccgccaagaagtgcagcctggaccagctggacgacgccttccaccccgagtggttcgtgagcctgttcgagcagaagaccgtgaagggctggtggccctgcgtggccgaggagggcgagaagaagatcctggccggcaagctggagatgaccctggagatcgtggccgagagcgagcacgaggagcgccccgccggccagggccgcgacgagcccaacatgaaccccaagctggaggacccccgccgccccgacaccagcttcctgtggttcaccagcccctacaagaccatgaagttcatcctgtggcgccgcttccgctgggccatcatcctgttcatcatcctgttcatcctgctgctgttcctggccatcttcatctacgccttccccaactacgccgccatgaagctggtgaagcccttcagc

SEQ ID NO: 1461 - DNA, 6354 bp, synthetic construct
  misc_feature 1..6354: note = source = /note="Description of Artificial Sequence: Synthetic coding sequence"
  source 1..6354: mol_type = other DNA
atgctgcgcgtgttcatcctgtacgccgagaacgtgcacacccccgacaccgacatcagcgacgcctactgcagcgccgtgttcgccggcgtgaagaagcgcaccaaggtgatcaagaacagcgtgaaccccgtgtggaacgagggcttcgagtgggacctgaagggcatccccctggaccagggcagcgagctgcacgtggtggtgaaggaccacgagaccatgggccgcaaccgcttcctgggcgaggccaaggtgcccctgcgcgaggtgctggccacccccagcctgagcgccagcttcaacgcccccctgctggacaccaagaagcagcccaccggcgccagcctggtgctgcaggtgagctacacccccctgcccggcgccgtgcccctgttccccccccccacccccctggagcccagccccaccctgcccgacctggacgtggtggccggcggcggccagagccgcgccgagacctggagcctgctgagcgacagcaccatggacacccgctacagcggcaagaagtggcccgcccccaccgacaccggcggcgaggaggacaccgaggaccagggcctgaccggcgacgaggccgagcccttcctggaccagagcggcggccccggcgcccccaccaccccccgcaagctgcccagccgcccccccccccactaccccggcatcaagcgcaagcgcagcgcccccaccagccgcaagctgctgagcgacaagccccaggacttccagatccgcgtgcaggtgatcgagggccgccagctgcccggcgtgaacatcaagcccgtggtgaaggtgaccgccgccggccagaccaagcgcacccgcatccacaagggcaacagccccctgttcaacgagaccctgttcttcaacctgttcgacagccccggcgagctgttcgacgagcccatcttcatcaccgtggtggacagccgcagcctgcgcaccgacgccctgctgggcgagttccgcatggacgtgggcaccatctaccgcgagccccgccacgcctacctgcgcaagtggctgctgctgagcgaccccgacgacttcagcgccggcgcccgcggctacctgaagaccagcctgtgcgtgctgggccccggcgacgaggcccccctggagcgcaaggaccccagcgaggacaaggaggacatcgagagcaacctgctgcgccccaccggcgtggccctgcgcggcgcccacttctgcctgaaggtgttccgcgccgaggacctgccccagatggacgacgccgtgatggacaacgtgaagcagatcttcggcttcgagagcaacaagaagaacctggtggaccccttcgtggaggtgagcttcgccggcaagatgctgtgcagcaagatcctggagaagaccgccaacccccagtggaaccagaacatcaccctgcccgccatgttccccagcatgtgcgagaagatgcgcatccgcatcatcgactgggaccgcctgacccacaacgacatcgtggccaccacctacctgagcatgagcaagatcagcgcccccggcggcgagatcgaggtggacgactacctgggcttcctgcccaccttcggcccctgctacatcaacctgtacggcagcccccgcgagttcaccggcttccccgacccctacaccgagctgaacaccggcaagggcgagggcgtggcctaccgcggccgcctgctgctgagcctggagaccaagctggtggagcacagcgagcagaaggtggaggacctgcccgccgacgacatcctgcgcgtggagaagtacctgcgccgccgcaagtacagcctgttcgccgccttctacagcgccaccatgctgcaggacgtggacgacgccatccagttcgaggtgagcatcggcaactacggcaacaagttcgacatgacctgcctgcccctggccagcaccacccagtacagccgcgccgtgttcgacggctgccactactactacctgccctggggcaacgtgaagcccgtggtggtgctgagcagctactgggaggacatcagccaccgcatcgagacccagaaccagctgctgggcatcgccgaccgcctggaggccggcctggagcaggtgcacctggccctgaaggcccagtgcagcaccgaggacgtggacagcctggtggcccagctgaccgacgagctgatcgccggctgcagccagcccctgggcgacatccacgagacccccagcgccacccacctggaccagtacctgtaccagctgcgcacccaccacctgagccagatcaccgaggccgccctggccctgaagctgggccacagcgagctgcccgccgccctggagcaggccgaggactggctgctgcgcctgcgcgccctggccgaggagccccagaacagcctgcccgacatcgtgatctggatgctgcagggcgacaagcgcgtggcctaccagcgcgtgcccgcccaccaggtgctgttcagccgccgcggcgccaactactgcggcaagaactgcggcaagctgcagaccatcttcctgaagtaccccatggagaaggtgcccggcgcccgcatgcccgtgcagatccgcgtgaagctgtggttcggcctgagcgtggacgagaaggagttcaaccagttcgccgagggcaagctgagcgtgttcgccgagacctacgagaacgagaccaagctggccctggtgggcaactggggcaccaccggcctgacctaccccaagttcagcgacgtgaccggcaagatcaagctgcccaaggacagcttccgccccagcgccggctggacctgggccggcgactggttcgtgtgccccgagaagaccctgctgcacgacatggacgccggccacctgagcttcgtggaggaggtgttcgagaaccagacccgcctgcccggcggccagtggatctacatgagcgacaactacaccgacgtgaacggcgagaaggtgctgcccaaggacgacatcgagtgccccctgggctggaagtgggaggacgaggagtggagcaccgacctgaaccgcgccgtggacgagcagggctgggagtacagcatcaccatcccccccgagcgcaagcccaagcactgggtgcccgccgagaagatgtactacacccaccgccgccgccgctgggtgcgcctgcgccgccgcgacctgagccagatggaggccctgaagcgccaccgccaggccgaggccgagggcgagggctgggagtacgccagcctgttcggctggaagttccacctggagtaccgcaagaccgacgccttccgccgccgccgctggcgccgccgcatggagcccctggagaagaccggccccgccgccgtgttcgccctggagggcgccctgggcggcgtgatggacgacaagagcgaggacagcatgagcgtgagcaccctgagcttcggcgtgaaccgccccaccatcagctgcatcttcgactacggcaaccgctaccacctgcgctgctacatgtaccaggcccgcgacctggccgccatggacaaggacagcttcagcgacccctacgccatcgtgagcttcctgcaccagagccagaagaccgtggtggtgaagaacaccctgaaccccacctgggaccagaccctgatcttctacgagatcgagatcttcggcgagcccgccaccgtggccgagcagccccccagcatcgtggtggagctgtacgaccacgacacctacggcgccgacgagttcatgggccgctgcatctgccagcccagcctggagcgcatgccccgcctggcctggttccccctgacccgcggcagccagcccagcggcgagctgctggccagcttcgagctgatccagcgcgagaagcccgccatccaccacatccccggcttcgaggtgcaggagaccagccgcatcctggacgagagcgaggacaccgacctgccctacccccccccccagcgcgaggccaacatctacatggtgccccagaacatcaagcccgccctgcagcgcaccgccatcgagatcctggcctggggcctgcgcaacatgaagagctaccagctggccaacatcagcagccccagcctggtggtggagtgcggcggccagaccgtgcagagctgcgtgatccgcaacctgcgcaagaaccccaacttcgacatctgcaccctgttcatggaggtgatgctgccccgcgaggagctgtactgcccccccatcaccgtgaaggtgatcgacaaccgccagttcggccgccgccccgtggtgggccagtgcaccatccgcagcctggagagcttcctgtgcgacccctacagcgccgagagccccagcccccagggcggccccgacgacgtgagcctgctgagccccggcgaggacgtgctgatcgacatcgacgacaaggagcccctgatccccatccagctggccgacggcctgagcagcctggcccccaccaacaccgccagcccccccagcagcccccacgaggaggagttcatcgactggtggagcaagttcttcgccagcatcggcgagcgcgagaagtgcggcagctacctggagaaggacttcgacaccctgaaggtgtacgacacccagctggagaacgtggaggccttcgagggcctgagcgacttctgcaacaccttcaagctgtaccgcggcaagacccaggaggagaccgaggaccccagcgtgatcggcgagttcaagggcctgttcaagatctaccccctgcccgaggaccccgccatccccatgcccccccgccagttccaccagctggccgcccagggcccccaggagtgcctggtgcgcatctacatcgtgcgcgccttcggcctgcagcccaaggaccccaacggcaagtgcgacccctacatcaagatcagcatcggcaagaagagcgtgagcgaccaggacaactacatcccctgcaccctggagcccgtgttcggcaagatgttcgagctgacctgcaccctgcccctggagaaggacctgaagatcaccctgtacgactacgacctgctgagcaaggacgagaagatcggcgagaccgtggtggacctggagaaccgcctgctgagcaagttcggcgcccgctgcggcctgccccagacctactgcgtgagcggccccaaccagtggcgcgaccagctgcgccccagccagctgctgcacctgttctgccagcagcaccgcgtgaaggcccccgtgtaccgcaccgaccgcgtgatgttccaggacaaggagtacagcatcgaggagatcgaggccggccgcatccccaacccccacctgggccccgtggaggagcgcctggccctgcacgtgctgcagcagcagggcctggtgcccgagcacgtggagagccgccccctgtacagccccctgcagcccgacatcgagcagggcaagctgcagatgtgggtggacctgttccccaaggccctgggccgccccggcccccccttcaacatcaccccccgccgcgcccgccgcttcttcctgcgctgcatcatctggaacacccgcgacgtgatcctggacgacctgagcctgaccggcgagaagatgagcgacatctacgtgaagggctggatgatcggcttcgaggagcacaagcagaagaccgacgtgcactaccgcagcctgggcggcgagggcaacttcaactggcgcttcatcttccccttcgactacctgcccgccgagcaggtgtgcaccatcgccaagaaggacgccttctggcgcctggacaagaccgagagcaagatccccgcccgcgtggtgttccagatctgggacaacgacaagttcagcttcgacgacttcctgggcagcctgcagctggacctgaaccgcatgcccaagcccgccaagaccgccaagaagtgcagcctggaccagctggacgacgccttccaccccgagtggttcgtgagcctgttcgagcagaagaccgtgaagggctggtggccctgcgtggccgaggagggcgagaagaagatcctggccggcaagctggagatgaccctggagatcgtggccgagagcgagcacgaggagcgccccgccggccagggccgcgacgagcccaacatgaaccccaagctggaggacccccgccgccccgacaccagcttcctgtggttcaccagcccctacaagaccatgaagttcatcctgtggcgccgcttccgctgggccatcatcctgttcatcatcctgttcatcctgctgctgttcctggccatcttcatctacgccttccccaactacgccgccatgaagctggtgaagcccttcagc

SEQ ID NO: 1462 - DNA, 6336 bp, synthetic construct
  misc_feature 1..6336: note = source = /note="Description of Artificial Sequence: Synthetic coding sequence"
  source 1..6336: mol_type = other DNA
atgctgtgctgcctgctggtgcgcgccagcaacctgcccagcgccaagaaggaccgccgcagcgaccccgtggccagcctgaccttccgcggcgtgaagaagcgcaccaaggtgatcaagaacagcgtgaaccccgtgtggaacgagggcttcgagtgggacctgaagggcatccccctggaccagggcagcgagctgcacgtggtggtgaaggaccacgagaccatgggccgcaaccgcttcctgggcgaggccaaggtgcccctgcgcgaggtgctggccacccccagcctgagcgccagcttcaacgcccccctgctggacaccaagaagcagcccaccggcgccagcctggtgctgcaggtgagctacacccccctgcccggcgccgtgcccctgttccccccccccacccccctggagcccagccccaccctgcccgacctggacgtggtggccggcggcggccagagccgcgccgagacctggagcctgctgagcgacagcaccatggacacccgctacagcggcaagaagtggcccgcccccaccgacaccggcggcgaggaggacaccgaggaccagggcctgaccggcgacgaggccgagcccttcctggaccagagcggcggccccggcgcccccaccaccccccgcaagctgcccagccgcccccccccccactaccccggcatcaagcgcaagcgcagcgcccccaccagccgcaagctgctgagcgacaagccccaggacttccagatccgcgtgcaggtgatcgagggccgccagctgcccggcgtgaacatcaagcccgtggtgaaggtgaccgccgccggccagaccaagcgcacccgcatccacaagggcaacagccccctgttcaacgagaccctgttcttcaacctgttcgacagccccggcgagctgttcgacgagcccatcttcatcaccgtggtggacagccgcagcctgcgcaccgacgccctgctgggcgagttccgcatggacgtgggcaccatctaccgcgagccccgccacgcctacctgcgcaagtggctgctgctgagcgaccccgacgacttcagcgccggcgcccgcggctacctgaagaccagcctgtgcgtgctgggccccggcgacgaggcccccctggagcgcaaggaccccagcgaggacaaggaggacatcgagagcaacctgctgcgccccaccggcgtggccctgcgcggcgcccacttctgcctgaaggtgttccgcgccgaggacctgccccagatggacgacgccgtgatggacaacgtgaagcagatcttcggcttcgagagcaacaagaagaacctggtggaccccttcgtggaggtgagcttcgccggcaagatgctgtgcagcaagatcctggagaagaccgccaacccccagtggaaccagaacatcaccctgcccgccatgttccccagcatgtgcgagaagatgcgcatccgcatcatcgactgggaccgcctgacccacaacgacatcgtggccaccacctacctgagcatgagcaagatcagcgcccccggcggcgagatcgaggaggagcccgccggcgccgtgaagcccagcaaggccagcgacctggacgactacctgggcttcctgcccaccttcggcccctgctacatcaacctgtacggcagcccccgcgagttcaccggcttccccgacccctacaccgagctgaacaccggcaagggcgagggcgtggcctaccgcggccgcctgctgctgagcctggagaccaagctggtggagcacagcgagcagaaggtggaggacctgcccgccgacgacatcctgcgcgtggagaagtacctgcgccgccgcaagtacagcctgttcgccgccttctacagcgccaccatgctgcaggacgtggacgacgccatccagttcgaggtgagcatcggcaactacggcaacaagttcgacatgacctgcctgcccctggccagcaccacccagtacagccgcgccgtgttcgacggctgccactactactacctgccctggggcaacgtgaagcccgtggtggtgctgagcagctactgggaggacatcagccaccgcatcgagacccagaaccagctgctgggcatcgccgaccgcctggaggccggcctggagcaggtgcacctggccctgaaggcccagtgcagcaccgaggacgtggacagcctggtggcccagctgaccgacgagctgatcgccggctgcagccagcccctgggcgacatccacgagacccccagcgccacccacctggaccagtacctgtaccagctgcgcacccaccacctgagccagatcaccgaggccgccctggccctgaagctgggccacagcgagctgcccgccgccctggagcaggccgaggactggctgctgcgcctgcgcgccctggccgaggagccccagaacagcctgcccgacatcgtgatctggatgctgcagggcgacaagcgcgtggcctaccagcgcgtgcccgcccaccaggtgctgttcagccgccgcggcgccaactactgcggcaagaactgcggcaagctgcagaccatcttcctgaagtaccccatggagaaggtgcccggcgcccgcatgcccgtgcagatccgcgtgaagctgtggttcggcctgagcgtggacgagaaggagttcaaccagttcgccgagggcaagctgagcgtgttcgccgagacctacgagaacgagaccaagctggccctggtgggcaactggggcaccaccggcctgacctaccccaagttcagcgacgtgaccggcaagatcaagctgcccaaggacagcttccgccccagcgccggctggacctgggccggcgactggttcgtgtgccccgagaagaccctgctgcacgacatggacgccggccacctgagcttcgtggaggaggtgttcgagaaccagacccgcctgcccggcggccagtggatctacatgagcgacaactacaccgacgtgaacggcgagaaggtgctgcccaaggacgacatcgagtgccccctgggctggaagtgggaggacgaggagtggagcaccgacctgaaccgcgccgtggacgagcagggctgggagtacagcatcaccatcccccccgagcgcaagcccaagcactgggtgcccgccgagaagatgtactacacccaccgccgccgccgctgggtgcgcctgcgccgccgcgacctgagccagatggaggccctgaagcgccaccgccaggccgaggccgagggcgagggctgggagtacgccagcctgttcggctggaagttccacctggagtaccgcaagaccgacgccttccgccgccgccgctggcgccgccgcatggagcccctggagaagaccggccccgccgccgtgttcgccctggagggcgccctgggcggcgtgatggacgacaagagcgaggacagcatgagcgtgagcaccctgagcttcggcgtgaaccgccccaccatcagctgcatcttcgactacggcaaccgctaccacctgcgctgctacatgtaccaggcccgcgacctggccgccatggacaaggacagcttcagcgacccctacgccatcgtgagcttcctgcaccagagccagaagaccgtggtggtgaagaacaccctgaaccccacctgggaccagaccctgatcttctacgagatcgagatcttcggcgagcccgccaccgtggccgagcagccccccagcatcgtggtggagctgtacgaccacgacacctacggcgccgacgagttcatgggccgctgcatctgccagcccagcctggagcgcatgccccgcctggcctggttccccctgacccgcggcagccagcccagcggcgagctgctggccagcttcgagctgatccagcgcgagaagcccgccatccaccacatccccggcttcgaggtgcaggagaccagccgcatcctggacgagagcgaggacaccgacctgccctacccccccccccagcgcgaggccaacatctacatggtgccccagaacatcaagcccgccctgcagcgcaccgccatcgagatcctggcctggggcctgcgcaacatgaagagctaccagctggccaacatcagcagccccagcctggtggtggagtgcggcggccagaccgtgcagagctgcgtgatccgcaacctgcgcaagaaccccaacttcgacatctgcaccctgttcatggaggtgatgctgccccgcgaggagctgtactgcccccccatcaccgtgaaggtgatcgacaaccgccagttcggccgccgccccgtggtgggccagtgcaccatccgcagcctggagagcttcctgtgcgacccctacagcgccgagagccccagcccccagggcggccccgacgacgtgagcctgctgagccccggcgaggacgtgctgatcgacatcgacgacaaggagcccctgatccccatccaggaggaggagttcatcgactggtggagcaagttcttcgccagcatcggcgagcgcgagaagtgcggcagctacctggagaaggacttcgacaccctgaaggtgtacgacacccagctggagaacgtggaggccttcgagggcctgagcgacttctgcaacaccttcaagctgtaccgcggcaagacccaggaggagaccgaggaccccagcgtgatcggcgagttcaagggcctgttcaagatctaccccctgcccgaggaccccgccatccccatgcccccccgccagttccaccagctggccgcccagggcccccaggagtgcctggtgcgcatctacatcgtgcgcgccttcggcctgcagcccaaggaccccaacggcaagtgcgacccctacatcaagatcagcatcggcaagaagagcgtgagcgaccaggacaactacatcccctgcaccctggagcccgtgttcggcaagatgttcgagctgacctgcaccctgcccctggagaaggacctgaagatcaccctgtacgactacgacctgctgagcaaggacgagaagatcggcgagaccgtggtggacctggagaaccgcctgctgagcaagttcggcgcccgctgcggcctgccccagacctactgcgtgagcggccccaaccagtggcgcgaccagctgcgccccagccagctgctgcacctgttctgccagcagcaccgcgtgaaggcccccgtgtaccgcaccgaccgcgtgatgttccaggacaaggagtacagcatcgaggagatcgaggccggccgcatccccaacccccacctgggccccgtggaggagcgcctggccctgcacgtgctgcagcagcagggcctggtgcccgagcacgtggagagccgccccctgtacagccccctgcagcccgacatcgagcagggcaagctgcagatgtgggtggacctgttccccaaggccctgggccgccccggcccccccttcaacatcaccccccgccgcgcccgccgcttcttcctgcgctgcatcatctggaacacccgcgacgtgatcctggacgacctgagcctgaccggcgagaagatgagcgacatctacgtgaagggctggatgatcggcttcgaggagcacaagcagaagaccgacgtgcactaccgcagcctgggcggcgagggcaacttcaactggcgcttcatcttccccttcgactacctgcccgccgagcaggtgtgcaccatcgccaagaaggacgccttctggcgcctggacaagaccgagagcaagatccccgcccgcgtggtgttccagatctgggacaacgacaagttcagcttcgacgacttcctgggcagcctgcagctggacctgaaccgcatgcccaagcccgccaagaccgccaagaagtgcagcctggaccagctggacgacgccttccaccccgagtggttcgtgagcctgttcgagcagaagaccgtgaagggctggtggccctgcgtggccgaggagggcgagaagaagatcctggccggcaagctggagatgaccctggagatcgtggccgagagcgagcacgaggagcgccccgccggccagggccgcgacgagcccaacatgaaccccaagctggaggacccccgccgccccgacaccagcttcctgtggttcaccagcccctacaagaccatgaagttcatcctgtggcgccgcttccgctgggccatcatcctgttcatcatcctgttcatcctgctgctgttcctggccatcttcatctacgccttccccaactacgccgccatgaagctggtgaagcccttcagc

SEQ ID NO: 1463 - DNA, 6264 bp, synthetic construct
  misc_feature 1..6264: note = source = /note="Description of Artificial Sequence: Synthetic coding sequence"
  source 1..6264: mol_type = other DNA
atgctgtgctgcctgctggtgcgcgccagcaacctgcccagcgccaagaaggaccgccgcagcgaccccgtggccagcctgaccttccgcggcgtgaagaagcgcaccaaggtgatcaagaacagcgtgaaccccgtgtggaacgagggcttcgagtgggacctgaagggcatccccctggaccagggcagcgagctgcacgtggtggtgaaggaccacgagaccatgggccgcaaccgcttcctgggcgaggccaaggtgcccctgcgcgaggtgctggccacccccagcctgagcgccagcttcaacgcccccctgctggacaccaagaagcagcccaccggcgccagcctggtgctgcaggtgagctacacccccctgcccggcgccgtgcccctgttccccccccccacccccctggagcccagccccaccctgcccgacctggacgtggtggccgacaccggcggcgaggaggacaccgaggaccagggcctgaccggcgacgaggccgagcccttcctggaccagagcggcggccccggcgcccccaccaccccccgcaagctgcccagccgcccccccccccactaccccggcatcaagcgcaagcgcagcgcccccaccagccgcaagctgctgagcgacaagccccaggacttccagatccgcgtgcaggtgatcgagggccgccagctgcccggcgtgaacatcaagcccgtggtgaaggtgaccgccgccggccagaccaagcgcacccgcatccacaagggcaacagccccctgttcaacgagaccctgttcttcaacctgttcgacagccccggcgagctgttcgacgagcccatcttcatcaccgtggtggacagccgcagcctgcgcaccgacgccctgctgggcgagttccgcatggacgtgggcaccatctaccgcgagccccgccacgcctacctgcgcaagtggctgctgctgagcgaccccgacgacttcagcgccggcgcccgcggctacctgaagaccagcctgtgcgtgctgggccccggcgacgaggcccccctggagcgcaaggaccccagcgaggacaaggaggacatcgagagcaacctgctgcgccccaccggcgtggccctgcgcggcgcccacttctgcctgaaggtgttccgcgccgaggacctgccccagatggacgacgccgtgatggacaacgtgaagcagatcttcggcttcgagagcaacaagaagaacctggtggaccccttcgtggaggtgagcttcgccggcaagatgctgtgcagcaagatcctggagaagaccgccaacccccagtggaaccagaacatcaccctgcccgccatgttccccagcatgtgcgagaagatgcgcatccgcatcatcgactgggaccgcctgacccacaacgacatcgtggccaccacctacctgagcatgagcaagatcagcgcccccggcggcgagatcgaggtggacgactacctgggcttcctgcccaccttcggcccctgctacatcaacctgtacggcagcccccgcgagttcaccggcttccccgacccctacaccgagctgaacaccggcaagggcgagggcgtggcctaccgcggccgcctgctgctgagcctggagaccaagctggtggagcacagcgagcagaaggtggaggacctgcccgccgacgacatcctgcgcgtggagaagtacctgcgccgccgcaagtacagcctgttcgccgccttctacagcgccaccatgctgcaggacgtggacgacgccatccagttcgaggtgagcatcggcaactacggcaacaagttcgacatgacctgcctgcccctggccagcaccacccagtacagccgcgccgtgttcgacggctgccactactactacctgccctggggcaacgtgaagcccgtggtggtgctgagcagctactgggaggacatcagccaccgcatcgagacccagaaccagctgctgggcatcgccgaccgcctggaggccggcctggagcaggtgcacctggccctgaaggcccagtgcagcaccgaggacgtggacagcctggtggcccagctgaccgacgagctgatcgccggctgcagccagcccctgggcgacatccacgagacccccagcgccacccacctggaccagtacctgtaccagctgcgcacccaccacctgagccagatcaccgaggccgccctggccctgaagctgggccacagcgagctgcccgccgccctggagcaggccgaggactggctgctgcgcctgcgcgccctggccgaggagccccagaacagcctgcccgacatcgtgatctggatgctgcagggcgacaagcgcgtggcctaccagcgcgtgcccgcccaccaggtgctgttcagccgccgcggcgccaactactgcggcaagaactgcggcaagctgcagaccatcttcctgaagtaccccatggagaaggtgcccggcgcccgcatgcccgtgcagatccgcgtgaagctgtggttcggcctgagcgtggacgagaaggagttcaaccagttcgccgagggcaagctgagcgtgttcgccgagacctacgagaacgagaccaagctggccctggtgggcaactggggcaccaccggcctgacctaccccaagttcagcgacgtgaccggcaagatcaagctgcccaaggacagcttccgccccagcgccggctggacctgggccggcgactggttcgtgtgccccgagaagaccctgctgcacgacatggacgccggccacctgagcttcgtggaggaggtgttcgagaaccagacccgcctgcccggcggccagtggatctacatgagcgacaactacaccgacgtgaacggcgagaaggtgctgcccaaggacgacatcgagtgccccctgggctggaagtgggaggacgaggagtggagcaccgacctgaaccgcgccgtggacgagcagggctgggagtacagcatcaccatcccccccgagcgcaagcccaagcactgggtgcccgccgagaagatgtactacacccaccgccgccgccgctgggtgcgcctgcgccgccgcgacctgagccagatggaggccctgaagcgccaccgccaggccgaggccgagggcgagggctgggagtacgccagcctgttcggctggaagttccacctggagtaccgcaagaccgacgccttccgccgccgccgctggcgccgccgcatggagcccctggagaagaccggccccgccgccgtgttcgccctggagggcgccctgggcggcgtgatggacgacaagagcgaggacagcatgagcgtgagcaccctgagcttcggcgtgaaccgccccaccatcagctgcatcttcgactacggcaaccgctaccacctgcgctgctacatgtaccaggcccgcgacctggccgccatggacaaggacagcttcagcgacccctacgccatcgtgagcttcctgcaccagagccagaagaccgtggtggtgaagaacaccctgaaccccacctgggaccagaccctgatcttctacgagatcgagatcttcggcgagcccgccaccgtggccgagcagccccccagcatcgtggtggagctgtacgaccacgacacctacggcgccgacgagttcatgggccgctgcatctgccagcccagcctggagcgcatgccccgcctggcctggttccccctgacccgcggcagccagcccagcggcgagctgctggccagcttcgagctgatccagcgcgagaagcccgccatccaccacatccccggcttcgaggtgcaggagaccagccgcatcctggacgagagcgaggacaccgacctgccctacccccccccccagcgcgaggccaacatctacatggtgccccagaacatcaagcccgccctgcagcgcaccgccatcgagatcctggcctggggcctgcgcaacatgaagagctaccagctggccaacatcagcagccccagcctggtggtggagtgcggcggccagaccgtgcagagctgcgtgatccgcaacctgcgcaagaaccccaacttcgacatctgcaccctgttcatggaggtgatgctgccccgcgaggagctgtactgcccccccatcaccgtgaaggtgatcgacaaccgccagttcggccgccgccccgtggtgggccagtgcaccatccgcagcctggagagcttcctgtgcgacccctacagcgccgagagccccagcccccagggcggccccgacgacgtgagcctgctgagccccggcgaggacgtgctgatcgacatcgacgacaaggagcccctgatccccatccagctggccgacggcctgagcagcctggcccccaccaacaccgccagcccccccagcagcccccacgaggaggagttcatcgactggtggagcaagttcttcgccagcatcggcgagcgcgagaagtgcggcagctacctggagaaggacttcgacaccctgaaggtgtacgacacccagctggagaacgtggaggccttcgagggcctgagcgacttctgcaacaccttcaagctgtaccgcggcaagacccaggaggagaccgaggaccccagcgtgatcggcgagttcaagggcctgttcaagatctaccccctgcccgaggaccccgccatccccatgcccccccgccagttccaccagctggccgcccagggcccccaggagtgcctggtgcgcatctacatcgtgcgcgccttcggcctgcagcccaaggaccccaacggcaagtgcgacccctacatcaagatcagcatcggcaagaagagcgtgagcgaccaggacaactacatcccctgcaccctggagcccgtgttcggcaagatgttcgagctgacctgcaccctgcccctggagaaggacctgaagatcaccctgtacgactacgacctgctgagcaaggacgagaagatcggcgagaccgtggtggacctggagaaccgcctgctgagcaagttcggcgcccgctgcggcctgccccagacctactgcgtgagcggccccaaccagtggcgcgaccagctgcgccccagccagctgctgcacctgttctgccagcagcaccgcgtgaaggcccccgtgtaccgcaccgaccgcgtgatgttccaggacaaggagtacagcatcgaggagatcgaggccggccgcatccccaacccccacctgggccccgtggaggagcgcctggccctgcacgtgctgcagcagcagggcctggtgcccgagcacgtggagagccgccccctgtacagccccctgcagcccgacatcgagcagggcaagctgcagatgtgggtggacctgttccccaaggccctgggccgccccggcccccccttcaacatcaccccccgccgcgcccgccgcttcttcctgcgctgcatcatctggaacacccgcgacgtgatcctggacgacctgagcctgaccggcgagaagatgagcgacatctacgtgaagggctggatgatcggcttcgaggagcacaagcagaagaccgacgtgcactaccgcagcctgggcggcgagggcaacttcaactggcgcttcatcttccccttcgactacctgcccgccgagcaggtgtgcaccatcgccaagaaggacgccttctggcgcctggacaagaccgagagcaagatccccgcccgcgtggtgttccagatctgggacaacgacaagttcagcttcgacgacttcctgggcagcctgcagctggacctgaaccgcatgcccaagcccgccaagaccgccaagaagtgcagcctggaccagctggacgacgccttccaccccgagtggttcgtgagcctgttcgagcagaagaccgtgaagggctggtggccctgcgtggccgaggagggcgagaagaagatcctggccggcaagctggagatgaccctggagatcgtggccgagagcgagcacgaggagcgccccgccggccagggccgcgacgagcccaacatgaaccccaagctggaggacccccgccgccccgacaccagcttcctgtggttcaccagcccctacaagaccatgaagttcatcctgtggcgccgcttccgctgggccatcatcctgttcatcatcctgttcatcctgctgctgttcctggccatcttcatctacgccttccccaactacgccgccatgaagctggtgaagcccttcagc

SEQ ID NO: 1464 - DNA, 6291 bp, synthetic construct
  misc_feature 1..6291: note = source = /note="Description of Artificial Sequence: Synthetic coding sequence"
  source 1..6291: mol_type = other DNA
atgctgcgcgtgttcatcctgtacgccgagaacgtgcacacccccgacaccgacatcagcgacgcctactgcagcgccgtgttcgccggcgtgaagaagcgcaccaaggtgatcaagaacagcgtgaaccccgtgtggaacgagggcttcgagtgggacctgaagggcatccccctggaccagggcagcgagctgcacgtggtggtgaaggaccacgagaccatgggccgcaaccgcttcctgggcgaggccaaggtgcccctgcgcgaggtgctggccacccccagcctgagcgccagcttcaacgcccccctgctggacaccaagaagcagcccaccggcgccagcctggtgctgcaggtgagctacacccccctgcccggcgccgtgcccctgttccccccccccacccccctggagcccagccccaccctgcccgacctggacgtggtggccggcggcggccagagccgcgccgagacctggagcctgctgagcgacagcaccatggacacccgctacagcggcaagaagtggcccgcccccaccgacaccggcggcgaggaggacaccgaggaccagggcctgaccggcgacgaggccgagcccttcctggaccagagcggcggccccggcgcccccaccaccccccgcaagctgcccagccgcccccccccccactaccccggcatcaagcgcaagcgcagcgcccccaccagccgcaagctgctgagcgacaagccccaggacttccagatccgcgtgcaggtgatcgagggccgccagctgcccggcgtgaacatcaagcccgtggtgaaggtgaccgccgccggccagaccaagcgcacccgcatccacaagggcaacagccccctgttcaacgagaccctgttcttcaacctgttcgacagccccggcgagctgttcgacgagcccatcttcatcaccgtggtggacagccgcagcctgcgcaccgacgccctgctgggcgagttccgcatggacgtgggcaccatctaccgcgagccccgccacgcctacctgcgcaagtggctgctgctgagcgaccccgacgacttcagcgccggcgcccgcggctacctgaagaccagcctgtgcgtgctgggccccggcgacgaggcccccctggagcgcaaggaccccagcgaggacaaggaggacatcgagagcaacctgctgcgccccaccggcgtggccctgcgcggcgcccacttctgcctgaaggtgttccgcgccgaggacctgccccagatggacgacgccgtgatggacaacgtgaagcagatcttcggcttcgagagcaacaagaagaacctggtggaccccttcgtggaggtgagcttcgccggcaagatgctgtgcagcaagatcctggagaagaccgccaacccccagtggaaccagaacatcaccctgcccgccatgttccccagcatgtgcgagaagatgcgcatccgcatcatcgactgggaccgcctgacccacaacgacatcgtggccaccacctacctgagcatgagcaagatcagcgcccccggcggcgagatcgaggtggacgactacctgggcttcctgcccaccttcggcccctgctacatcaacctgtacggcagcccccgcgagttcaccggcttccccgacccctacaccgagctgaacaccggcaagggcgagggcgtggcctaccgcggccgcctgctgctgagcctggagaccaagctggtggagcacagcgagcagaaggtggaggacctgcccgccgacgacatcctgcgcgtggagaagtacctgcgccgccgcaagtacagcctgttcgccgccttctacagcgccaccatgctgcaggacgtggacgacgccatccagttcgaggtgagcatcggcaactacggcaacaagttcgacatgacctgcctgcccctggccagcaccacccagtacagccgcgccgtgttcgacggctgccactactactacctgccctggggcaacgtgaagcccgtggtggtgctgagcagctactgggaggacatcagccaccgcatcgagacccagaaccagctgctgggcatcgccgaccgcctggaggccggcctggagcaggtgcacctggccctgaaggcccagtgcagcaccgaggacgtggacagcctggtggcccagctgaccgacgagctgatcgccggctgcagccagcccctgggcgacatccacgagacccccagcgccacccacctggaccagtacctgtaccagctgcgcacccaccacctgagccagatcaccgaggccgccctggccctgaagctgggccacagcgagctgcccgccgccctggagcaggccgaggactggctgctgcgcctgcgcgccctggccgaggagccccagaacagcctgcccgacatcgtgatctggatgctgcagggcgacaagcgcgtggcctaccagcgcgtgcccgcccaccaggtgctgttcagccgccgcggcgccaactactgcggcaagaactgcggcaagctgcagaccatcttcctgaagtaccccatggagaaggtgcccggcgcccgcatgcccgtgcagatccgcgtgaagctgtggttcggcctgagcgtggacgagaaggagttcaaccagttcgccgagggcaagctgagcgtgttcgccgagacctacgagaacgagaccaagctggccctggtgggcaactggggcaccaccggcctgacctaccccaagttcagcgacgtgaccggcaagatcaagctgcccaaggacagcttccgccccagcgccggctggacctgggccggcgactggttcgtgtgccccgagaagaccctgctgcacgacatggacgccggccacctgagcttcgtggaggaggtgttcgagaaccagacccgcctgcccggcggccagtggatctacatgagcgacaactacaccgacgtgaacggcgagaaggtgctgcccaaggacgacatcgagtgccccctgggctggaagtgggaggacgaggagtggagcaccgacctgaaccgcgccgtggacgagcagggctgggagtacagcatcaccatcccccccgagcgcaagcccaagcactgggtgcccgccgagaagatgtactacacccaccgccgccgccgctgggtgcgcctgcgccgccgcgacctgagccagatggaggccctgaagcgccaccgccaggccgaggccgagggcgagggctgggagtacgccagcctgttcggctggaagttccacctggagtaccgcaagaccgacgccttccgccgccgccgctggcgccgccgcatggagcccctggagaagaccggccccgccgccgtgttcgccctggagggcgccctgggcggcgtgatggacgacaagagcgaggacagcatgagcgtgagcaccctgagcttcggcgtgaaccgccccaccatcagctgcatcttcgactacggcaaccgctaccacctgcgctgctacatgtaccaggcccgcgacctggccgccatggacaaggacagcttcagcgacccctacgccatcgtgagcttcctgcaccagagccagaagaccgtggtggtgaagaacaccctgaaccccacctgggaccagaccctgatcttctacgagatcgagatcttcggcgagcccgccaccgtggccgagcagccccccagcatcgtggtggagctgtacgaccacgacacctacggcgccgacgagttcatgggccgctgcatctgccagcccagcctggagcgcatgccccgcctggcctggttccccctgacccgcggcagccagcccagcggcgagctgctggccagcttcgagctgatccagcgcgagaagcccgccatccaccacatccccggcttcgaggtgcaggagaccagccgcatcctggacgagagcgaggacaccgacctgccctacccccccccccagcgcgaggccaacatctacatggtgccccagaacatcaagcccgccctgcagcgcaccgccatcgagatcctggcctggggcctgcgcaacatgaagagctaccagctggccaacatcagcagccccagcctggtggtggagtgcggcggccagaccgtgcagagctgcgtgatccgcaacctgcgcaagaaccccaacttcgacatctgcaccctgttcatggaggtgatgctgccccgcgaggagctgtactgcccccccatcaccgtgaaggtgatcgacaaccgccagttcggccgccgccccgtggtgggccagtgcaccatccgcagcctggagagcttcctgtgcgacccctacagcgccgagagccccagcccccagggcggccccgacgacgtgagcctgctgagccccggcgaggacgtgctgatcgacatcgacgacaaggagcccctgatccccatccaggaggaggagttcatcgactggtggagcaagttcttcgccagcatcggcgagcgcgagaagtgcggcagctacctggagaaggacttcgacaccctgaaggtgtacgacacccagctggagaacgtggaggccttcgagggcctgagcgacttctgcaacaccttcaagctgtaccgcggcaagacccaggaggagaccgaggaccccagcgtgatcggcgagttcaagggcctgttcaagatctaccccctgcccgaggaccccgccatccccatgcccccccgccagttccaccagctggccgcccagggcccccaggagtgcctggtgcgcatctacatcgtgcgcgccttcggcctgcagcccaaggaccccaacggcaagtgcgacccctacatcaagatcagcatcggcaagaagagcgtgagcgaccaggacaactacatcccctgcaccctggagcccgtgttcggcaagatgttcgagctgacctgcaccctgcccctggagaaggacctgaagatcaccctgtacgactacgacctgctgagcaaggacgagaagatcggcgagaccgtggtggacctggagaaccgcctgctgagcaagttcggcgcccgctgcggcctgccccagacctactgcgtgagcggccccaaccagtggcgcgaccagctgcgccccagccagctgctgcacctgttctgccagcagcaccgcgtgaaggcccccgtgtaccgcaccgaccgcgtgatgttccaggacaaggagtacagcatcgaggagatcgaggccggccgcatccccaacccccacctgggccccgtggaggagcgcctggccctgcacgtgctgcagcagcagggcctggtgcccgagcacgtggagagccgccccctgtacagccccctgcagcccgacatcgagcagggcaagctgcagatgtgggtggacctgttccccaaggccctgggccgccccggcccccccttcaacatcaccccccgccgcgcccgccgcttcttcctgcgctgcatcatctggaacacccgcgacgtgatcctggacgacctgagcctgaccggcgagaagatgagcgacatctacgtgaagggctggatgatcggcttcgaggagcacaagcagaagaccgacgtgcactaccgcagcctgggcggcgagggcaacttcaactggcgcttcatcttccccttcgactacctgcccgccgagcaggtgtgcaccatcgccaagaaggacgccttctggcgcctggacaagaccgagagcaagatccccgcccgcgtggtgttccagatctgggacaacgacaagttcagcttcgacgacttcctgggcagcctgcagctggacctgaaccgcatgcccaagcccgccaagaccgccaagaagtgcagcctggaccagctggacgacgccttccaccccgagtggttcgtgagcctgttcgagcagaagaccgtgaagggctggtggccctgcgtggccgaggagggcgagaagaagatcctggccggcaagctggagatgaccctggagatcgtggccgagagcgagcacgaggagcgccccgccggccagggccgcgacgagcccaacatgaaccccaagctggaggacccccgccgccccgacaccagcttcctgtggttcaccagcccctacaagaccatgaagttcatcctgtggcgccgcttccgctgggccatcatcctgttcatcatcctgttcatcctgctgctgttcctggccatcttcatctacgccttccccaactacgccgccatgaagctggtgaagcccttcagc

SEQ ID NO: 1465 - DNA, 6357 bp, synthetic construct
  misc_feature 1..6357: note = source = /note="Description of Artificial Sequence: Synthetic coding sequence"
  source 1..6357: mol_type = other DNA
atgctgtgctgcctgctggtgcgcgccagcaacctgcccagcgccaagaaggaccgccgcagcgaccccgtggccagcctgaccttccgcggcgtgaagaagcgcaccaaggtgatcaagaacagcgtgaaccccgtgtggaacgagggcttcgagtgggacctgaagggcatccccctggaccagggcagcgagctgcacgtggtggtgaaggaccacgagaccatgggccgcaaccgcttcctgggcgaggccaaggtgcccctgcgcgaggtgctggccacccccagcctgagcgccagcttcaacgcccccctgctggacaccaagaagcagcccaccggcgccagcctggtgctgcaggtgagctacacccccctgcccggcgccgtgcccctgttccccccccccacccccctggagcccagccccaccctgcccgacctggacgtggtggccggcggcggccagagccgcgccgagacctggagcctgctgagcgacagcaccatggacacccgctacagcggcaagaagtggcccgcccccaccgacaccggcggcgaggaggacaccgaggaccagggcctgaccggcgacgaggccgagcccttcctggaccagagcggcggccccggcgcccccaccaccccccgcaagctgcccagccgcccccccccccactaccccggcatcaagcgcaagcgcagcgcccccaccagccgcaagctgctgagcgacaagccccaggacttccagatccgcgtgcaggtgatcgagggccgccagctgcccggcgtgaacatcaagcccgtggtgaaggtgaccgccgccggccagaccaagcgcacccgcatccacaagggcaacagccccctgttcaacgagaccctgttcttcaacctgttcgacagccccggcgagctgttcgacgagcccatcttcatcaccgtggtggacagccgcagcctgcgcaccgacgccctgctgggcgagttccgcatggacgtgggcaccatctaccgcgagccccgccacgcctacctgcgcaagtggctgctgctgagcgaccccgacgacttcagcgccggcgcccgcggctacctgaagaccagcctgtgcgtgctgggccccggcgacgaggcccccctggagcgcaaggaccccagcgaggacaaggaggacatcgagagcaacctgctgcgccccaccggcgtggccctgcgcggcgcccacttctgcctgaaggtgttccgcgccgaggacctgccccagatggacgacgccgtgatggacaacgtgaagcagatcttcggcttcgagagcaacaagaagaacctggtggaccccttcgtggaggtgagcttcgccggcaagatgctgtgcagcaagatcctggagaagaccgccaacccccagtggaaccagaacatcaccctgcccgccatgttccccagcatgtgcgagaagatgcgcatccgcatcatcgactgggaccgcctgacccacaacgacatcgtggccaccacctacctgagcatgagcaagatcagcgcccccggcggcgagatcgaggtggacgactacctgggcttcctgcccaccttcggcccctgctacatcaacctgtacggcagcccccgcgagttcaccggcttccccgacccctacaccgagctgaacaccggcaagggcgagggcgtggcctaccgcggccgcctgctgctgagcctggagaccaagctggtggagcacagcgagcagaaggtggaggacctgcccgccgacgacatcctgcgcgtggagaagtacctgcgccgccgcaagtacagcctgttcgccgccttctacagcgccaccatgctgcaggacgtggacgacgccatccagttcgaggtgagcatcggcaactacggcaacaagttcgacatgacctgcctgcccctggccagcaccacccagtacagccgcgccgtgttcgacggctgccactactactacctgccctggggcaacgtgaagcccgtggtggtgctgagcagctactgggaggacatcagccaccgcatcgagacccagaaccagctgctgggcatcgccgaccgcctggaggccggcctggagcaggtgcacctggccctgaaggcccagtgcagcaccgaggacgtggacagcctggtggcccagctgaccgacgagctgatcgccggctgcagccagcccctgggcgacatccacgagacccccagcgccacccacctggaccagtacctgtaccagctgcgcacccaccacctgagccagatcaccgaggccgccctggccctgaagctgggccacagcgagctgcccgccgccctggagcaggccgaggactggctgctgcgcctgcgcgccctggccgaggagccccagaacagcctgcccgacatcgtgatctggatgctgcagggcgacaagcgcgtggcctaccagcgcgtgcccgcccaccaggtgctgttcagccgccgcggcgccaactactgcggcaagaactgcggcaagctgcagaccatcttcctgaagtaccccatggagaaggtgcccggcgcccgcatgcccgtgcagatccgcgtgaagctgtggttcggcctgagcgtggacgagaaggagttcaaccagttcgccgagggcaagctgagcgtgttcgccgagacctacgagaacgagaccaagctggccctggtgggcaactggggcaccaccggcctgacctaccccaagttcagcgacgtgaccggcaagatcaagctgcccaaggacagcttccgccccagcgccggctggacctgggccggcgactggttcgtgtgccccgagaagaccctgctgcacgacatggacgccggccacctgagcttcgtggaggaggtgttcgagaaccagacccgcctgcccggcggccagtggatctacatgagcgacaactacaccgacgtgaacggcgagaaggtgctgcccaaggacgacatcgagtgccccctgggctggaagtgggaggacgaggagtggagcaccgacctgaaccgcgccgtggacgagcagggctgggagtacagcatcaccatcccccccgagcgcaagcccaagcactgggtgcccgccgagaagatgtactacacccaccgccgccgccgctgggtgcgcctgcgccgccgcgacctgagccagatggaggccctgaagcgccaccgccaggccgaggccgagggcgagggctgggagtacgccagcctgttcggctggaagttccacctggagtaccgcaagaccgacgccttccgccgccgccgctggcgccgccgcatggagcccctggagaagaccggccccgccgccgtgttcgccctggagggcgccctgggcggcgtgatggacgacaagagcgaggacagcatgagcgtgagcaccctgagcttcggcgtgaaccgccccaccatcagctgcatcttcgactacggcaaccgctaccacctgcgctgctacatgtaccaggcccgcgacctggccgccatggacaaggacagcttcagcgacccctacgccatcgtgagcttcctgcaccagagccagaagaccgtggtggtgaagaacaccctgaaccccacctgggaccagaccctgatcttctacgagatcgagatcttcggcgagcccgccaccgtggccgagcagccccccagcatcgtggtggagctgtacgaccacgacacctacggcgccgacgagttcatgggccgctgcatctgccagcccagcctggagcgcatgccccgcctggcctggttccccctgacccgcggcagccagcccagcggcgagctgctggccagcttcgagctgatccagcgcgagaagcccgccatccaccacatccccggcttcgaggtgcaggagaccagccgcatcctggacgagagcgaggacaccgacctgccctacccccccccccagcgcgaggccaacatctacatggtgccccagaacatcaagcccgccctgcagcgcaccgccatcgagatcctggcctggggcctgcgcaacatgaagagctaccagctggccaacatcagcagccccagcctggtggtggagtgcggcggccagaccgtgcagagctgcgtgatccgcaacctgcgcaagaaccccaacttcgacatctgcaccctgttcatggaggtgatgctgccccgcgaggagctgtactgcccccccatcaccgtgaaggtgatcgacaaccgccagttcggccgccgccccgtggtgggccagtgcaccatccgcagcctggagagcttcctgtgcgacccctacagcgccgagagccccagcccccagggcggccccgacgacgtgagcctgctgagccccggcgaggacgtgctgatcgacatcgacgacaaggagcccctgatccccatccagctggccgacggcctgagcagcctggcccccaccaacaccgccagcccccccagcagcccccacgaggaggagttcatcgactggtggagcaagttcttcgccagcatcggcgagcgcgagaagtgcggcagctacctggagaaggacttcgacaccctgaaggtgtacgacacccagctggagaacgtggaggccttcgagggcctgagcgacttctgcaacaccttcaagctgtaccgcggcaagacccaggaggagaccgaggaccccagcgtgatcggcgagttcaagggcctgttcaagatctaccccctgcccgaggaccccgccatccccatgcccccccgccagttccaccagctggccgcccagggcccccaggagtgcctggtgcgcatctacatcgtgcgcgccttcggcctgcagcccaaggaccccaacggcaagtgcgacccctacatcaagatcagcatcggcaagaagagcgtgagcgaccaggacaactacatcccctgcaccctggagcccgtgttcggcaagatgttcgagctgacctgcaccctgcccctggagaaggacctgaagatcaccctgtacgactacgacctgctgagcaaggacgagaagatcggcgagaccgtggtggacctggagaaccgcctgctgagcaagttcggcgcccgctgcggcctgccccagacctactgcgtgagcggccccaaccagtggcgcgaccagctgcgccccagccagctgctgcacctgttctgccagcagcaccgcgtgaaggcccccgtgtaccgcaccgaccgcgtgatgttccaggacaaggagtacagcatcgaggagatcgaggccggccgcatccccaacccccacctgggccccgtggaggagcgcctggccctgcacgtgctgcagcagcagggcctggtgcccgagcacgtggagagccgccccctgtacagccccctgcagcccgacatcgagcagggcaagctgcagatgtgggtggacctgttccccaaggccctgggccgccccggcccccccttcaacatcaccccccgccgcgcccgccgcttcttcctgcgctgcatcatctggaacacccgcgacgtgatcctggacgacctgagcctgaccggcgagaagatgagcgacatctacgtgaagggctggatgatcggcttcgaggagcacaagcagaagaccgacgtgcactaccgcagcctgggcggcgagggcaacttcaactggcgcttcatcttccccttcgactacctgcccgccgagcaggtgtgcaccatcgccaagaaggacgccttctggcgcctggacaagaccgagagcaagatccccgcccgcgtggtgttccagatctgggacaacgacaagttcagcttcgacgacttcctgggcagcctgcagctggacctgaaccgcatgcccaagcccgccaagaccgccaagaagtgcagcctggaccagctggacgacgccttccaccccgagtggttcgtgagcctgttcgagcagaagaccgtgaagggctggtggccctgcgtggccgaggagggcgagaagaagatcctggccggcaagctggagatgaccctggagatcgtggccgagagcgagcacgaggagcgccccgccggccagggccgcgacgagcccaacatgaaccccaagctggaggacccccgccgccccgacaccagcttcctgtggttcaccagcccctacaagaccatgaagttcatcctgtggcgccgcttccgctgggccatcatcctgttcatcatcctgttcatcctgctgctgttcctggccatcttcatctacgccttccccaactacgccgccatgaagctggtgaagcccttcagc

SEQ ID NO: 1466 - DNA, 6294 bp, synthetic construct
  misc_feature 1..6294: note = source = /note="Description of Artificial Sequence: Synthetic coding sequence"
  source 1..6294: mol_type = other DNA
atgctgtgctgcctgctggtgcgcgccagcaacctgcccagcgccaagaaggaccgccgcagcgaccccgtggccagcctgaccttccgcggcgtgaagaagcgcaccaaggtgatcaagaacagcgtgaaccccgtgtggaacgagggcttcgagtgggacctgaagggcatccccctggaccagggcagcgagctgcacgtggtggtgaaggaccacgagaccatgggccgcaaccgcttcctgggcgaggccaaggtgcccctgcgcgaggtgctggccacccccagcctgagcgccagcttcaacgcccccctgctggacaccaagaagcagcccaccggcgccagcctggtgctgcaggtgagctacacccccctgcccggcgccgtgcccctgttccccccccccacccccctggagcccagccccaccctgcccgacctggacgtggtggccggcggcggccagagccgcgccgagacctggagcctgctgagcgacagcaccatggacacccgctacagcggcaagaagtggcccgcccccaccgacaccggcggcgaggaggacaccgaggaccagggcctgaccggcgacgaggccgagcccttcctggaccagagcggcggccccggcgcccccaccaccccccgcaagctgcccagccgcccccccccccactaccccggcatcaagcgcaagcgcagcgcccccaccagccgcaagctgctgagcgacaagccccaggacttccagatccgcgtgcaggtgatcgagggccgccagctgcccggcgtgaacatcaagcccgtggtgaaggtgaccgccgccggccagaccaagcgcacccgcatccacaagggcaacagccccctgttcaacgagaccctgttcttcaacctgttcgacagccccggcgagctgttcgacgagcccatcttcatcaccgtggtggacagccgcagcctgcgcaccgacgccctgctgggcgagttccgcatggacgtgggcaccatctaccgcgagccccgccacgcctacctgcgcaagtggctgctgctgagcgaccccgacgacttcagcgccggcgcccgcggctacctgaagaccagcctgtgcgtgctgggccccggcgacgaggcccccctggagcgcaaggaccccagcgaggacaaggaggacatcgagagcaacctgctgcgccccaccggcgtggccctgcgcggcgcccacttctgcctgaaggtgttccgcgccgaggacctgccccagatggacgacgccgtgatggacaacgtgaagcagatcttcggcttcgagagcaacaagaagaacctggtggaccccttcgtggaggtgagcttcgccggcaagatgctgtgcagcaagatcctggagaagaccgccaacccccagtggaaccagaacatcaccctgcccgccatgttccccagcatgtgcgagaagatgcgcatccgcatcatcgactgggaccgcctgacccacaacgacatcgtggccaccacctacctgagcatgagcaagatcagcgcccccggcggcgagatcgaggtggacgactacctgggcttcctgcccaccttcggcccctgctacatcaacctgtacggcagcccccgcgagttcaccggcttccccgacccctacaccgagctgaacaccggcaagggcgagggcgtggcctaccgcggccgcctgctgctgagcctggagaccaagctggtggagcacagcgagcagaaggtggaggacctgcccgccgacgacatcctgcgcgtggagaagtacctgcgccgccgcaagtacagcctgttcgccgccttctacagcgccaccatgctgcaggacgtggacgacgccatccagttcgaggtgagcatcggcaactacggcaacaagttcgacatgacctgcctgcccctggccagcaccacccagtacagccgcgccgtgttcgacggctgccactactactacctgccctggggcaacgtgaagcccgtggtggtgctgagcagctactgggaggacatcagccaccgcatcgagacccagaaccagctgctgggcatcgccgaccgcctggaggccggcctggagcaggtgcacctggccctgaaggcccagtgcagcaccgaggacgtggacagcctggtggcccagctgaccgacgagctgatcgccggctgcagccagcccctgggcgacatccacgagacccccagcgccacccacctggaccagtacctgtaccagctgcgcacccaccacctgagccagatcaccgaggccgccctggccctgaagctgggccacagcgagctgcccgccgccctggagcaggccgaggactggctgctgcgcctgcgcgccctggccgaggagccccagaacagcctgcccgacatcgtgatctggatgctgcagggcgacaagcgcgtggcctaccagcgcgtgcccgcccaccaggtgctgttcagccgccgcggcgccaactactgcggcaagaactgcggcaagctgcagaccatcttcctgaagtaccccatggagaaggtgcccggcgcccgcatgcccgtgcagatccgcgtgaagctgtggttcggcctgagcgtggacgagaaggagttcaaccagttcgccgagggcaagctgagcgtgttcgccgagacctacgagaacgagaccaagctggccctggtgggcaactggggcaccaccggcctgacctaccccaagttcagcgacgtgaccggcaagatcaagctgcccaaggacagcttccgccccagcgccggctggacctgggccggcgactggttcgtgtgccccgagaagaccctgctgcacgacatggacgccggccacctgagcttcgtggaggaggtgttcgagaaccagacccgcctgcccggcggccagtggatctacatgagcgacaactacaccgacgtgaacggcgagaaggtgctgcccaaggacgacatcgagtgccccctgggctggaagtgggaggacgaggagtggagcaccgacctgaaccgcgccgtggacgagcagggctgggagtacagcatcaccatcccccccgagcgcaagcccaagcactgggtgcccgccgagaagatgtactacacccaccgccgccgccgctgggtgcgcctgcgccgccgcgacctgagccagatggaggccctgaagcgccaccgccaggccgaggccgagggcgagggctgggagtacgccagcctgttcggctggaagttccacctggagtaccgcaagaccgacgccttccgccgccgccgctggcgccgccgcatggagcccctggagaagaccggccccgccgccgtgttcgccctggagggcgccctgggcggcgtgatggacgacaagagcgaggacagcatgagcgtgagcaccctgagcttcggcgtgaaccgccccaccatcagctgcatcttcgactacggcaaccgctaccacctgcgctgctacatgtaccaggcccgcgacctggccgccatggacaaggacagcttcagcgacccctacgccatcgtgagcttcctgcaccagagccagaagaccgtggtggtgaagaacaccctgaaccccacctgggaccagaccctgatcttctacgagatcgagatcttcggcgagcccgccaccgtggccgagcagccccccagcatcgtggtggagctgtacgaccacgacacctacggcgccgacgagttcatgggccgctgcatctgccagcccagcctggagcgcatgccccgcctggcctggttccccctgacccgcggcagccagcccagcggcgagctgctggccagcttcgagctgatccagcgcgagaagcccgccatccaccacatccccggcttcgaggtgcaggagaccagccgcatcctggacgagagcgaggacaccgacctgccctacccccccccccagcgcgaggccaacatctacatggtgccccagaacatcaagcccgccctgcagcgcaccgccatcgagatcctggcctggggcctgcgcaacatgaagagctaccagctggccaacatcagcagccccagcctggtggtggagtgcggcggccagaccgtgcagagctgcgtgatccgcaacctgcgcaagaaccccaacttcgacatctgcaccctgttcatggaggtgatgctgccccgcgaggagctgtactgcccccccatcaccgtgaaggtgatcgacaaccgccagttcggccgccgccccgtggtgggccagtgcaccatccgcagcctggagagcttcctgtgcgacccctacagcgccgagagccccagcccccagggcggccccgacgacgtgagcctgctgagccccggcgaggacgtgctgatcgacatcgacgacaaggagcccctgatccccatccaggaggaggagttcatcgactggtggagcaagttcttcgccagcatcggcgagcgcgagaagtgcggcagctacctggagaaggacttcgacaccctgaaggtgtacgacacccagctggagaacgtggaggccttcgagggcctgagcgacttctgcaacaccttcaagctgtaccgcggcaagacccaggaggagaccgaggaccccagcgtgatcggcgagttcaagggcctgttcaagatctaccccctgcccgaggaccccgccatccccatgcccccccgccagttccaccagctggccgcccagggcccccaggagtgcctggtgcgcatctacatcgtgcgcgccttcggcctgcagcccaaggaccccaacggcaagtgcgacccctacatcaagatcagcatcggcaagaagagcgtgagcgaccaggacaactacatcccctgcaccctggagcccgtgttcggcaagatgttcgagctgacctgcaccctgcccctggagaaggacctgaagatcaccctgtacgactacgacctgctgagcaaggacgagaagatcggcgagaccgtggtggacctggagaaccgcctgctgagcaagttcggcgcccgctgcggcctgccccagacctactgcgtgagcggccccaaccagtggcgcgaccagctgcgccccagccagctgctgcacctgttctgccagcagcaccgcgtgaaggcccccgtgtaccgcaccgaccgcgtgatgttccaggacaaggagtacagcatcgaggagatcgaggccggccgcatccccaacccccacctgggccccgtggaggagcgcctggccctgcacgtgctgcagcagcagggcctggtgcccgagcacgtggagagccgccccctgtacagccccctgcagcccgacatcgagcagggcaagctgcagatgtgggtggacctgttccccaaggccctgggccgccccggcccccccttcaacatcaccccccgccgcgcccgccgcttcttcctgcgctgcatcatctggaacacccgcgacgtgatcctggacgacctgagcctgaccggcgagaagatgagcgacatctacgtgaagggctggatgatcggcttcgaggagcacaagcagaagaccgacgtgcactaccgcagcctgggcggcgagggcaacttcaactggcgcttcatcttccccttcgactacctgcccgccgagcaggtgtgcaccatcgccaagaaggacgccttctggcgcctggacaagaccgagagcaagatccccgcccgcgtggtgttccagatctgggacaacgacaagttcagcttcgacgacttcctgggcagcctgcagctggacctgaaccgcatgcccaagcccgccaagaccgccaagaagtgcagcctggaccagctggacgacgccttccaccccgagtggttcgtgagcctgttcgagcagaagaccgtgaagggctggtggccctgcgtggccgaggagggcgagaagaagatcctggccggcaagctggagatgaccctggagatcgtggccgagagcgagcacgaggagcgccccgccggccagggccgcgacgagcccaacatgaaccccaagctggaggacccccgccgccccgacaccagcttcctgtggttcaccagcccctacaagaccatgaagttcatcctgtggcgccgcttccgctgggccatcatcctgttcatcatcctgttcatcctgctgctgttcctggccatcttcatctacgccttccccaactacgccgccatgaagctggtgaagcccttcagc

SEQ ID NO: 1467 - DNA, 6333 bp, synthetic construct
  misc_feature 1..6333: note = source = /note="Description of Artificial Sequence: Synthetic coding sequence"
  source 1..6333: mol_type = other DNA
atgctgcgcgtgttcatcctgtacgccgagaacgtgcacacccccgacaccgacatcagcgacgcctactgcagcgccgtgttcgccggcgtgaagaagcgcaccaaggtgatcaagaacagcgtgaaccccgtgtggaacgagggcttcgagtgggacctgaagggcatccccctggaccagggcagcgagctgcacgtggtggtgaaggaccacgagaccatgggccgcaaccgcttcctgggcgaggccaaggtgcccctgcgcgaggtgctggccacccccagcctgagcgccagcttcaacgcccccctgctggacaccaagaagcagcccaccggcgccagcctggtgctgcaggtgagctacacccccctgcccggcgccgtgcccctgttccccccccccacccccctggagcccagccccaccctgcccgacctggacgtggtggccggcggcggccagagccgcgccgagacctggagcctgctgagcgacagcaccatggacacccgctacagcggcaagaagtggcccgcccccaccgacaccggcggcgaggaggacaccgaggaccagggcctgaccggcgacgaggccgagcccttcctggaccagagcggcggccccggcgcccccaccaccccccgcaagctgcccagccgcccccccccccactaccccggcatcaagcgcaagcgcagcgcccccaccagccgcaagctgctgagcgacaagccccaggacttccagatccgcgtgcaggtgatcgagggccgccagctgcccggcgtgaacatcaagcccgtggtgaaggtgaccgccgccggccagaccaagcgcacccgcatccacaagggcaacagccccctgttcaacgagaccctgttcttcaacctgttcgacagccccggcgagctgttcgacgagcccatcttcatcaccgtggtggacagccgcagcctgcgcaccgacgccctgctgggcgagttccgcatggacgtgggcaccatctaccgcgagccccgccacgcctacctgcgcaagtggctgctgctgagcgaccccgacgacttcagcgccggcgcccgcggctacctgaagaccagcctgtgcgtgctgggccccggcgacgaggcccccctggagcgcaaggaccccagcgaggacaaggaggacatcgagagcaacctgctgcgccccaccggcgtggccctgcgcggcgcccacttctgcctgaaggtgttccgcgccgaggacctgccccagatggacgacgccgtgatggacaacgtgaagcagatcttcggcttcgagagcaacaagaagaacctggtggaccccttcgtggaggtgagcttcgccggcaagatgctgtgcagcaagatcctggagaagaccgccaacccccagtggaaccagaacatcaccctgcccgccatgttccccagcatgtgcgagaagatgcgcatccgcatcatcgactgggaccgcctgacccacaacgacatcgtggccaccacctacctgagcatgagcaagatcagcgcccccggcggcgagatcgaggaggagcccgccggcgccgtgaagcccagcaaggccagcgacctggacgactacctgggcttcctgcccaccttcggcccctgctacatcaacctgtacggcagcccccgcgagttcaccggcttccccgacccctacaccgagctgaacaccggcaagggcgagggcgtggcctaccgcggccgcctgctgctgagcctggagaccaagctggtggagcacagcgagcagaaggtggaggacctgcccgccgacgacatcctgcgcgtggagaagtacctgcgccgccgcaagtacagcctgttcgccgccttctacagcgccaccatgctgcaggacgtggacgacgccatccagttcgaggtgagcatcggcaactacggcaacaagttcgacatgacctgcctgcccctggccagcaccacccagtacagccgcgccgtgttcgacggctgccactactactacctgccctggggcaacgtgaagcccgtggtggtgctgagcagctactgggaggacatcagccaccgcatcgagacccagaaccagctgctgggcatcgccgaccgcctggaggccggcctggagcaggtgcacctggccctgaaggcccagtgcagcaccgaggacgtggacagcctggtggcccagctgaccgacgagctgatcgccggctgcagccagcccctgggcgacatccacgagacccccagcgccacccacctggaccagtacctgtaccagctgcgcacccaccacctgagccagatcaccgaggccgccctggccctgaagctgggccacagcgagctgcccgccgccctggagcaggccgaggactggctgctgcgcctgcgcgccctggccgaggagccccagaacagcctgcccgacatcgtgatctggatgctgcagggcgacaagcgcgtggcctaccagcgcgtgcccgcccaccaggtgctgttcagccgccgcggcgccaactactgcggcaagaactgcggcaagctgcagaccatcttcctgaagtaccccatggagaaggtgcccggcgcccgcatgcccgtgcagatccgcgtgaagctgtggttcggcctgagcgtggacgagaaggagttcaaccagttcgccgagggcaagctgagcgtgttcgccgagacctacgagaacgagaccaagctggccctggtgggcaactggggcaccaccggcctgacctaccccaagttcagcgacgtgaccggcaagatcaagctgcccaaggacagcttccgccccagcgccggctggacctgggccggcgactggttcgtgtgccccgagaagaccctgctgcacgacatggacgccggccacctgagcttcgtggaggaggtgttcgagaaccagacccgcctgcccggcggccagtggatctacatgagcgacaactacaccgacgtgaacggcgagaaggtgctgcccaaggacgacatcgagtgccccctgggctggaagtgggaggacgaggagtggagcaccgacctgaaccgcgccgtggacgagcagggctgggagtacagcatcaccatcccccccgagcgcaagcccaagcactgggtgcccgccgagaagatgtactacacccaccgccgccgccgctgggtgcgcctgcgccgccgcgacctgagccagatggaggccctgaagcgccaccgccaggccgaggccgagggcgagggctgggagtacgccagcctgttcggctggaagttccacctggagtaccgcaagaccgacgccttccgccgccgccgctggcgccgccgcatggagcccctggagaagaccggccccgccgccgtgttcgccctggagggcgccctgggcggcgtgatggacgacaagagcgaggacagcatgagcgtgagcaccctgagcttcggcgtgaaccgccccaccatcagctgcatcttcgactacggcaaccgctaccacctgcgctgctacatgtaccaggcccgcgacctggccgccatggacaaggacagcttcagcgacccctacgccatcgtgagcttcctgcaccagagccagaagaccgtggtggtgaagaacaccctgaaccccacctgggaccagaccctgatcttctacgagatcgagatcttcggcgagcccgccaccgtggccgagcagccccccagcatcgtggtggagctgtacgaccacgacacctacggcgccgacgagttcatgggccgctgcatctgccagcccagcctggagcgcatgccccgcctggcctggttccccctgacccgcggcagccagcccagcggcgagctgctggccagcttcgagctgatccagcgcgagaagcccgccatccaccacatccccggcttcgaggtgcaggagaccagccgcatcctggacgagagcgaggacaccgacctgccctacccccccccccagcgcgaggccaacatctacatggtgccccagaacatcaagcccgccctgcagcgcaccgccatcgagatcctggcctggggcctgcgcaacatgaagagctaccagctggccaacatcagcagccccagcctggtggtggagtgcggcggccagaccgtgcagagctgcgtgatccgcaacctgcgcaagaaccccaacttcgacatctgcaccctgttcatggaggtgatgctgccccgcgaggagctgtactgcccccccatcaccgtgaaggtgatcgacaaccgccagttcggccgccgccccgtggtgggccagtgcaccatccgcagcctggagagcttcctgtgcgacccctacagcgccgagagccccagcccccagggcggccccgacgacgtgagcctgctgagccccggcgaggacgtgctgatcgacatcgacgacaaggagcccctgatccccatccaggaggaggagttcatcgactggtggagcaagttcttcgccagcatcggcgagcgcgagaagtgcggcagctacctggagaaggacttcgacaccctgaaggtgtacgacacccagctggagaacgtggaggccttcgagggcctgagcgacttctgcaacaccttcaagctgtaccgcggcaagacccaggaggagaccgaggaccccagcgtgatcggcgagttcaagggcctgttcaagatctaccccctgcccgaggaccccgccatccccatgcccccccgccagttccaccagctggccgcccagggcccccaggagtgcctggtgcgcatctacatcgtgcgcgccttcggcctgcagcccaaggaccccaacggcaagtgcgacccctacatcaagatcagcatcggcaagaagagcgtgagcgaccaggacaactacatcccctgcaccctggagcccgtgttcggcaagatgttcgagctgacctgcaccctgcccctggagaaggacctgaagatcaccctgtacgactacgacctgctgagcaaggacgagaagatcggcgagaccgtggtggacctggagaaccgcctgctgagcaagttcggcgcccgctgcggcctgccccagacctactgcgtgagcggccccaaccagtggcgcgaccagctgcgccccagccagctgctgcacctgttctgccagcagcaccgcgtgaaggcccccgtgtaccgcaccgaccgcgtgatgttccaggacaaggagtacagcatcgaggagatcgaggccggccgcatccccaacccccacctgggccccgtggaggagcgcctggccctgcacgtgctgcagcagcagggcctggtgcccgagcacgtggagagccgccccctgtacagccccctgcagcccgacatcgagcagggcaagctgcagatgtgggtggacctgttccccaaggccctgggccgccccggcccccccttcaacatcaccccccgccgcgcccgccgcttcttcctgcgctgcatcatctggaacacccgcgacgtgatcctggacgacctgagcctgaccggcgagaagatgagcgacatctacgtgaagggctggatgatcggcttcgaggagcacaagcagaagaccgacgtgcactaccgcagcctgggcggcgagggcaacttcaactggcgcttcatcttccccttcgactacctgcccgccgagcaggtgtgcaccatcgccaagaaggacgccttctggcgcctggacaagaccgagagcaagatccccgcccgcgtggtgttccagatctgggacaacgacaagttcagcttcgacgacttcctgggcagcctgcagctggacctgaaccgcatgcccaagcccgccaagaccgccaagaagtgcagcctggaccagctggacgacgccttccaccccgagtggttcgtgagcctgttcgagcagaagaccgtgaagggctggtggccctgcgtggccgaggagggcgagaagaagatcctggccggcaagctggagatgaccctggagatcgtggccgagagcgagcacgaggagcgccccgccggccagggccgcgacgagcccaacatgaaccccaagctggaggacccccgccgccccgacaccagcttcctgtggttcaccagcccctacaagaccatgaagttcatcctgtggcgccgcttccgctgggccatcatcctgttcatcatcctgttcatcctgctgctgttcctggccatcttcatctacgccttccccaactacgccgccatgaagctggtgaagcccttcagc

SEQ ID NO: 1468 - DNA, 6303 bp, synthetic construct
  misc_feature 1..6303: note = source = /note="Description of Artificial Sequence: Synthetic coding sequence"
  source 1..6303: mol_type = other DNA
atgctgcgcgtgttcatcctgtacgccgagaacgtgcacacccccgacaccgacatcagcgacgcctactgcagcgccgtgttcgccggcgtgaagaagcgcaccaaggtgatcaagaacagcgtgaaccccgtgtggaacgagggcttcgagtgggacctgaagggcatccccctggaccagggcagcgagctgcacgtggtggtgaaggaccacgagaccatgggccgcaaccgcttcctgggcgaggccaaggtgcccctgcgcgaggtgctggccacccccagcctgagcgccagcttcaacgcccccctgctggacaccaagaagcagcccaccggcgccagcctggtgctgcaggtgagctacacccccctgcccggcgccgtgcccctgttccccccccccacccccctggagcccagccccaccctgcccgacctggacgtggtggccgacaccggcggcgaggaggacaccgaggaccagggcctgaccggcgacgaggccgagcccttcctggaccagagcggcggccccggcgcccccaccaccccccgcaagctgcccagccgcccccccccccactaccccggcatcaagcgcaagcgcagcgcccccaccagccgcaagctgctgagcgacaagccccaggacttccagatccgcgtgcaggtgatcgagggccgccagctgcccggcgtgaacatcaagcccgtggtgaaggtgaccgccgccggccagaccaagcgcacccgcatccacaagggcaacagccccctgttcaacgagaccctgttcttcaacctgttcgacagccccggcgagctgttcgacgagcccatcttcatcaccgtggtggacagccgcagcctgcgcaccgacgccctgctgggcgagttccgcatggacgtgggcaccatctaccgcgagccccgccacgcctacctgcgcaagtggctgctgctgagcgaccccgacgacttcagcgccggcgcccgcggctacctgaagaccagcctgtgcgtgctgggccccggcgacgaggcccccctggagcgcaaggaccccagcgaggacaaggaggacatcgagagcaacctgctgcgccccaccggcgtggccctgcgcggcgcccacttctgcctgaaggtgttccgcgccgaggacctgccccagatggacgacgccgtgatggacaacgtgaagcagatcttcggcttcgagagcaacaagaagaacctggtggaccccttcgtggaggtgagcttcgccggcaagatgctgtgcagcaagatcctggagaagaccgccaacccccagtggaaccagaacatcaccctgcccgccatgttccccagcatgtgcgagaagatgcgcatccgcatcatcgactgggaccgcctgacccacaacgacatcgtggccaccacctacctgagcatgagcaagatcagcgcccccggcggcgagatcgaggaggagcccgccggcgccgtgaagcccagcaaggccagcgacctggacgactacctgggcttcctgcccaccttcggcccctgctacatcaacctgtacggcagcccccgcgagttcaccggcttccccgacccctacaccgagctgaacaccggcaagggcgagggcgtggcctaccgcggccgcctgctgctgagcctggagaccaagctggtggagcacagcgagcagaaggtggaggacctgcccgccgacgacatcctgcgcgtggagaagtacctgcgccgccgcaagtacagcctgttcgccgccttctacagcgccaccatgctgcaggacgtggacgacgccatccagttcgaggtgagcatcggcaactacggcaacaagttcgacatgacctgcctgcccctggccagcaccacccagtacagccgcgccgtgttcgacggctgccactactactacctgccctggggcaacgtgaagcccgtggtggtgctgagcagctactgggaggacatcagccaccgcatcgagacccagaaccagctgctgggcatcgccgaccgcctggaggccggcctggagcaggtgcacctggccctgaaggcccagtgcagcaccgaggacgtggacagcctggtggcccagctgaccgacgagctgatcgccggctgcagccagcccctgggcgacatccacgagacccccagcgccacccacctggaccagtacctgtaccagctgcgcacccaccacctgagccagatcaccgaggccgccctggccctgaagctgggccacagcgagctgcccgccgccctggagcaggccgaggactggctgctgcgcctgcgcgccctggccgaggagccccagaacagcctgcccgacatcgtgatctggatgctgcagggcgacaagcgcgtggcctaccagcgcgtgcccgcccaccaggtgctgttcagccgccgcggcgccaactactgcggcaagaactgcggcaagctgcagaccatcttcctgaagtaccccatggagaaggtgcccggcgcccgcatgcccgtgcagatccgcgtgaagctgtggttcggcctgagcgtggacgagaaggagttcaaccagttcgccgagggcaagctgagcgtgttcgccgagacctacgagaacgagaccaagctggccctggtgggcaactggggcaccaccggcctgacctaccccaagttcagcgacgtgaccggcaagatcaagctgcccaaggacagcttccgccccagcgccggctggacctgggccggcgactggttcgtgtgccccgagaagaccctgctgcacgacatggacgccggccacctgagcttcgtggaggaggtgttcgagaaccagacccgcctgcccggcggccagtggatctacatgagcgacaactacaccgacgtgaacggcgagaaggtgctgcccaaggacgacatcgagtgccccctgggctggaagtgggaggacgaggagtggagcaccgacctgaaccgcgccgtggacgagcagggctgggagtacagcatcaccatcccccccgagcgcaagcccaagcactgggtgcccgccgagaagatgtactacacccaccgccgccgccgctgggtgcgcctgcgccgccgcgacctgagccagatggaggccctgaagcgccaccgccaggccgaggccgagggcgagggctgggagtacgccagcctgttcggctggaagttccacctggagtaccgcaagaccgacgccttccgccgccgccgctggcgccgccgcatggagcccctggagaagaccggccccgccgccgtgttcgccctggagggcgccctgggcggcgtgatggacgacaagagcgaggacagcatgagcgtgagcaccctgagcttcggcgtgaaccgccccaccatcagctgcatcttcgactacggcaaccgctaccacctgcgctgctacatgtaccaggcccgcgacctggccgccatggacaaggacagcttcagcgacccctacgccatcgtgagcttcctgcaccagagccagaagaccgtggtggtgaagaacaccctgaaccccacctgggaccagaccctgatcttctacgagatcgagatcttcggcgagcccgccaccgtggccgagcagccccccagcatcgtggtggagctgtacgaccacgacacctacggcgccgacgagttcatgggccgctgcatctgccagcccagcctggagcgcatgccccgcctggcctggttccccctgacccgcggcagccagcccagcggcgagctgctggccagcttcgagctgatccagcgcgagaagcccgccatccaccacatccccggcttcgaggtgcaggagaccagccgcatcctggacgagagcgaggacaccgacctgccctacccccccccccagcgcgaggccaacatctacatggtgccccagaacatcaagcccgccctgcagcgcaccgccatcgagatcctggcctggggcctgcgcaacatgaagagctaccagctggccaacatcagcagccccagcctggtggtggagtgcggcggccagaccgtgcagagctgcgtgatccgcaacctgcgcaagaaccccaacttcgacatctgcaccctgttcatggaggtgatgctgccccgcgaggagctgtactgcccccccatcaccgtgaaggtgatcgacaaccgccagttcggccgccgccccgtggtgggccagtgcaccatccgcagcctggagagcttcctgtgcgacccctacagcgccgagagccccagcccccagggcggccccgacgacgtgagcctgctgagccccggcgaggacgtgctgatcgacatcgacgacaaggagcccctgatccccatccagctggccgacggcctgagcagcctggcccccaccaacaccgccagcccccccagcagcccccacgaggaggagttcatcgactggtggagcaagttcttcgccagcatcggcgagcgcgagaagtgcggcagctacctggagaaggacttcgacaccctgaaggtgtacgacacccagctggagaacgtggaggccttcgagggcctgagcgacttctgcaacaccttcaagctgtaccgcggcaagacccaggaggagaccgaggaccccagcgtgatcggcgagttcaagggcctgttcaagatctaccccctgcccgaggaccccgccatccccatgcccccccgccagttccaccagctggccgcccagggcccccaggagtgcctggtgcgcatctacatcgtgcgcgccttcggcctgcagcccaaggaccccaacggcaagtgcgacccctacatcaagatcagcatcggcaagaagagcgtgagcgaccaggacaactacatcccctgcaccctggagcccgtgttcggcaagatgttcgagctgacctgcaccctgcccctggagaaggacctgaagatcaccctgtacgactacgacctgctgagcaaggacgagaagatcggcgagaccgtggtggacctggagaaccgcctgctgagcaagttcggcgcccgctgcggcctgccccagacctactgcgtgagcggccccaaccagtggcgcgaccagctgcgccccagccagctgctgcacctgttctgccagcagcaccgcgtgaaggcccccgtgtaccgcaccgaccgcgtgatgttccaggacaaggagtacagcatcgaggagatcgaggccggccgcatccccaacccccacctgggccccgtggaggagcgcctggccctgcacgtgctgcagcagcagggcctggtgcccgagcacgtggagagccgccccctgtacagccccctgcagcccgacatcgagcagggcaagctgcagatgtgggtggacctgttccccaaggccctgggccgccccggcccccccttcaacatcaccccccgccgcgcccgccgcttcttcctgcgctgcatcatctggaacacccgcgacgtgatcctggacgacctgagcctgaccggcgagaagatgagcgacatctacgtgaagggctggatgatcggcttcgaggagcacaagcagaagaccgacgtgcactaccgcagcctgggcggcgagggcaacttcaactggcgcttcatcttccccttcgactacctgcccgccgagcaggtgtgcaccatcgccaagaaggacgccttctggcgcctggacaagaccgagagcaagatccccgcccgcgtggtgttccagatctgggacaacgacaagttcagcttcgacgacttcctgggcagcctgcagctggacctgaaccgcatgcccaagcccgccaagaccgccaagaagtgcagcctggaccagctggacgacgccttccaccccgagtggttcgtgagcctgttcgagcagaagaccgtgaagggctggtggccctgcgtggccgaggagggcgagaagaagatcctggccggcaagctggagatgaccctggagatcgtggccgagagcgagcacgaggagcgccccgccggccagggccgcgacgagcccaacatgaaccccaagctggaggacccccgccgccccgacaccagcttcctgtggttcaccagcccctacaagaccatgaagttcatcctgtggcgccgcttccgctgggccatcatcctgttcatcatcctgttcatcctgctgctgttcctggccatcttcatctacgccttccccaactacgccgccatgaagctggtgaagcccttcagc

SEQ ID NO: 1469 - DNA, 2598 bp, synthetic construct
  misc_feature 1..2598: note = source = /note="Description of Artificial Sequence: Synthetic coding sequence"
  source 1..2598: mol_type = other DNA
atgttcagcatgcgcatcgtgtgcctggtgctgagcgtggtgggcaccgcctggaccgccgacagcggcgagggcgacttcctggccgagggcggcggcgtgcgcggcccccgcgtggtggagcgccaccagagcgcctgcaaggacagcgactggcccttctgcagcgacgaggactggaactacaagtgccccagcggctgccgcatgaagggcctgatcgacgaggtgaaccaggacttcaccaaccgcatcaacaagctgaagaacagcctgttcgagtaccagaagaacaacaaggacagccacagcctgaccaccaacatcatggagatcctgcgcggcgacttcagcagcgccaacaaccgcgacaacacctacaaccgcgtgagcgaggacctgcgcagccgcatcgaggtgctgaagcgcaaggtgatcgagaaggtgcagcacatccagctgctgcagaagaacgtgcgcgcccagctggtggacatgaagcgcctggaggtggacatcgacatcaagatccgcagctgccgcggcagctgcagccgcgccctggcccgcgaggtggacctgaaggactacgaggaccagcagaagcagctggagcaggtgatcgccaaggacctgctgcccagccgcgaccgccagcacctgcccctgatcaagatgaagcccgtgcccgacctggtgcccggcaacttcaagagccagctgcagaaggtgccccccgagtggaaggccctgaccgacatgccccagatgcgcatggagctggagcgccccggcggcaacgagatcacccgcggcggcagcaccagctacggcaccggcagcgagaccgagagcccccgcaaccccagcagcgccggcagctggaacagcggcagcagcggccccggcagcaccggcaaccgcaaccccggcagcagcggcaccggcggcaccgccacctggaagcccggcagcagcggccccggcagcaccggcagctggaacagcggcagcagcggcaccggcagcaccggcaaccagaaccccggcagcccccgccccggcagcaccggcacctggaaccccggcagcagcgagcgcggcagcgccggccactggaccagcgagagcagcgtgagcggcagcaccggccagtggcacagcgagagcggcagcttccgccccgacagccccggcagcggcaacgcccgccccaacaaccccgactggggcaccttcgaggaggtgagcggcaacgtgagccccggcacccgccgcgagtaccacaccgagaagctggtgaccagcaagggcgacaaggagctgcgcaccggcaaggagaaggtgaccagcggcagcaccaccaccacccgccgcagctgcagcaagaccgtgaccaagaccgtgatcggccccgacggccacaaggaggtgaccaaggaggtggtgaccagcgaggacggcagcgactgccccgaggccatggacctgggcaccctgagcggcatcggcaccctggacggcttccgccaccgccaccccgacgaggccgccttcttcgacaccgccagcaccggcaagaccttccccggcttcttcagccccatgctgggcgagttcgtgagcgagaccgagagccgcggcagcgagagcggcatcttcaccaacaccaaggagagcagcagccaccaccccggcatcgccgagttccccagccgcggcaagagcagcagctacagcaagcagttcaccagcagcaccagctacaaccgcggcgacagcaccttcgagagcaagagctacaagatggccgacgaggccggcagcgaggccgaccacgagggcacccacagcaccaagcgcggccacgccaagagccgccccgtgcgcgactgcgacgacgtgctgcagacccaccccagcggcacccagagcggcatcttcaacatcaagctgcccggcagcagcaagatcttcagcgtgtactgcgaccaggagaccagcctgggcggctggctgctgatccagcagcgcatggacggcagcctgaacttcaaccgcacctggcaggactacaagcgcggcttcggcagcctgaacgacgagggcgagggcgagttctggctgggcaacgactacctgcacctgctgacccagcgcggcagcgtgctgcgcgtggagctggaggactgggccggcaacgaggcctacgccgagtaccacttccgcgtgggcagcgaggccgagggctacgccctgcaggtgagcagctacgagggcaccgccggcgacgccctgatcgagggcagcgtggaggagggcgccgagtacaccagccacaacaacatgcagttcagcaccttcgaccgcgacgccgaccagtgggaggagaactgcgccgaggtgtacggcggcggctggtggtacaacaactgccaggccgccaacctgaacggcatctactaccccggcggcagctacgacccccgcaacaacagcccctacgagatcgagaacggcgtggtgtgggtgagcttccgcggcgccgactacagcctgcgcgccgtgcgcatgaagatccgccccctggtgacccag

SEQ ID NO: 1470 - DNA, 1932 bp, synthetic construct
  misc_feature 1..1932: note = source = /note="Description of Artificial Sequence: Synthetic coding sequence"
  source 1..1932: mol_type = other DNA
atgttcagcatgcgcatcgtgtgcctggtgctgagcgtggtgggcaccgcctggaccgccgacagcggcgagggcgacttcctggccgagggcggcggcgtgcgcggcccccgcgtggtggagcgccaccagagcgcctgcaaggacagcgactggcccttctgcagcgacgaggactggaactacaagtgccccagcggctgccgcatgaagggcctgatcgacgaggtgaaccaggacttcaccaaccgcatcaacaagctgaagaacagcctgttcgagtaccagaagaacaacaaggacagccacagcctgaccaccaacatcatggagatcctgcgcggcgacttcagcagcgccaacaaccgcgacaacacctacaaccgcgtgagcgaggacctgcgcagccgcatcgaggtgctgaagcgcaaggtgatcgagaaggtgcagcacatccagctgctgcagaagaacgtgcgcgcccagctggtggacatgaagcgcctggaggtggacatcgacatcaagatccgcagctgccgcggcagctgcagccgcgccctggcccgcgaggtggacctgaaggactacgaggaccagcagaagcagctggagcaggtgatcgccaaggacctgctgcccagccgcgaccgccagcacctgcccctgatcaagatgaagcccgtgcccgacctggtgcccggcaacttcaagagccagctgcagaaggtgccccccgagtggaaggccctgaccgacatgccccagatgcgcatggagctggagcgccccggcggcaacgagatcacccgcggcggcagcaccagctacggcaccggcagcgagaccgagagcccccgcaaccccagcagcgccggcagctggaacagcggcagcagcggccccggcagcaccggcaaccgcaaccccggcagcagcggcaccggcggcaccgccacctggaagcccggcagcagcggccccggcagcaccggcagctggaacagcggcagcagcggcaccggcagcaccggcaaccagaaccccggcagcccccgccccggcagcaccggcacctggaaccccggcagcagcgagcgcggcagcgccggccactggaccagcgagagcagcgtgagcggcagcaccggccagtggcacagcgagagcggcagcttccgccccgacagccccggcagcggcaacgcccgccccaacaaccccgactggggcaccttcgaggaggtgagcggcaacgtgagccccggcacccgccgcgagtaccacaccgagaagctggtgaccagcaagggcgacaaggagctgcgcaccggcaaggagaaggtgaccagcggcagcaccaccaccacccgccgcagctgcagcaagaccgtgaccaagaccgtgatcggccccgacggccacaaggaggtgaccaaggaggtggtgaccagcgaggacggcagcgactgccccgaggccatggacctgggcaccctgagcggcatcggcaccctggacggcttccgccaccgccaccccgacgaggccgccttcttcgacaccgccagcaccggcaagaccttccccggcttcttcagccccatgctgggcgagttcgtgagcgagaccgagagccgcggcagcgagagcggcatcttcaccaacaccaaggagagcagcagccaccaccccggcatcgccgagttccccagccgcggcaagagcagcagctacagcaagcagttcaccagcagcaccagctacaaccgcggcgacagcaccttcgagagcaagagctacaagatggccgacgaggccggcagcgaggccgaccacgagggcacccacagcaccaagcgcggccacgccaagagccgccccgtgcgcggcatccacaccagccccctgggcaagcccagcctgagcccc

SEQ ID NO: 1471 - DNA, 1473 bp, synthetic construct
  misc_feature 1..1473: note = source = /note="Description of Artificial Sequence: Synthetic coding sequence"
  source 1..1473: mol_type = other DNA
atgaagcgcatggtgagctggagcttccacaagctgaagaccatgaagcacctgctgctgctgctgctgtgcgtgttcctggtgaagagccagggcgtgaacgacaacgaggagggcttcttcagcgcccgcggccaccgccccctggacaagaagcgcgaggaggcccccagcctgcgccccgcccccccccccatcagcggcggcggctaccgcgcccgccccgccaaggccgccgccacccagaagaaggtggagcgcaaggcccccgacgccggcggctgcctgcacgccgaccccgacctgggcgtgctgtgccccaccggctgccagctgcaggaggccctgctgcagcaggagcgccccatccgcaacagcgtggacgagctgaacaacaacgtggaggccgtgagccagaccagcagcagcagcttccagtacatgtacctgctgaaggacctgtggcagaagcgccagaagcaggtgaaggacaacgagaacgtggtgaacgagtacagcagcgagctggagaagcaccagctgtacatcgacgagaccgtgaacagcaacatccccaccaacctgcgcgtgctgcgcagcatcctggagaacctgcgcagcaagatccagaagctggagagcgacgtgagcgcccagatggagtactgccgcaccccctgcaccgtgagctgcaacatccccgtggtgagcggcaaggagtgcgaggagatcatccgcaagggcggcgagaccagcgagatgtacctgatccagcccgacagcagcgtgaagccctaccgcgtgtactgcgacatgaacaccgagaacggcggctggaccgtgatccagaaccgccaggacggcagcgtggacttcggccgcaagtgggacccctacaagcagggcttcggcaacgtggccaccaacaccgacggcaagaactactgcggcctgcccggcgagtactggctgggcaacgacaagatcagccagctgacccgcatgggccccaccgagctgctgatcgagatggaggactggaagggcgacaaggtgaaggcccactacggcggcttcaccgtgcagaacgaggccaacaagtaccagatcagcgtgaacaagtaccgcggcaccgccggcaacgccctgatggacggcgccagccagctgatgggcgagaaccgcaccatgaccatccacaacggcatgttcttcagcacctacgaccgcgacaacgacggctggctgaccagcgacccccgcaagcagtgcagcaaggaggacggcggcggctggtggtacaaccgctgccacgccgccaaccccaacggccgctactactggggcggccagtacacctgggacatggccaagcacggcaccgacgacggcgtggtgtggatgaactggaagggcagctggtacagcatgcgcaagatgagcatgaagatccgccccttcttcccccagcag

SEQ ID NO: 1472 - DNA, 1359 bp, synthetic construct
  misc_feature 1..1359: note = source = /note="Description of Artificial Sequence: Synthetic coding sequence"
  source 1..1359: mol_type = other DNA
atgagctggagcctgcacccccgcaacctgatcctgtacttctacgccctgctgttcctgagcagcacctgcgtggcctacgtggccacccgcgacaactgctgcatcctggacgagcgcttcggcagctactgccccaccacctgcggcatcgccgacttcctgagcacctaccagaccaaggtggacaaggacctgcagagcctggaggacatcctgcaccaggtggagaacaagaccagcgaggtgaagcagctgatcaaggccatccagctgacctacaaccccgacgagagcagcaagcccaacatgatcgacgccgccaccctgaagagccgcaagatgctggaggagatcatgaagtacgaggccagcatcctgacccacgacagcagcatccgctacctgcaggagatctacaacagcaacaaccagaagatcgtgaacctgaaggagaaggtggcccagctggaggcccagtgccaggagccctgcaaggacaccgtgcagatccacgacatcaccggcaaggactgccaggacatcgccaacaagggcgccaagcagagcggcctgtacttcatcaagcccctgaaggccaaccagcagttcctggtgtactgcgagatcgacggcagcggcaacggctggaccgtgttccagaagcgcctggacggcagcgtggacttcaagaagaactggatccagtacaaggagggcttcggccacctgagccccaccggcaccaccgagttctggctgggcaacgagaagatccacctgatcagcacccagagcgccatcccctacgccctgcgcgtggagctggaggactggaacggccgcaccagcaccgccgactacgccatgttcaaggtgggccccgaggccgacaagtaccgcctgacctacgcctacttcgccggcggcgacgccggcgacgccttcgacggcttcgacttcggcgacgaccccagcgacaagttcttcaccagccacaacggcatgcagttcagcacctgggacaacgacaacgacaagttcgagggcaactgcgccgagcaggacggcagcggctggtggatgaacaagtgccacgccggccacctgaacggcgtgtactaccagggcggcacctacagcaaggccagcacccccaacggctacgacaacggcatcatctgggccacctggaagacccgctggtacagcatgaagaagaccaccatgaagatcatccccttcaaccgcctgaccatcggcgagggccagcagcaccacctgggcggcgccaagcaggtgcgccccgagcaccccgccgagaccgagtacgacagcctgtaccccgaggacgacctg

SEQ ID NO: 1473 - DNA, 1311 bp, synthetic construct
  misc_feature 1..1311: note = source = /note="Description of Artificial Sequence: Synthetic coding sequence"
  source 1..1311: mol_type = other DNA
atgagctggagcctgcacccccgcaacctgatcctgtacttctacgccctgctgttcctgagcagcacctgcgtggcctacgtggccacccgcgacaactgctgcatcctggacgagcgcttcggcagctactgccccaccacctgcggcatcgccgacttcctgagcacctaccagaccaaggtggacaaggacctgcagagcctggaggacatcctgcaccaggtggagaacaagaccagcgaggtgaagcagctgatcaaggccatccagctgacctacaaccccgacgagagcagcaagcccaacatgatcgacgccgccaccctgaagagccgcaagatgctggaggagatcatgaagtacgaggccagcatcctgacccacgacagcagcatccgctacctgcaggagatctacaacagcaacaaccagaagatcgtgaacctgaaggagaaggtggcccagctggaggcccagtgccaggagccctgcaaggacaccgtgcagatccacgacatcaccggcaaggactgccaggacatcgccaacaagggcgccaagcagagcggcctgtacttcatcaagcccctgaaggccaaccagcagttcctggtgtactgcgagatcgacggcagcggcaacggctggaccgtgttccagaagcgcctggacggcagcgtggacttcaagaagaactggatccagtacaaggagggcttcggccacctgagccccaccggcaccaccgagttctggctgggcaacgagaagatccacctgatcagcacccagagcgccatcccctacgccctgcgcgtggagctggaggactggaacggccgcaccagcaccgccgactacgccatgttcaaggtgggccccgaggccgacaagtaccgcctgacctacgcctacttcgccggcggcgacgccggcgacgccttcgacggcttcgacttcggcgacgaccccagcgacaagttcttcaccagccacaacggcatgcagttcagcacctgggacaacgacaacgacaagttcgagggcaactgcgccgagcaggacggcagcggctggtggatgaacaagtgccacgccggccacctgaacggcgtgtactaccagggcggcacctacagcaaggccagcacccccaacggctacgacaacggcatcatctgggccacctggaagacccgctggtacagcatgaagaagaccaccatgaagatcatccccttcaaccgcctgaccatcggcgagggccagcagcaccacctgggcggcgccaagcaggccggcgacgtg

SEQ ID NO: 1474 - DNA, 627 bp, synthetic construct
  misc_feature 1..627: note = source = /note="Description of Artificial Sequence: Synthetic coding sequence"
  source 1..627: mol_type = other DNA
atggacagcgacgagaccggcttcgagcacagcggcctgtgggtgagcgtgctggccggcctgctgctgggcgcctgccaggcccaccccatccccgacagcagccccctgctgcagttcggcggccaggtgcgccagcgctacctgtacaccgacgacgcccagcagaccgaggcccacctggagatccgcgaggacggcaccgtgggcggcgccgccgaccagagccccgagagcctgctgcagctgaaggccctgaagcccggcgtgatccagatcctgggcgtgaagaccagccgcttcctgtgccagcgccccgacggcgccctgtacggcagcctgcacttcgaccccgaggcctgcagcttccgcgagctgctgctggaggacggctacaacgtgtaccagagcgaggcccacggcctgcccctgcacctgcccggcaacaagagcccccaccgcgaccccgccccccgcggccccgcccgcttcctgcccctgcccggcctgccccccgccctgcccgagccccccggcatcctggccccccagccccccgacgtgggcagcagcgaccccctgagcatggtgggccccagccagggccgcagccccagctacgccagc

SEQ ID NO: 1475 - DNA, 1257 bp, synthetic construct
  misc_feature 1..1257: note = source = /note="Description of Artificial Sequence: Synthetic coding sequence"
  source 1..1257: mol_type = other DNA
atgagcttcatccccgtggccgaggacagcgacttccccatccacaacctgccctacggcgtgttcagcacccgcggcgacccccgcccccgcatcggcgtggccatcggcgaccagatcctggacctgagcatcatcaagcacctgttcaccggccccgtgctgagcaagcaccaggacgtgttcaaccagcccaccctgaacagcttcatgggcctgggccaggccgcctggaaggaggcccgcgtgttcctgcagaacctgctgagcgtgagccaggcccgcctgcgcgacgacaccgagctgcgcaagtgcgccttcatcagccaggccagcgccaccatgcacctgcccgccaccatcggcgactacaccgacttctacagcagccgccagcacgccaccaacgtgggcatcatgttccgcgacaaggagaacgccctgatgcccaactggctgcacctgcccgtgggctaccacggccgcgccagcagcgtggtggtgagcggcacccccatccgccgccccatgggccagatgaagcccgacgacagcaagccccccgtgtacggcgcctgcaagctgctggacatggagctggagatggccttcttcgtgggccccggcaaccgcctgggcgagcccatccccatcagcaaggcccacgagcacatcttcggcatggtgctgatgaacgactggagcgcccgcgacatccagaagtgggagtacgtgcccctgggccccttcctgggcaagagcttcggcaccaccgtgagcccctgggtggtgcccatggacgccctgatgcccttcgccgtgcccaaccccaagcaggacccccgccccctgccctacctgtgccacgacgagccctacaccttcgacatcaacctgagcgtgaacctgaagggcgagggcatgagccaggccgccaccatctgcaagagcaacttcaagtacatgtactggaccatgctgcagcagctgacccaccacagcgtgaacggctgcaacctgcgccccggcgacctgctggccagcggcaccatcagcggccccgagcccgagaacttcggcagcatgctggagctgagctggaagggcaccaagcccatcgacctgggcaacggccagacccgcaagttcctgctggacggcgacgaggtgatcatcaccggctactgccagggcgacggctaccgcatcggcttcggccagtgcgccggcaaggtgctgcccgccctgctgcccagc

SEQ ID NO: 1476 - DNA, 1566 bp, synthetic construct
  misc_feature 1..1566: note = source = /note="Description of Artificial Sequence: Synthetic coding sequence"
  source 1..1566: mol_type = other DNA
atggccgccgtggtggccgccacccgctggtggcagctgctgctggtgctgagcgccgccggcatgggcgccagcggcgccccccagccccccaacatcctgctgctgctgatggacgacatgggctggggcgacctgggcgtgtacggcgagcccagccgcgagacccccaacctggaccgcatggccgccgagggcctgctgttccccaacttctacagcgccaaccccctgtgcagccccagccgcgccgccctgctgaccggccgcctgcccatccgcaacggcttctacaccaccaacgcccacgcccgcaacgcctacaccccccaggagatcgtgggcggcatccccgacagcgagcagctgctgcccgagctgctgaagaaggccggctacgtgagcaagatcgtgggcaagtggcacctgggccaccgcccccagttccaccccctgaagcacggcttcgacgagtggttcggcagccccaactgccacttcggcccctacgacaacaaggcccgccccaacatccccgtgtaccgcgactgggagatggtgggccgctactacgaggagttccccatcaacctgaagaccggcgaggccaacctgacccagatctacctgcaggaggccctggacttcatcaagcgccaggcccgccaccaccccttcttcctgtactgggccgtggacgccacccacgcccccgtgtacgccagcaagcccttcctgggcaccagccagcgcggccgctacggcgacgccgtgcgcgagatcgacgacagcatcggcaagatcctggagctgctgcaggacctgcacgtggccgacaacaccttcgtgttcttcaccagcgacaacggcgccgccctgatcagcgcccccgagcagggcggcagcaacggccccttcctgtgcggcaagcagaccaccttcgagggcggcatgcgcgagcccgccctggcctggtggcccggccacgtgaccgccggccaggtgagccaccagctgggcagcatcatggacctgttcaccaccagcctggccctggccggcctgaccccccccagcgaccgcgccatcgacggcctgaacctgctgcccaccctgctgcagggccgcctgatggaccgccccatcttctactaccgcggcgacaccctgatggccgccaccctgggccagcacaaggcccacttctggacctggaccaacagctgggagaacttccgccagggcatcgacttctgccccggccagaacgtgagcggcgtgaccacccacaacctggaggaccacaccaagctgcccctgatcttccacctgggccgcgaccccggcgagcgcttccccctgagcttcgccagcgccgagtaccaggaggccctgagccgcatcaccagcgtggtgcagcagcaccaggaggccctggtgcccgcccagccccagctgaacgtgtgcaactgggccgtgatgaactgggccccccccggctgcgagaagctgggcaagtgcctgaccccccccgagagcatccccaagaagtgcctgtggagccac

SEQ ID NO: 1477 - DNA, 1341 bp, synthetic construct
  misc_feature 1..1341: note = source = /note="Description of Artificial Sequence: Synthetic coding sequence"
  source 1..1341: mol_type = other DNA
atggccgccgtggtggccgccacccgctggtggcagctgctgctggtgctgagcgccgccggcatgggcgccagcggcgcccccggccagcgcgcctacaccccccaggagatcgtgggcggcatccccgacagcgagcagctgctgcccgagctgctgaagaaggccggctacgtgagcaagatcgtgggcaagtggcacctgggccaccgcccccagttccaccccctgaagcacggcttcgacgagtggttcggcagccccaactgccacttcggcccctacgacaacaaggcccgccccaacatccccgtgtaccgcgactgggagatggtgggccgctactacgaggagttccccatcaacctgaagaccggcgaggccaacctgacccagatctacctgcaggaggccctggacttcatcaagcgccaggcccgccaccaccccttcttcctgtactgggccgtggacgccacccacgcccccgtgtacgccagcaagcccttcctgggcaccagccagcgcggccgctacggcgacgccgtgcgcgagatcgacgacagcatcggcaagatcctggagctgctgcaggacctgcacgtggccgacaacaccttcgtgttcttcaccagcgacaacggcgccgccctgatcagcgcccccgagcagggcggcagcaacggccccttcctgtgcggcaagcagaccaccttcgagggcggcatgcgcgagcccgccctggcctggtggcccggccacgtgaccgccggccaggtgagccaccagctgggcagcatcatggacctgttcaccaccagcctggccctggccggcctgaccccccccagcgaccgcgccatcgacggcctgaacctgctgcccaccctgctgcagggccgcctgatggaccgccccatcttctactaccgcggcgacaccctgatggccgccaccctgggccagcacaaggcccacttctggacctggaccaacagctgggagaacttccgccagggcatcgacttctgccccggccagaacgtgagcggcgtgaccacccacaacctggaggaccacaccaagctgcccctgatcttccacctgggccgcgaccccggcgagcgcttccccctgagcttcgccagcgccgagtaccaggaggccctgagccgcatcaccagcgtggtgcagcagcaccaggaggccctggtgcccgcccagccccagctgaacgtgtgcaactgggccgtgatgaactgggccccccccggctgcgagaagctgggcaagtgcctgaccccccccgagagcatccccaagaagtgcctgtggagccac

SEQ ID NO: 1478 - DNA, 2106 bp, synthetic construct
  misc_feature 1..2106: note = source = /note="Description of Artificial Sequence: Synthetic coding sequence"
  source 1..2106: mol_type = other DNA
atggccgcccccatgacccccgccgcccgccccgaggactacgaggccgccctgaacgccgccctggccgacgtgcccgagctggcccgcctgctggagatcgacccctacctgaagccctacgccgtggacttccagcgccgctacaagcagttcagccagatcctgaagaacatcggcgagaacgagggcggcatcgacaagttcagccgcggctacgagagcttcggcgtgcaccgctgcgccgacggcggcctgtactgcaaggagtgggcccccggcgccgagggcgtgttcctgaccggcgacttcaacggctggaaccccttcagctacccctacaagaagctggactacggcaagtgggagctgtacatcccccccaagcagaacaagagcgtgctggtgccccacggcagcaagctgaaggtggtgatcaccagcaagagcggcgagatcctgtaccgcatcagcccctgggccaagtacgtggtgcgcgagggcgacaacgtgaactacgactggatccactgggaccccgagcacagctacgagttcaagcacagccgccccaagaagccccgcagcctgcgcatctacgagagccacgtgggcatcagcagccacgagggcaaggtggccagctacaagcacttcacctgcaacgtgctgccccgcatcaagggcctgggctacaactgcatccagctgatggccatcatggagcacgcctactacgccagcttcggctaccagatcaccagcttcttcgccgccagcagccgctacggcacccccgaggagctgcaggagctggtggacaccgcccacagcatgggcatcatcgtgctgctggacgtggtgcacagccacgccagcaagaacagcgccgacggcctgaacatgttcgacggcaccgacagctgctacttccacagcggcccccgcggcacccacgacctgtgggacagccgcctgttcgcctacagcagctgggagatcctgcgcttcctgctgagcaacatccgctggtggctggaggagtaccgcttcgacggcttccgcttcgacggcgtgaccagcatgctgtaccaccaccacggcgtgggccagggcttcagcggcgactacagcgagtacttcggcctgcaggtggacgaggacgccctgacctacctgatgctggccaaccacctggtgcacaccctgtgccccgacagcatcaccatcgccgaggacgtgagcggcatgcccgccctgtgcagccccatcagccagggcggcggcggcttcgactaccgcctggccatggccatccccgacaagtggatccagctgctgaaggagttcaaggacgaggactggaacatgggcgacatcgtgtacaccctgaccaaccgccgctacctggagaagtgcatcgcctacgccgagagccacgaccaggccctggtgggcgacaagagcctggccttctggctgatggacgccgagatgtacaccaacatgagcgtgctgacccccttcacccccgtgatcgaccgcggcatccagctgcacaagatgatccgcctgatcacccacggcctgggcggcgagggctacctgaacttcatgggcaacgagttcggccaccccgagtggctggacttcccccgcaagggcaacaacgagagctaccactacgcccgccgccagttccacctgaccgacgacgacctgctgcgctacaagttcctgaacaacttcgaccgcgacatgaaccgcctggaggagcgctacggctggctggccgccccccaggcctacgtgagcgagaagcacgagggcaacaagatcatcgccttcgagcgcgccggcctgctgttcatcttcaacttccaccccagcaagagctacaccgactaccgcgtgggcaccgccctgcccggcaagttcaagatcgtgctggacagcgacgccgccgagtacggcggccaccagcgcctggaccacagcaccgacttcttcagcgaggccttcgagcacaacggccgcccctacagcctgctggtgtacatccccagccgcgtggccctgatcctgcagaacgtggacctgcccaac

SEQ ID NO: 1479 - DNA, 225 bp, synthetic construct
  misc_feature 1..225: note = source = /note="Description of Artificial Sequence: Synthetic coding sequence"
  source 1..225: mol_type = other DNA
atgggccgcgactaccgcacctgcctgaccatcgtgcagaagctgaagaagatggtggacaagcccacccagcgcagcgtgagcaacgccgccacccgcgtgtgccgcaccggccgcagccgctggcgcgacgtgtgccgcaacttcatgcgccgctaccagagccgcgtgacccagggcctggtggccggcgagaccgcccagcagatctgcgaggacctgcgc

SEQ ID NO: 1480 - DNA, 288 bp, synthetic construct
  misc_feature 1..288: note = source = /note="Description of Artificial Sequence: Synthetic coding sequence"
  source 1..288: mol_type = other DNA
atggccacctgggccctgctgctgctggccgccatgctgctgggcaaccccggcctggtgttcagcggccgcgactaccgcacctgcctgaccatcgtgcagaagctgaagaagatggtggacaagcccacccagcgcagcgtgagcaacgccgccacccgcgtgtgccgcaccggccgcagccgctggcgcgacgtgtgccgcaacttcatgcgccgctaccagagccgcgtgacccagggcctggtggccggcgagaccgcccagcagatctgcgaggacctgcgc

SEQ ID NO: 1481 - DNA, 1278 bp, synthetic construct
  misc_feature 1..1278: note = source = /note="Description of Artificial Sequence: Synthetic coding sequence"
  source 1..1278: mol_type = other DNA
atgggcgagcccggccagagccccagcccccgcagcagccacggcagcccccccaccctgagcaccctgaccctgctgctgctgctgtgcggccacgcccacagccagtgcaagatcctgcgctgcaacgccgagtacgtgagcagcaccctgagcctgcgcggcggcggcagcagcggcgccctgcgcggcggcggcggcggcggccgcggcggcggcgtgggcagcggcggcctgtgccgcgccctgcgcagctacgccctgtgcacccgccgcaccgcccgcacctgccgcggcgacctggccttccacagcgccgtgcacggcatcgaggacctgatgatccagcacaactgcagccgccagggccccaccgcccccccccccccccgcggccccgccctgcccggcgccggcagcggcctgcccgcccccgacccctgcgactacgagggccgcttcagccgcctgcacggccgcccccccggcttcctgcactgcgccagcttcggcgacccccacgtgcgcagcttccaccaccacttccacacctgccgcgtgcagggcgcctggcccctgctggacaacgacttcctgttcgtgcaggccaccagcagccccatggccctgggcgccaacgccaccgccacccgcaagctgaccatcatcttcaagaacatgcaggagtgcatcgaccagaaggtgtaccaggccgaggtggacaacctgcccgtggccttcgaggacggcagcatcaacggcggcgaccgccccggcggcagcagcctgagcatccagaccgccaaccccggcaaccacgtggagatccaggccgcctacatcggcaccaccatcatcatccgccagaccgccggccagctgagcttcagcatcaaggtggccgaggacgtggccatggccttcagcgccgagcaggacctgcagctgtgcgtgggcggctgcccccccagccagcgcctgagccgcagcgagcgcaaccgccgcggcgccatcaccatcgacaccgcccgccgcctgtgcaaggagggcctgcccgtggaggacgcctacttccacagctgcgtgttcgacgtgctgatcagcggcgaccccaacttcaccgtggccgcccaggccgccctggaggacgcccgcgccttcctgcccgacctggagaagctgcacctgttccccagcgacgccggcgtgcccctgagcagcgccaccctgctggcccccctgctgagcggcctgttcgtgctgtggctgtgcatccag

SEQ ID NO: 1482 - DNA, 939 bp, synthetic construct
  misc_feature 1..939: note = source = /note="Description of Artificial Sequence: Synthetic coding sequence"
  source 1..939: mol_type = other DNA
atgatccagcacaactgcagccgccagggccccaccgcccccccccccccccgcggccccgccctgcccggcgccggcagcggcctgcccgcccccgacccctgcgactacgagggccgcttcagccgcctgcacggccgcccccccggcttcctgcactgcgccagcttcggcgacccccacgtgcgcagcttccaccaccacttccacacctgccgcgtgcagggcgcctggcccctgctggacaacgacttcctgttcgtgcaggccaccagcagccccatggccctgggcgccaacgccaccgccacccgcaagctgaccatcatcttcaagaacatgcaggagtgcatcgaccagaaggtgtaccaggccgaggtggacaacctgcccgtggccttcgaggacggcagcatcaacggcggcgaccgccccggcggcagcagcctgagcatccagaccgccaaccccggcaaccacgtggagatccaggccgcctacatcggcaccaccatcatcatccgccagaccgccggccagctgagcttcagcatcaaggtggccgaggacgtggccatggccttcagcgccgagcaggacctgcagctgtgcgtgggcggctgcccccccagccagcgcctgagccgcagcgagcgcaaccgccgcggcgccatcaccatcgacaccgcccgccgcctgtgcaaggagggcctgcccgtggaggacgcctacttccacagctgcgtgttcgacgtgctgatcagcggcgaccccaacttcaccgtggccgcccaggccgccctggaggacgcccgcgccttcctgcccgacctggagaagctgcacctgttccccagcgacgccggcgtgcccctgagcagcgccaccctgctggcccccctgctgagcggcctgttcgtgctgtggctgtgcatccag

SEQ ID NO: 1483 - DNA, 279 bp, synthetic construct
  misc_feature 1..279: note = source = /note="Description of Artificial Sequence: Synthetic coding sequence"
  source 1..279: mol_type = other DNA
atgggcgagcccggccagagccccagcccccgcagcagccacggcagcccccccaccctgagcaccctgaccctgctgctgctgctgtgcggccacgcccacagccagtgcaagatcctgcgctgcaacgccgagtacgtgagcagcaccctgagcctgcgcggcggcggcagcagcggcgccctgcgcggcggcggcggcggcggccgcggcggcggcgtgggcagcggcggcctgtgccgcgccctgcgcagctacgccctgtgcacccgccgcacc

SEQ ID NO: 1484 - DNA, 600 bp, synthetic construct
  misc_feature 1..600: note = source = /note="Description of Artificial Sequence: Synthetic coding sequence"
  source 1..600: mol_type = other DNA
atgcaggagtgcatcgaccagaaggtgtaccaggccgaggtggacaacctgcccgtggccttcgaggacggcagcatcaacggcggcgaccgccccggcggcagcagcctgagcatccagaccgccaaccccggcaaccacgtggagatccaggccgcctacatcggcaccaccatcatcatccgccagaccgccggccagctgagcttcagcatcaaggtggccgaggacgtggccatggccttcagcgccgagcaggacctgcagctgtgcgtgggcggctgcccccccagccagcgcctgagccgcagcgagcgcaaccgccgcggcgccatcaccatcgacaccgcccgccgcctgtgcaaggagggcctgcccgtggaggacgcctacttccacagctgcgtgttcgacgtgctgatcagcggcgaccccaacttcaccgtggccgcccaggccgccctggaggacgcccgcgccttcctgcccgacctggagaagctgcacctgttccccagcgacgccggcgtgcccctgagcagcgccaccctgctggcccccctgctgagcggcctgttcgtgctgtggctgtgcatccag

SEQ ID NO: 1485 - DNA, 252 bp, synthetic construct
  misc_feature 1..252: note = source = /note="Description of Artificial Sequence: Synthetic coding sequence"
  source 1..252: mol_type = other DNA
atggccctgagcagccagatctgggccgcctgcctgctgctgctgctgctgctggccagcctgaccagcggcagcgtgttcccccagcagaccggccagctggccgagctgcagccccaggaccgcgccggcgcccgcgccagctggatgcccatgttccagcgccgccgccgccgcgacacccacttccccatctgcatcttctgctgcggctgctgccaccgcagcaagtgcggcatgtgctgcaagacc

SEQ ID NO: 1486 - DNA, 654 bp, synthetic construct
  misc_feature 1..654: note = source = /note="Description of Artificial Sequence: Synthetic coding sequence"
  source 1..654: mol_type = other DNA
atggccacccgcagccccggcgtggtgatcagcgacgacgagcccggctacgacctggacctgttctgcatccccaaccactacgccgaggacctggagcgcgtgttcatcccccacggcctgatcatggaccgcaccgagcgcctggcccgcgacgtgatgaaggagatgggcggccaccacatcgtggccctgtgcgtgctgaagggcggctacaagttcttcgccgacctgctggactacatcaaggccctgaaccgcaacagcgaccgcagcatccccatgaccgtggacttcatccgcctgaagagctactgcaacgaccagagcaccggcgacatcaaggtgatcggcggcgacgacctgagcaccctgaccggcaagaacgtgctgatcgtggaggacatcatcgacaccggcaagaccatgcagaccctgctgagcctggtgcgccagtacaaccccaagatggtgaaggtggccagcctgctggtgaagcgcaccccccgcagcgtgggctacaagcccgacttcgtgggcttcgagatccccgacaagttcgtggtgggctacgccctggactacaacgagtacttccgcgacctgaaccacgtgtgcgtgatcagcgagaccggcaaggccaagtacaaggcc

SEQ ID NO: 1487 - DNA, 534 bp, synthetic construct
  misc_feature 1..534: note = source = /note="Description of Artificial Sequence: Synthetic coding sequence"
  source 1..534: mol_type = other DNA
atgcacagcagcgccctgctgtgctgcctggtgctgctgaccggcgtgcgcgccagccccggccagggcacccagagcgagaacagctgcacccacttccccggcaacctgcccaacatgctgcgcgacctgcgcgacgccttcagccgcgtgaagaccttcttccagatgaaggaccagctggacaacctgctgctgaaggagagcctgctggaggacttcaagggctacctgggctgccaggccctgagcgagatgatccagttctacctggaggaggtgatgccccaggccgagaaccaggaccccgacatcaaggcccacgtgaacagcctgggcgagaacctgaagaccctgcgcctgcgcctgcgccgctgccaccgcttcctgccctgcgagaacaagagcaaggccgtggagcaggtgaagaacgccttcaacaagctgcaggagaagggcatctacaaggccatgagcgagttcgacatcttcatcaactacatcgaggcctacatgaccatgaagatccgcaac

SEQ ID NO: 1488 - DNA, 531 bp, synthetic construct
  misc_feature 1..531: note = source = /note="Description of Artificial Sequence: Synthetic coding sequence"
  source 1..531: mol_type = other DNA
atgttccacgtgagcttccgctacatcttcggcctgccccccctgatcctggtgctgctgcccgtggccagcagcgactgcgacatcgagggcaaggacggcaagcagtacgagagcgtgctgatggtgagcatcgaccagctgctggacagcatgaaggagatcggcagcaactgcctgaacaacgagttcaacttcttcaagcgccacatctgcgacgccaacaaggagggcatgttcctgttccgcgccgcccgcaagctgcgccagttcctgaagatgaacagcaccggcgacttcgacctgcacctgctgaaggtgagcgagggcaccaccatcctgctgaactgcaccggccaggtgaagggccgcaagcccgccgccctgggcgaggcccagcccaccaagagcctggaggagaacaagagcctgaaggagcagaagaagctgaacgacctgtgcttcctgaagcgcctgctgcaggagatcaagacctgctggaacaagatcctgatgggcaccaaggagcac

SEQ ID NO: 1489 - DNA, 213 bp, synthetic construct
  misc_feature 1..213: note = source = /note="Description of Artificial Sequence: Synthetic coding sequence"
  source 1..213: mol_type = other DNA
atgttccacgtgagcttccgctacatcttcggcctgccccccctgatcctggtgctgctgcccgtggccagcagcgactgcgacatcgagggcaaggacggcaagcagtacgagagcgtgctgatggtgagcatcgaccagctgctgaaccagccctacaagaagaaggagaagcgcaccgagcgcaagcagcagagcgccatgagcaacaac

SEQ ID NO: 1490 - DNA, 111 bp, synthetic construct
  misc_feature 1..111: note = source = /note="Description of Artificial Sequence: Synthetic coding sequence"
  source 1..111: mol_type = other DNA
atgttccacgtgagcttccgctacatcttcggcctgccccccctgatcctggtgctgctgcccgtggccagcagcgactgcgacatcgagggccagcacgagcgcaactgg

SEQ ID NO: 1491 - DNA, 399 bp, synthetic construct
  misc_feature 1..399: note = source = /note="Description of Artificial Sequence: Synthetic coding sequence"
  source 1..399: mol_type = other DNA
atgttccacgtgagcttccgctacatcttcggcctgccccccctgatcctggtgctgctgcccgtggccagcagcgactgcgacatcgagggcaaggacggcaagcagtacgagagcgtgctgatggtgagcatcgaccagctgctggacagcatgaaggagatcggcagcaactgcctgaacaacgagttcaacttcttcaagcgccacatctgcgacgccaacaaggtgaagggccgcaagcccgccgccctgggcgaggcccagcccaccaagagcctggaggagaacaagagcctgaaggagcagaagaagctgaacgacctgtgcttcctgaagcgcctgctgcaggagatcaagacctgctggaacaagatcctgatgggcaccaaggagcac

SEQ ID NO: 1492 - DNA, 192 bp, synthetic construct
  misc_feature 1..192: note = source = /note="Description of Artificial Sequence: Synthetic coding sequence"
  source 1..192: mol_type = other DNA
atgaaggagatcggcagcaactgcctgaacaacgagttcaacttcttcaagcgccacatctgcgacgccaacaaggaggagaacaagagcctgaaggagcagaagaagctgaacgacctgtgcttcctgaagcgcctgctgcaggagatcaagacctgctggaacaagatcctgatgggcaccaaggagcac

SEQ ID NO: 1493 - DNA, 3036 bp, synthetic construct
  misc_feature 1..3036: note = source = /note="Description of Artificial Sequence: Synthetic coding sequence"
  source 1..3036: mol_type = other DNA
atgcccgccagcgcccccccccgccgcccccgcccccccccccccagcctgagcctgctgctggtgctgctgggcctgggcggccgccgcctgcgcgccgagcccggcgacggcgcccagacctgggcccgcttcagccgcccccccgcccccgaggccgccggcctgttccagggcaccttccccgacggcttcctgtgggccgtgggcagcgccgcctaccagaccgagggcggctggcagcagcacggcaagggcgccagcatctgggacaccttcacccaccaccccctggccccccccggcgacagccgcaacgccagcctgcccctgggcgcccccagccccctgcagcccgccaccggcgacgtggccagcgacagctacaacaacgtgttccgcgacaccgaggccctgcgcgagctgggcgtgacccactaccgcttcagcatcagctgggcccgcgtgctgcccaacggcagcgccggcgtgcccaaccgcgagggcctgcgctactaccgccgcctgctggagcgcctgcgcgagctgggcgtgcagcccgtggtgaccctgtaccactgggacctgccccagcgcctgcaggacgcctacggcggctgggccaaccgcgccctggccgaccacttccgcgactacgccgagctgtgcttccgccacttcggcggccaggtgaagtactggatcaccatcgacaacccctacgtggtggcctggcacggctacgccaccggccgcctggcccccggcatccgcggcagcccccgcctgggctacctggtggcccacaacctgctgctggcccacgccaaggtgtggcacctgtacaacaccagcttccgccccacccagggcggccaggtgagcatcgccctgagcagccactggatcaacccccgccgcatgaccgaccacagcatcaaggagtgccagaagagcctggacttcgtgctgggctggttcgccaagcccgtgttcatcgacggcgactaccccgagagcatgaagaacaacctgagcagcatcctgcccgacttcaccgagagcgagaagaagttcatcaagggcaccgccgacttcttcgccctgtgcttcggccccaccctgagcttccagctgctggacccccacatgaagttccgccagctggagagccccaacctgcgccagctgctgagctggatcgacctggagttcaaccacccccagatcttcatcgtggagaacggctggttcgtgagcggcaccaccaagcgcgacgacgccaagtacatgtactacctgaagaagttcatcatggagaccctgaaggccatcaagctggacggcgtggacgtgatcggctacaccgcctggagcctgatggacggcttcgagtggcaccgcggctacagcatccgccgcggcctgttctacgtggacttcctgagccaggacaagatgctgctgcccaagagcagcgccctgttctaccagaagctgatcgagaagaacggcttcccccccctgcccgagaaccagcccctggagggcaccttcccctgcgacttcgcctggggcgtggtggacaactacatccaggtggacaccaccctgagccagttcaccgacctgaacgtgtacctgtgggacgtgcaccacagcaagcgcctgatcaaggtggacggcgtggtgaccaagaagcgcaagagctactgcgtggacttcgccgccatccagccccagatcgccctgctgcaggagatgcacgtgacccacttccgcttcagcctggactgggccctgatcctgcccctgggcaaccagagccaggtgaaccacaccatcctgcagtactaccgctgcatggccagcgagctggtgcgcgtgaacatcacccccgtggtggccctgtggcagcccatggcccccaaccagggcctgccccgcctgctggcccgccagggcgcctgggagaacccctacaccgccctggccttcgccgagtacgcccgcctgtgcttccaggagctgggccaccacgtgaagctgtggatcaccatgaacgagccctacacccgcaacatgacctacagcgccggccacaacctgctgaaggcccacgccctggcctggcacgtgtacaacgagaagttccgccacgcccagaacggcaagatcagcatcgccctgcaggccgactggatcgagcccgcctgccccttcagccagaaggacaaggaggtggccgagcgcgtgctggagttcgacatcggctggctggccgagcccatcttcggcagcggcgactacccctgggtgatgcgcgactggctgaaccagcgcaacaacttcctgctgccctacttcaccgaggacgagaagaagctgatccagggcaccttcgacttcctggccctgagccactacaccaccatcctggtggacagcgagaaggaggaccccatcaagtacaacgactacctggaggtgcaggagatgaccgacatcacctggctgaacagccccagccaggtggccgtggtgccctggggcctgcgcaaggtgctgaactggctgaagttcaagtacggcgacctgcccatgtacatcatcagcaacggcatcgacgacggcctgcacgccgaggacgaccagctgcgcgtgtactacatgcagaactacatcaacgaggccctgaaggcccacatcctggacggcatcaacctgtgcggctacttcgcctacagcttcaacgaccgcaccgccccccgcttcggcctgtaccgctacgccgccgaccagttcgagcccaaggccagcatgaagcactaccgcaagatcatcgacagcaacggcttccccggccccgagaccctggagcgcttctgccccgaggagttcaccgtgtgcaccgagtgcagcttcttccacacccgcaagagcctgctggccttcatcgccttcctgttcttcgccagcatcatcagcctgagcctgatcttctactacagcaagaagggccgccgcagctacaag

SEQ ID NO: 1494 - DNA, 726 bp, synthetic construct
  misc_feature 1..726: note = source = /note="Description of Artificial Sequence: Synthetic coding sequence"
  source 1..726: mol_type = other DNA
atgaccgaccacagcatcaaggagtgccagaagagcctggacttcgtgctgggctggttcgccaagcccgtgttcatcgacggcgactaccccgagagcatgaagaacaacctgagcagcatcctgcccgacttcaccgagagcgagaagaagttcatcaagggcaccgccgacttcttcgccctgtgcttcggccccaccctgagcttccagctgctggacccccacatgaagttccgccagctggagagccccaacctgcgccagctgctgagctggatcgacctggagttcaaccacccccagatcttcatcgtggagaacggctggttcgtgagcggcaccaccaagcgcgacgacgccaagtacatgtactacctgaagaagttcatcatggagaccctgaaggccatcaagctggacggcgtggacgtgatcggctacaccgcctggagcctgatggacggcttcgagtggcaccgcggctacagcatccgccgcggcctgttctacgtggacttcctgagccaggacaagatgctgctgcccaagagcagcgccctgttctaccagaagctgatcgagaagaacggcttcccccccctgcccgagaaccagcccctggagggcaccttcccctgcgacttcgcctggggcgtggtggacaactacatccaggtgagccagctgaccaagcccatcagcagcctgaccaagccctaccac

SEQ ID NO: 1495 - DNA, 1320 bp, synthetic construct
  misc_feature 1..1320: note = source = /note="Description of Artificial Sequence: Synthetic coding sequence"
  source 1..1320: mol_type = other DNA
atgggcccccccggcagcccctggcagtgggtgaccctgctgctgggcctgctgctgccccccgccgcccccttctggctgctgaacgtgctgttccccccccacaccacccccaaggccgagctgagcaaccacacccgccccgtgatcctggtgcccggctgcctgggcaaccagctggaggccaagctggacaagcccgacgtggtgaactggatgtgctaccgcaagaccgaggacttcttcaccatctggctggacctgaacatgttcctgcccctgggcgtggactgctggatcgacaacacccgcgtggtgtacaaccgcagcagcggcctggtgagcaacgcccccggcgtgcagatccgcgtgcccggcttcggcaagacctacagcgtggagtacctggacagcagcaagctggccggctacctgcacaccctggtgcagaacctggtgaacaacggctacgtgcgcgacgagaccgtgcgcgccgccccctacgactggcgcctggagcccggccagcaggaggagtactaccgcaagctggccggcctggtggaggagatgcacgccgcctacggcaagcccgtgttcctgatcggccacagcctgggctgcctgcacctgctgtacttcctgctgcgccagccccaggcctggaaggaccgcttcatcgacggcttcatcagcctgggcgccccctggggcggcagcatcaagcccatgctggtgctggccagcggcgacaaccagggcatccccatcatgagcagcatcaagctgaaggaggagcagcgcatcaccaccaccagcccctggatgttccccagccgcatggcctggcccgaggaccacgtgttcatcagcacccccagcttcaactacaccggccgcgacttccagcgcttcttcgccgacctgcacttcgaggagggctggtacatgtggctgcagagccgcgacctgctggccggcctgcccgcccccggcgtggaggtgtactgcctgtacggcgtgggcctgcccaccccccgcacctacatctacgaccacggcttcccctacaccgaccccgtgggcgtgctgtacgaggacggcgacgacaccgtggccacccgcagcaccgagctgtgcggcctgtggcagggccgccagccccagcccgtgcacctgctgcccctgcacggcatccagcacctgaacatggtgttcagcaacctgaccctggagcacatcaacgccatcctgctgggcgcctaccgccagggcccccccgccagccccaccgccagccccgagccccccccccccgag

SEQ ID NO: 1496 - DNA, 657 bp, synthetic construct
  misc_feature 1..657: note = source = /note="Description of Artificial Sequence: Synthetic coding sequence"
  source 1..657: mol_type = other DNA
atgaagatgcgcttcctgggcctggtggtgtgcctggtgctgtggaccctgcacagcgagggcagcggcggcaagctgaccgccgtggaccccgagaccaacatgaacgtgagcgagatcatcagctactggggcttccccagcgaggagtacctggtggagaccgaggacggctacatcctgtgcctgaaccgcatcccccacggccgcaagaaccacagcgacaagggccccaagcccgtggtgttcctgcagcacggcctgctggccgacagcagcaactgggtgaccaacctggccaacagcagcctgggcttcatcctggccgacgccggcttcgacgtgtggatgggcaacagccgcggcaacacctggagccgcaagcacaagaccctgagcgtgagccaggacgagttctgggccttcagctacgacgagatggccaagtacgacctgcccgccagcatcaacttcatcctgaacaagaccggccaggagcaggtgtactacgtgggccacagccagggcaccaccatcggcttcatcgccttcagccagatccccgagctggccaagcgcatcaagatgttcttcgccctgggccccgtggccagcgtggccttctgcaccagccccatggccaagctgggccgcctg

SEQ ID NO: 1497 - DNA, 1197 bp, synthetic construct
  misc_feature 1..1197: note = source = /note="Description of Artificial Sequence: Synthetic coding sequence"
  source 1..1197: mol_type = other DNA
atgaagatgcgcttcctgggcctggtggtgtgcctggtgctgtggaccctgcacagcgagggcagcggcggcaagctgaccgccgtggaccccgagaccaacatgaacgtgagcgagatcatcagctactggggcttccccagcgaggagtacctggtggagaccgaggacggctacatcctgtgcctgaaccgcatcccccacggccgcaagaaccacagcgacaagggccccaagcccgtggtgttcctgcagcacggcctgctggccgacagcagcaactgggtgaccaacctggccaacagcagcctgggcttcatcctggccgacgccggcttcgacgtgtggatgggcaacagccgcggcaacacctggagccgcaagcacaagaccctgagcgtgagccaggacgagttctgggccttcagctacgacgagatggccaagtacgacctgcccgccagcatcaacttcatcctgaacaagaccggccaggagcaggtgtactacgtgggccacagccagggcaccaccatcggcttcatcgccttcagccagatccccgagctggccaagcgcatcaagatgttcttcgccctgggccccgtggccagcgtggccttctgcaccagccccatggccaagctgggccgcctgcccgaccacctgatcaaggacctgttcggcgacaaggagttcctgccccagagcgccttcctgaagtggctgggcacccacgtgtgcacccacgtgatcctgaaggagctgtgcggcaacctgtgcttcctgctgtgcggcttcaacgagcgcaacctgaacatgagccgcgtggacgtgtacaccacccacagccccgccggcaccagcgtgcagaacatgctgcactggagccaggccgtgaagttccagaagttccaggccttcgactggggcagcagcgccaagaactacttccactacaaccagagctacccccccacctacaacgtgaaggacatgctggtgcccaccgccgtgtggagcggcggccacgactggctggccgacgtgtacgacgtgaacatcctgctgacccagatcaccaacctggtgttccacgagagcatccccgagtgggagcacctggacttcatctggggcctggacgccccctggcgcctgtacaacaagatcatcaacctgatgcgcaagtaccag

SEQ ID NO: 1498 - DNA, 1029 bp, synthetic construct
  misc_feature 1..1029: note = source = /note="Description of Artificial Sequence: Synthetic coding sequence"
  source 1..1029: mol_type = other DNA
atggcctgcctggagttcgtgcccttcgacgtgcagatgtgcctggagttcctgcccagcggccccaagcccgtggtgttcctgcagcacggcctgctggccgacagcagcaactgggtgaccaacctggccaacagcagcctgggcttcatcctggccgacgccggcttcgacgtgtggatgggcaacagccgcggcaacacctggagccgcaagcacaagaccctgagcgtgagccaggacgagttctgggccttcagctacgacgagatggccaagtacgacctgcccgccagcatcaacttcatcctgaacaagaccggccaggagcaggtgtactacgtgggccacagccagggcaccaccatcggcttcatcgccttcagccagatccccgagctggccaagcgcatcaagatgttcttcgccctgggccccgtggccagcgtggccttctgcaccagccccatggccaagctgggccgcctgcccgaccacctgatcaaggacctgttcggcgacaaggagttcctgccccagagcgccttcctgaagtggctgggcacccacgtgtgcacccacgtgatcctgaaggagctgtgcggcaacctgtgcttcctgctgtgcggcttcaacgagcgcaacctgaacatgagccgcgtggacgtgtacaccacccacagccccgccggcaccagcgtgcagaacatgctgcactggagccaggccgtgaagttccagaagttccaggccttcgactggggcagcagcgccaagaactacttccactacaaccagagctacccccccacctacaacgtgaaggacatgctggtgcccaccgccgtgtggagcggcggccacgactggctggccgacgtgtacgacgtgaacatcctgctgacccagatcaccaacctggtgttccacgagagcatccccgagtgggagcacctggacttcatctggggcctggacgccccctggcgcctgtacaacaagatcatcaacctgatgcgcaagtaccag

SEQ ID NO: 1499 - DNA, 1203 bp, synthetic construct
  misc_feature 1..1203: note = source = /note="Description of Artificial Sequence: Synthetic coding sequence"
  source 1..1203: mol_type = other DNA
atggcctgcctggagttcgtgcccttcgacgtgcagatgtgcctggagttcctgcccagcggcgagttcgtggtgctgctgaccagcggcgtgcagctgcagaccttcaccgtgagcgtgaccgacctgaagggcggcgccagcggcgtggtgcgcagcagccgctgggtgcgcggcttcaccgacttccgcagcaaggccgtggacctgtgcggccccaagcccgtggtgttcctgcagcacggcctgctggccgacagcagcaactgggtgaccaacctggccaacagcagcctgggcttcatcctggccgacgccggcttcgacgtgtggatgggcaacagccgcggcaacacctggagccgcaagcacaagaccctgagcgtgagccaggacgagttctgggccttccgcgtgcccttcctggactacagctacgacgagatggccaagtacgacctgcccgccagcatcaacttcatcctgaacaagaccggccaggagcaggtgtactacgtgggccacagccagggcaccaccatcggcttcatcgccttcagccagatccccgagctggccaagcgcatcaagatgttcttcgccctgggccccgtggccagcgtggccttctgcaccagccccatggccaagctgggccgcctgcccgaccacctgatcaaggacctgttcggcgacaaggagttcctgccccagagcgccttcctgaagtggctgggcacccacgtgtgcacccacgtgatcctgaaggagctgtgcggcaacctgtgcttcctgctgtgcggcttcaacgagcgcaacctgaacatgagccgcgtggacgtgtacaccacccacagccccgccggcaccagcgtgcagaacatgctgcactggagccaggccgtgaagttccagaagttccaggccttcgactggggcagcagcgccaagaactacttccactacaaccagagctacccccccacctacaacgtgaaggacatgctggtgcccaccgccgtgtggagcggcggccacgactggctggccgacgtgtacgacgtgaacatcctgctgacccagatcaccaacctggtgttccacgagagcatccccgagtgggagcacctggacttcatctggggcctggacgccccctggcgcctgtacaacaagatcatcaacctgatgcgcaagtaccag

SEQ ID NO: 1500 - DNA, 870 bp, synthetic construct
  misc_feature 1..870: note = source = /note="Description of Artificial Sequence: Synthetic coding sequence"
  source 1..870: mol_type = other DNA
atgaagatgcgcttcctgggcctggtggtgtgcctggtgctgtggaccctgcacagcgagggcagcggcggcaagctgaccgccgtggaccccgagaccaacatgaacgtgagcgagatcatcagctactggggcttccccagcgaggagtacctggtggagaccgaggacggctacatcctgtgcctgaaccgcatcccccacggccgcaagaaccacagcgacaagggccccaagcccgtggtgttcctgcagcacggcctgctggccgacagcagcaactgggtgaccaacctggccaacagcagcctgggcttcatcctggccgacgccggcttcgacgtgtggatgggcaacagccgcggcaacacctggagccgcaagcacaagaccctgagcgtgagccaggacgagttctgggccttcagctacgacgagatggccaagtacgacctgcccgccagcatcaacttcatcctgaacaagaccggccaggagcaggtgtactacgtgggccacagccagggcaccaccatcggcttcatcgccttcagccagatccccgagctggccaagcgcatcaagatgttcttcgccctgggccccgtggccagcgtggccttctgcaccagccccatggccaagctgggccgcctgcccgaccacctgatcaaggacctgttcggcgacaaggagttcctgccccagagcgccttcctgaagtggctgggcacccacgtgtgcacccacgtgatcctgaaggagctgtgcggcaacctgtgcttcctgctgtgcggcttcaacgagcgcaacctgaacatgagccgcgtggacgtgtacaccacccacagccccgccggcaccagcgtg

SEQ ID NO: 1501 - DNA, 408 bp, synthetic construct
  misc_feature 1..408: note = source = /note="Description of Artificial Sequence: Synthetic coding sequence"
  source 1..408: mol_type = other DNA
atgaagatgcgcttcctgggcctggtggtgtgcctggtgctgtggaccctgcacagcgagggcagcggcggcaagctgaccgccgtggaccccgagaccaacatgaacgtgagcgagatcatcagctactggggcttccccagcgaggagtacctggtggagaccgaggacggctacatcctgtgcctgaaccgcatcccccacggccgcaagaaccacagcgacaagggccccaagcccgtggtgttcctgcagcacggcctgctggccgacagcagcaactgggtgaccaacctggccaacagcagcctgggcttcatcctggccgacgccggcttcgacgtgtggatgggcaacagccgcggcaacacctggagccgcaagcacgtgaccctggagcccggctgc

SEQ ID NO: 1502 - DNA, 1425 bp, synthetic construct
  misc_feature 1..1425: note = source = /note="Description of Artificial Sequence: Synthetic coding sequence"
  source 1..1425: mol_type = other DNA
atggagagcaaggccctgctggtgctgaccctggccgtgtggctgcagagcctgaccgccagccgcggcggcgtggccgccgccgaccagcgccgcgacttcatcgacatcgagagcaagttcgccctgcgcacccccgaggacaccgccgaggacacctgccacctgatccccggcgtggccgagagcgtggccacctgccacttcaaccacagcagcaagaccttcatggtgatccacggctggaccgtgaccggcatgtacgagagctgggtgcccaagctggtggccgccctgtacaagcgcgagcccgacagcaacgtgatcgtggtggactggctgagccgcgcccaggagcactaccccgtgagcgccggctacaccaagctggtgggccaggacgtggcccgcttcatcaactggatggaggaggagttcaactaccccctggacaacgtgcacctgctgggctacagcctgggcgcccacgccgccggcatcgccggcagcctgaccaacaagaaggtgaaccgcatcaccggcctggaccccgccggccccaacttcgagtacgccgaggcccccagccgcctgagccccgacgacgccgacttcgtggacgtgctgcacaccttcacccgcggcagccccggccgcagcatcggcatccagaagcccgtgggccacgtggacatctaccccaacggcggcaccttccagcccggctgcaacatcggcgaggccatccgcgtgatcgccgagcgcggcctgggcgacgtggaccagctggtgaagtgcagccacgagcgcagcatccacctgttcatcgacagcctgctgaacgaggagaaccccagcaaggcctaccgctgcagcagcaaggaggccttcgagaagggcctgtgcctgagctgccgcaagaaccgctgcaacaacctgggctacgagatcaacaaggtgcgcgccaagcgcagcagcaagatgtacctgaagacccgcagccagatgccctacaaggtgttccactaccaggtgaagatccacttcagcggcaccgagagcgagacccacaccaaccaggccttcgagatcagcctgtacggcaccgtggccgagagcgagaacatccccttcaccctgcccgaggtgagcaccaacaagacctacagcttcctgatctacaccgaggtggacatcggcgagctgctgatgctgaagctgaagtggaagagcgacagctacttcagctggagcgactggtggagcagccccggcttcgccatccagaagatccgcgtgaaggccggcgagacccagaagaaggtgatcttctgcagccgcgagaaggtgagccacctgcagaagggcaaggcccccgccgtgttcgtgaagtgccacgacaagagcctgaacaagaagagcggc

SEQ ID NO: 1503 - DNA, 345 bp, synthetic construct
  misc_feature 1..345: note = source = /note="Description of Artificial Sequence: Synthetic coding sequence"
  source 1..345: mol_type = other DNA
atggtgatccacggctggaccgtgaccggcatgtacgagagctgggtgcccaagctggtggccgccctgtacaagcgcgagcccgacagcaacgtgatcgtggtggactggctgagccgcgcccaggagcactaccccgtgagcgccggctacaccaagctggtgggccaggacgtggcccgcttcatcaactggatggaggaggagttcaactaccccctggacaacgtgcacctgctgggctacagcctgggcgcccacgccgccggcatcgccggcagcctgaccaacaagaaggtgaaccgcatcaccggcctggaccccgccggccccaacttcgagtac

SEQ ID NO: 1504 - DNA, 318 bp, synthetic construct
  misc_feature 1..318: note = source = /note="Description of Artificial Sequence: Synthetic coding sequence"
  source 1..318: mol_type = other DNA
atggagagcaaggccctgctggtgctgaccctggccgtgtggctgcagagcctgaccgccagccgcggcggcgtggccgccgccgaccagcgccgcgacttcatcgacatcgagagcaagttcgccctgcgcacccccgaggacaccgccgaggacacctgccacctgatccccggcgtggccgagagcgtggccacctgccacttcaaccacagcagcaagaccttcatggtgatccacggctggaccgtgaccggcatgtacgagagctgggtgcccaagctggtggccgccctgtacaagcgcgagcccgacagc

SEQ ID NO: 1505 - DNA, 390 bp, synthetic construct
  misc_feature 1..390: note = source = /note="Description of Artificial Sequence: Synthetic coding sequence"
  source 1..390: mol_type = other DNA
atggagagcaaggccctgctggtgctgaccctggccgtgtggctgcagagcctgaccgccagccgcggcggcgtggccgccgccgaccagcgccgcgacttcatcgacatcgagagcaagttcgccctgcgcacccccgaggacaccgccgaggacacctgccacctgatccccggcgtggccgagagcgtggccacctgccacttcaaccacagcagcaagaccttcatggtgatccacggctggaccgtgaccggcatgtacgagagctgggtgcccaagctggtggccgccctgtacaagcgcgagcccgacagcaacgtgatcgtggtggactggctgagccgcgcccaggagcactaccccgtgagcgccggctacaccaagctg

SEQ ID NO: 1506 - DNA, 183 bp, synthetic construct
  misc_feature 1..183: note = source = /note="Description of Artificial Sequence: Synthetic coding sequence"
  source 1..183: mol_type = other DNA
atgcagaaggagctgagccccgccacctgcccccacatcctgcgcgcccgcctgcccaagagcctgagcctgggctggagccgcgacggcggcgacaaccgcctgcccagcgccggcctggccttctggccctgccccagcagcctgccctgcacctgcaccagctggagcctgaacaaggcc

SEQ ID NO: 1507 - DNA, 228 bp, synthetic construct
  misc_feature 1..228: note = source = /note="Description of Artificial Sequence: Synthetic coding sequence"
  source 1..228: mol_type = other DNA
atgaagtgggtgagcttcatcagcctgctgttcctgttcagcagcgcctacagcggcagcctggacaagcgccacggcgagggcaccttcaccagcgacgtgagcagctacctggagggccaggccgccaaggagttcatcgcctggctggtgaagggccgcggcagcccccagatgagccccgccaccctgaaggtgcgccagctgcgcagcctgagccccggcctg

SEQ ID NO: 1508 - DNA, 1740 bp, synthetic construct
  misc_feature 1..1740: note = source = /note="Description of Artificial Sequence: Synthetic coding sequence"
  source 1..1740: mol_type = other DNA
atgaagtgggtgagcttcatcagcctgctgttcctgttcagcagcgcctacagcggcagcctggacaagcgccacggcgagggcaccttcaccagcgacgtgagcagctacctggaggagcaggccgccaaggagttcatcgcctggctggtgaagggccgcggccacggcgagggcaccttcaccagcgacgtgagcagctacctggaggagcaggccgccaaggagttcatcgcctggctggtgaagggccgcggccacggcgagggcaccttcaccagcgacgtgagcagctacctggaggagcaggccgccaaggagttcatcgcctggctggtgaagggccgcggccacggcgagggcaccttcaccagcgacgtgagcagctacctggaggagcaggccgccaaggagttcatcgcctggctggtgaagggccgcggccacggcgagggcaccttcaccagcgacgtgagcagctacctggaggagcaggccgccaaggagttcatcgcctggctggtgaagggccgcggccacggcgagggcaccttcaccagcgacgtgagcagctacctggaggagcaggccgccaaggagttcatcgcctggctggtgaagggccgcggccacggcgagggcaccttcaccagcgacgtgagcagctacctggaggagcaggccgccaaggagttcatcgcctggctggtgaagggccgcggccacggcgagggcaccttcaccagcgacgtgagcagctacctggaggagcaggccgccaaggagttcatcgcctggctggtgaagggccgcggccacggcgagggcaccttcaccagcgacgtgagcagctacctggaggagcaggccgccaaggagttcatcgcctggctggtgaagggccgcggccacggcgagggcaccttcaccagcgacgtgagcagctacctggaggagcaggccgccaaggagttcatcgcctggctggtgaagggccgcggcggcggcggcggcggcggcagcggcggcggcggcagcggcggcggcggcagcgccgagagcaagtacggccccccctgccccccctgccccgcccccgaggccgccggcggccccagcgtgttcctgttcccccccaagcccaaggacaccctgatgatcagccgcacccccgaggtgacctgcgtggtggtggacgtgagccaggaggaccccgaggtgcagttcaactggtacgtggacggcgtggaggtgcacaacgccaagaccaagccccgcgaggagcagttcaacagcacctaccgcgtggtgagcgtgctgaccgtgctgcaccaggactggctgaacggcaaggagtacaagtgcaaggtgagcaacaagggcctgcccagcagcatcgagaagaccatcagcaaggccaagggccagccccgcgagccccaggtgtacaccctgccccccagccaggaggagatgaccaagaaccaggtgagcctgacctgcctggtgaagggcttctaccccagcgacatcgccgtggagtgggagagcaacggccagcccgagaacaactacaagaccaccccccccgtgctggacagcgacggcagcttcttcctgtacagccgcctgaccgtggacaagagccgctggcaggagggcaacgtgttcagctgcagcgtgatgcacgaggccctgcacaaccactacacccagaagagcctgagcctgagcctgggc

SEQ ID NO: 1509 - DNA, 165 bp, synthetic construct
  misc_feature 1..165: note = source = /note="Description of Artificial Sequence: Synthetic coding sequence"
  source 1..165: mol_type = other DNA
atgcccagcagcgtgagctggggcatcctgctgctggccggcctgtgctgcctggtgcccgtgagcctggcccacgccgagggcaccttcaccagcgacgtgagcagctacctggagggccaggccgccaaggagttcatcgcctggctggtgcgcggccgcggc

SEQ ID NO: 1510 - DNA, 2076 bp, synthetic construct
  misc_feature 1..2076: note = source = /note="Description of Artificial Sequence: Synthetic coding sequence"
  source 1..2076: mol_type = other DNA
atgggcccctggggctggaagctgcgctggaccgtggccctgctgctggccgccgccggcaccgccgtgggcgaccgctgcgagcgcaacgagttccagtgccaggacggcaagtgcatcagctacaagtgggtgtgcgacggcagcgccgagtgccaggacggcagcgacgagagccaggagacctgcctgagcgtgacctgcaagagcggcgacttcagctgcggcggccgcgtgaaccgctgcatcccccagttctggcgctgcgacggccaggtggactgcgacaacggcagcgacgagcagggctgcctgaccctgtgcgagggccccaacaagttcaagtgccacagcggcgagtgcatcaccctggacaaggtgtgcaacatggcccgcgactgccgcgactggagcgacgagcccatcaaggagtgcggcaccaacgagtgcctggacaacaacggcggctgcagccacgtgtgcaacgacctgaagatcggctacgagtgcctgtgccccgacggcttccagctggtggcccagcgccgctgcgaggacatcgacgagtgccaggaccccgacacctgcagccagctgtgcgtgaacctggagggcggctacaagtgccagtgcgaggagggcttccagctggacccccacaccaaggcctgcaaggccgtgggcagcatcgcctacctgttcttcaccaaccgccacgaggtgcgcaagatgaccctggaccgcagcgagtacaccagcctgatccccaacctgcgcaacgtggtggccctggacaccgaggtggccagcaaccgcatctactggagcgacctgagccagcgcatgatctgcagcacccagctggaccgcgcccacggcgtgagcagctacgacaccgtgatcagccgcgacatccaggcccccgacggcctggccgtggactggatccacagcaacatctactggaccgacagcgtgctgggcaccgtgagcgtggccgacaccaagggcgtgaagcgcaagaccctgttccgcgagaacggcagcaagccccgcgccatcgtggtggaccccgtgcacggcttcatgtactggaccgactggggcacccccgccaagatcaagaagggcggcctgaacggcgtggacatctacagcctggtgaccgagaacatccagtggcccaacggcatcaccctggacctgctgagcggccgcctgtactgggtggacagcaagctgcacagcatcagcagcatcgacgtgaacggcggcaaccgcaagaccatcctggaggacgagaagcgcctggcccaccccttcagcctggccgtgttcgaggacaaggtgttctggaccgacatcatcaacgaggccatcttcagcgccaaccgcctgaccggcagcgacgtgaacctgctggccgagaacctgctgagccccgaggacatggtgctgttccacaacctgacccagccccgcggcgtgaactggtgcgagcgcaccaccctgagcaacggcggctgccagtacctgtgcctgcccgccccccagatcaacccccacagccccaagttcacctgcgcctgccccgacggcatgctgctggcccgcgacatgcgcagctgcctgaccgaggccgaggccgccgtggccacccaggagaccagcaccgtgcgcctgaaggtgagcagcaccgccgtgcgcacccagcacaccaccacccgccccgtgcccgacaccagccgcctgcccggcgccacccccggcctgaccaccgtggagatcgtgaccatgagccaccaggccctgggcgacgtggccggccgcggcaacgagaagaagcccagcagcgtgcgcgccctgagcatcgtgctgcccatcgtgctgctggtgttcctgtgcctgggcgtgttcctgctgtggaagaactggcgcctgaagaacatcaacagcatcaacttcgacaaccccgtgtaccagaagaccaccgaggacgaggtgcacatctgccacaaccaggacggctacagctaccccagccgccagatggtgagcctggaggacgacgtggcc

SEQ ID NO: 1511 - DNA, 2457 bp, synthetic construct
  misc_feature 1..2457: note = source = /note="Description of Artificial Sequence: Synthetic coding sequence"
  source 1..2457: mol_type = other DNA
atgggcccctggggctggaagctgcgctggaccgtggccctgctgctggccgccgccggcaccgccgtgggcgaccgctgcgagcgcaacgagttccagtgccaggacggcaagtgcatcagctacaagtgggtgtgcgacggcagcgccgagtgccaggacggcagcgacgagagccaggagacctgcagccccaagacctgcagccaggacgagttccgctgccacgacggcaagtgcatcagccgccagttcgtgtgcgacagcgaccgcgactgcctggacggcagcgacgaggccagctgccccgtgctgacctgcggccccgccagcttccagtgcaacagcagcacctgcatcccccagctgtgggcctgcgacaacgaccccgactgcgaggacggcagcgacgagtggccccagcgctgccgcggcctgtacgtgttccagggcgacagcagcccctgcagcgccttcgagttccactgcctgagcggcgagtgcatccacagcagctggcgctgcgacggcggccccgactgcaaggacaagagcgacgaggagaactgcgccgtggccacctgccgccccgacgagttccagtgcagcgacggcaactgcatccacggcagccgccagtgcgaccgcgagtacgactgcaaggacatgagcgacgaggtgggctgcgtgaacgtgaccctgtgcgagggccccaacaagttcaagtgccacagcggcgagtgcatcaccctggacaaggtgtgcaacatggcccgcgactgccgcgactggagcgacgagcccatcaaggagtgcggcaccaacgagtgcctggacaacaacggcggctgcagccacgtgtgcaacgacctgaagatcggctacgagtgcctgtgccccgacggcttccagctggtggcccagcgccgctgcgaggacatcgacgagtgccaggaccccgacacctgcagccagctgtgcgtgaacctggagggcggctacaagtgccagtgcgaggagggcttccagctggacccccacaccaaggcctgcaaggccgtgggcagcatcgcctacctgttcttcaccaaccgccacgaggtgcgcaagatgaccctggaccgcagcgagtacaccagcctgatccccaacctgcgcaacgtggtggccctggacaccgaggtggccagcaaccgcatctactggagcgacctgagccagcgcatgatctgcagcacccagctggaccgcgcccacggcgtgagcagctacgacaccgtgatcagccgcgacatccaggcccccgacggcctggccgtggactggatccacagcaacatctactggaccgacagcgtgctgggcaccgtgagcgtggccgacaccaagggcgtgaagcgcaagaccctgttccgcgagaacggcagcaagccccgcgccatcgtggtggaccccgtgcacggcttcatgtactggaccgactggggcacccccgccaagatcaagaagggcggcctgaacggcgtggacatctacagcctggtgaccgagaacatccagtggcccaacggcatcaccctggacctgctgagcggccgcctgtactgggtggacagcaagctgcacagcatcagcagcatcgacgtgaacggcggcaaccgcaagaccatcctggaggacgagaagcgcctggcccaccccttcagcctggccgtgttcgaggacaaggtgttctggaccgacatcatcaacgaggccatcttcagcgccaaccgcctgaccggcagcgacgtgaacctgctggccgagaacctgctgagccccgaggacatggtgctgttccacaacctgacccagccccgcggcgtgaactggtgcgagcgcaccaccctgagcaacggcggctgccagtacctgtgcctgcccgccccccagatcaacccccacagccccaagttcacctgcgcctgccccgacggcatgctgctggcccgcgacatgcgcagctgcctgaccgaggccgaggccgccgtggccacccaggagaccagcaccgtgcgcctgaaggtgagcagcaccgccgtgcgcacccagcacaccaccacccgccccgtgcccgacaccagccgcctgcccggcgccacccccggcctgaccaccgtggagatcgtgaccatgagccaccaggccctgggcgacgtggccggccgcggcaacgagaagaagcccagcagcgtgcgcgccctgagcatcgtgctgcccatcgtgctgctggtgttcctgtgcctgggcgtgttcctgctgtggaagaactggcgcctgaagaacatcaacagcatcaacttcgacaaccccgtgtaccagaagaccaccgaggacgaggtgcacatctgccacaaccaggacggctacagctaccccagccgccagatggtgagcctggaggacgacgtggcc

SEQ ID NO: 1512 - DNA, 2046 bp, synthetic construct
  misc_feature 1..2046: note = source = /note="Description of Artificial Sequence: Synthetic coding sequence"
  source 1..2046: mol_type = other DNA
atgggcccctggggctggaagctgcgctggaccgtggccctgctgctggccgccgccggcaccgccgtgggcgaccgctgcgagcgcaacgagttccagtgccaggacggcaagtgcatcagctacaagtgggtgtgcgacggcagcgccgagtgccaggacggcagcgacgagagccaggagacctgcctgagcgtgacctgcaagagcggcgacttcagctgcggcggccgcgtgaaccgctgcatcccccagttctggcgctgcgacggccaggtggactgcgacaacggcagcgacgagcagggctgccccgtggccacctgccgccccgacgagttccagtgcagcgacggcaactgcatccacggcagccgccagtgcgaccgcgagtacgactgcaaggacatgagcgacgaggtgggctgcgtgaacgtgaccctgtgcgagggccccaacaagttcaagtgccacagcggcgagtgcatcaccctggacaaggtgtgcaacatggcccgcgactgccgcgactggagcgacgagcccatcaaggagtgcggcaccaacgagtgcctggacaacaacggcggctgcagccacgtgtgcaacgacctgaagatcggctacgagtgcctgtgccccgacggcttccagctggtggcccagcgccgctgcgaggacatcgacgagtgccaggaccccgacacctgcagccagctgtgcgtgaacctggagggcggctacaagtgccagtgcgaggagggcttccagctggacccccacaccaaggcctgcaaggccgtgggcagcatcgcctacctgttcttcaccaaccgccacgaggtgcgcaagatgaccctggaccgcagcgagtacaccagcctgatccccaacctgcgcaacgtggtggccctggacaccgaggtggccagcaaccgcatctactggagcgacctgagccagcgcatgatctgcagcacccagctggaccgcgcccacggcgtgagcagctacgacaccgtgatcagccgcgacatccaggcccccgacggcctggccgtggactggatccacagcaacatctactggaccgacagcgtgctgggcaccgtgagcgtggccgacaccaagggcgtgaagcgcaagaccctgttccgcgagaacggcagcaagccccgcgccatcgtggtggaccccgtgcacggcttcatgtactggaccgactggggcacccccgccaagatcaagaagggcggcctgaacggcgtggacatctacagcctggtgaccgagaacatccagtggcccaacggcatcaccctggacctgctgagcggccgcctgtactgggtggacagcaagctgcacagcatcagcagcatcgacgtgaacggcggcaaccgcaagaccatcctggaggacgagaagcgcctggcccaccccttcagcctggccgtgttcgaggacaaggtgttctggaccgacatcatcaacgaggccatcttcagcgccaaccgcctgaccggcagcgacgtgaacctgctggccgagaacctgctgagccccgaggacatggtgctgttccacaacctgacccagccccgcgaggccgaggccgccgtggccacccaggagaccagcaccgtgcgcctgaaggtgagcagcaccgccgtgcgcacccagcacaccaccacccgccccgtgcccgacaccagccgcctgcccggcgccacccccggcctgaccaccgtggagatcgtgaccatgagccaccaggccctgggcgacgtggccggccgcggcaacgagaagaagcccagcagcgtgcgcgccctgagcatcgtgctgcccatcgtgctgctggtgttcctgtgcctgggcgtgttcctgctgtggaagaactggcgcctgaagaacatcaacagcatcaacttcgacaaccccgtgtaccagaagaccaccgaggacgaggtgcacatctgccacaaccaggacggctacagctaccccagccgccagatggtgagcctggaggacgacgtggcc

SEQ ID NO: 1513 - DNA, 2574 bp, synthetic construct
  misc_feature 1..2574: note = source = /note="Description of Artificial Sequence: Synthetic coding sequence"
  source 1..2574: mol_type = other DNA
atgggcccctggggctggaagctgcgctggaccgtggccctgctgctggccgccgccggcaccgccgtgggcgaccgctgcgagcgcaacgagttccagtgccaggacggcaagtgcatcagctacaagtgggtgtgcgacggcagcgccgagtgccaggacggcagcgacgagagccaggagacctgcctgagcgtgacctgcaagagcggcgacttcagctgcggcggccgcgtgaaccgctgcatcccccagttctggcgctgcgacggccaggtggactgcgacaacggcagcgacgagcagggctgcccccccaagacctgcagccaggacgagttccgctgccacgacggcaagtgcatcagccgccagttcgtgtgcgacagcgaccgcgactgcctggacggcagcgacgaggccagctgccccgtgctgacctgcggccccgccagcttccagtgcaacagcagcacctgcatcccccagctgtgggcctgcgacaacgaccccgactgcgaggacggcagcgacgagtggccccagcgctgccgcggcctgtacgtgttccagggcgacagcagcccctgcagcgccttcgagttccactgcctgagcggcgagtgcatccacagcagctggcgctgcgacggcggccccgactgcaaggacaagagcgacgaggagaactgcgccgtggccacctgccgccccgacgagttccagtgcagcgacggcaactgcatccacggcagccgccagtgcgaccgcgagtacgactgcaaggacatgagcgacgaggtgggctgcgtgaacgtgaccctgtgcgagggccccaacaagttcaagtgccacagcggcgagtgcatcaccctggacaaggtgtgcaacatggcccgcgactgccgcgactggagcgacgagcccatcaaggagtgcggcaccaacgagtgcctggacaacaacggcggctgcagccacgtgtgcaacgacctgaagatcggctacgagtgcctgtgccccgacggcttccagctggtggcccagcgccgctgcgaggacatcgacgagtgccaggaccccgacacctgcagccagctgtgcgtgaacctggagggcggctacaagtgccagtgcgaggagggcttccagctggacccccacaccaaggcctgcaaggccgtgggcagcatcgcctacctgttcttcaccaaccgccacgaggtgcgcaagatgaccctggaccgcagcgagtacaccagcctgatccccaacctgcgcaacgtggtggccctggacaccgaggtggccagcaaccgcatctactggagcgacctgagccagcgcatgatctgcagcacccagctggaccgcgcccacggcgtgagcagctacgacaccgtgatcagccgcgacatccaggcccccgacggcctggccgtggactggatccacagcaacatctactggaccgacagcgtgctgggcaccgtgagcgtggccgacaccaagggcgtgaagcgcaagaccctgttccgcgagaacggcagcaagccccgcgccatcgtggtggaccccgtgcacggcttcatgtactggaccgactggggcacccccgccaagatcaagaagggcggcctgaacggcgtggacatctacagcctggtgaccgagaacatccagtggcccaacggcatcaccctggacctgctgagcggccgcctgtactgggtggacagcaagctgcacagcatcagcagcatcgacgtgaacggcggcaaccgcaagaccatcctggaggacgagaagcgcctggcccaccccttcagcctggccgtgttcgaggacaaggtgttctggaccgacatcatcaacgaggccatcttcagcgccaaccgcctgaccggcagcgacgtgaacctgctggccgagaacctgctgagccccgaggacatggtgctgttccacaacctgacccagccccgcggcgtgaactggtgcgagcgcaccaccctgagcaacggcggctgccagtacctgtgcctgcccgccccccagatcaacccccacagccccaagttcacctgcgcctgccccgacggcatgctgctggcccgcgacatgcgcagctgcctgaccgaggccgaggccgccgtggccacccaggagaccagcaccgtgcgcctgaaggtgagcagcaccgccgtgcgcacccagcacaccaccacccgccccgtgcccgacaccagccgcctgcccggcgccacccccggcctgaccaccgtggagatcgtgaccatgagccaccaggccctgggcgacgtggccggccgcggcaacgagaagaagcccagcagcgtgcgcgccctgagcatcgtgctgcccatcgtgctgctggtgttcctgtgcctgggcgtgttcctgctgtggaagaactggcgcctgaagaacatcaacagcatcaacttcgacaaccccgtgtaccagaagaccaccgaggacgaggtgcacatctgccacaaccaggacggctacagctaccccagcatggtgagcctggaggacgacgtggcc

SEQ ID NO: 1514 - DNA, 2580 bp, synthetic construct
  misc_feature 1..2580: note = source = /note="Description of Artificial Sequence: Synthetic coding sequence"
  source 1..2580: mol_type = other DNA
atgggcccctggggctggaagctgcgctggaccgtggccctgctgctggccgccgccggcaccgccgtgggcgaccgctgcgagcgcaacgagttccagtgccaggacggcaagtgcatcagctacaagtgggtgtgcgacggcagcgccgagtgccaggacggcagcgacgagagccaggagacctgcctgagcgtgacctgcaagagcggcgacttcagctgcggcggccgcgtgaaccgctgcatcccccagttctggcgctgcgacggccaggtggactgcgacaacggcagcgacgagcagggctgcccccccaagacctgcagccaggacgagttccgctgccacgacggcaagtgcatcagccgccagttcgtgtgcgacagcgaccgcgactgcctggacggcagcgacgaggccagctgccccgtgctgacctgcggccccgccagcttccagtgcaacagcagcacctgcatcccccagctgtgggcctgcgacaacgaccccgactgcgaggacggcagcgacgagtggccccagcgctgccgcggcctgtacgtgttccagggcgacagcagcccctgcagcgccttcgagttccactgcctgagcggcgagtgcatccacagcagctggcgctgcgacggcggccccgactgcaaggacaagagcgacgaggagaactgcgccgtggccacctgccgccccgacgagttccagtgcagcgacggcaactgcatccacggcagccgccagtgcgaccgcgagtacgactgcaaggacatgagcgacgaggtgggctgcgtgaacgtgaccctgtgcgagggccccaacaagttcaagtgccacagcggcgagtgcatcaccctggacaaggtgtgcaacatggcccgcgactgccgcgactggagcgacgagcccatcaaggagtgcggcaccaacgagtgcctggacaacaacggcggctgcagccacgtgtgcaacgacctgaagatcggctacgagtgcctgtgccccgacggcttccagctggtggcccagcgccgctgcgaggacatcgacgagtgccaggaccccgacacctgcagccagctgtgcgtgaacctggagggcggctacaagtgccagtgcgaggagggcttccagctggacccccacaccaaggcctgcaaggccgtgggcagcatcgcctacctgttcttcaccaaccgccacgaggtgcgcaagatgaccctggaccgcagcgagtacaccagcctgatccccaacctgcgcaacgtggtggccctggacaccgaggtggccagcaaccgcatctactggagcgacctgagccagcgcatgatctgcagcacccagctggaccgcgcccacggcgtgagcagctacgacaccgtgatcagccgcgacatccaggcccccgacggcctggccgtggactggatccacagcaacatctactggaccgacagcgtgctgggcaccgtgagcgtggccgacaccaagggcgtgaagcgcaagaccctgttccgcgagaacggcagcaagccccgcgccatcgtggtggaccccgtgcacggcttcatgtactggaccgactggggcacccccgccaagatcaagaagggcggcctgaacggcgtggacatctacagcctggtgaccgagaacatccagtggcccaacggcatcaccctggacctgctgagcggccgcctgtactgggtggacagcaagctgcacagcatcagcagcatcgacgtgaacggcggcaaccgcaagaccatcctggaggacgagaagcgcctggcccaccccttcagcctggccgtgttcgaggacaaggtgttctggaccgacatcatcaacgaggccatcttcagcgccaaccgcctgaccggcagcgacgtgaacctgctggccgagaacctgctgagccccgaggacatggtgctgttccacaacctgacccagccccgcggcgtgaactggtgcgagcgcaccaccctgagcaacggcggctgccagtacctgtgcctgcccgccccccagatcaacccccacagccccaagttcacctgcgcctgccccgacggcatgctgctggcccgcgacatgcgcagctgcctgaccgaggccgaggccgccgtggccacccaggagaccagcaccgtgcgcctgaaggtgagcagcaccgccgtgcgcacccagcacaccaccacccgccccgtgcccgacaccagccgcctgcccggcgccacccccggcctgaccaccgtggagatcgtgaccatgagccaccaggccctgggcgacgtggccggccgcggcaacgagaagaagcccagcagcgtgcgcgccctgagcatcgtgctgcccatcgtgctgctggtgttcctgtgcctgggcgtgttcctgctgtggaagaactggcgcctgaagaacatcaacagcatcaacttcgacaaccccgtgtaccagaagaccaccgaggacgaggtgcacatctgccacaaccaggacggctacagctaccccagccgccagatggtgagcctggaggacgacgtggcc

SEQ ID NO: 1515 - DNA, 558 bp, synthetic construct
  misc_feature 1..558: note = source = /note="Description of Artificial Sequence: Synthetic coding sequence"
  source 1..558: mol_type = other DNA
cgcggcggcggcgacagctacggcgtgctgctgagcaacgccctggcccgcctgcgcggcttcaaggaccacttcaccttctgccagcagctgaacatcagcatctgccccctgagccagaccgccgcccgcttccaggtgatcgtgtacaaccccctgggccgcaaggtgaactggatggtgcgcctgcccgtgagcgagggcgtgttcgtggtgaaggaccccaacggccgcaccgtgcccagcgacgtggtgatcttccccagcagcgacagccaggcccacccccccgagctgctgttcagcgccagcctgcccgccctgggcttcagcacctacagcgtggcccaggtgccccgctggaagccccaggcccgcgccccccagcccatcccccgccgcagctggagccccgccctgaccatcgagaacgagcacatccgcgccaccttcgaccccgacaccggcctgctgatggagatcatgaacatgaaccagcagctgctgctgcccgtgcgccagaccttcttctggtacaacgccagcatcggcgacaac

SEQ ID NO: 1516 - DNA, 3033 bp, synthetic construct
  misc_feature 1..3033: note = source = /note="Description of Artificial Sequence: Synthetic coding sequence"
  source 1..3033: mol_type = other DNA
atgggcgcctacgcccgcgccagcggcgtgtgcgcccgcggctgcctggacagcgccggcccctggaccatgagccgcgccctgcgcccccccctgccccccctgtgcttcttcctgctgctgctggccgccgccggcgcccgcgccggcggctacgagacctgccccaccgtgcagcccaacatgctgaacgtgcacctgctgccccacacccacgacgacgtgggctggctgaagaccgtggaccagtacttctacggcatcaagaacgacatccagcacgccggcgtgcagtacatcctggacagcgtgatcagcgccctgctggccgaccccacccgccgcttcatctacgtggagatcgccttcttcagccgctggtggcaccagcagaccaacgccacccaggaggtggtgcgcgacctggtgcgccagggccgcctggagttcgccaacggcggctgggtgatgaacgacgaggccgccacccactacggcgccatcgtggaccagatgaccctgggcctgcgcttcctggaggacaccttcggcaacgacggccgcccccgcgtggcctggcacatcgaccccttcggccacagccgcgagcaggccagcctgttcgcccagatgggcttcgacggcttcttcttcggccgcctggactaccaggacaagtgggtgcgcatgcagaagctggagatggagcaggtgtggcgcgccagcaccagcctgaagccccccaccgccgacctgttcaccggcgtgctgcccaacggctacaaccccccccgcaacctgtgctgggacgtgctgtgcgtggaccagcccctggtggaggacccccgcagccccgagtacaacgccaaggagctggtggactacttcctgaacgtggccaccgcccagggccgctactaccgcaccaaccacaccgtgatgaccatgggcagcgacttccagtacgagaacgccaacatgtggttcaagaacctggacaagctgatccgcctggtgaacgcccagcaggccaagggcagcagcgtgcacgtgctgtacagcacccccgcctgctacctgtgggagctgaacaaggccaacctgacctggagcgtgaagcacgacgacttcttcccctacgccgacggcccccaccagttctggaccggctacttcagcagccgccccgccctgaagcgctacgagcgcctgagctacaacttcctgcaggtgtgcaaccagctggaggccctggtgggcctggccgccaacgtgggcccctacggcagcggcgacagcgcccccctgaacgaggccatggccgtgctgcagcaccacgacgccgtgagcggcaccagccgccagcacgtggccaacgactacgcccgccagctggccgccggctggggcccctgcgaggtgctgctgagcaacgccctggcccgcctgcgcggcttcaaggaccacttcaccttctgccagcagctgaacatcagcatctgccccctgagccagaccgccgcccgcttccaggtgatcgtgtacaaccccctgggccgcaaggtgaactggatggtgcgcctgcccgtgagcgagggcgtgttcgtggtgaaggaccccaacggccgcaccgtgcccagcgacgtggtgatcttccccagcagcgacagccaggcccacccccccgagctgctgttcagcgccagcctgcccgccctgggcttcagcacctacagcgtggcccaggtgccccgctggaagccccaggcccgcgccccccagcccatcccccgccgcagctggagccccgccctgaccatcgagaacgagcacatccgcgccaccttcgaccccgacaccggcctgctgatggagatcatgaacatgaaccagcagctgctgctgcccgtgcgccagaccttcttctggtacaacgccagcatcggcgacaacgagagcgaccaggccagcggcgcctacatcttccgccccaaccagcagaagcccctgcccgtgagccgctgggcccagatccacctggtgaagacccccctggtgcaggaggtgcaccagaacttcagcgcctggtgcagccaggtggtgcgcctgtaccccggccagcgccacctggagctggagtggagcgtgggccccatccccgtgggcgacacctggggcaaggaggtgatcagccgcttcgacacccccctggagaccaagggccgcttctacaccgacagcaacggccgcgagatcctggagcgccgccgcgactaccgccccacctggaagctgaaccagaccgagcccgtggccggcaactactaccccgtgaacacccgcatctacatcaccgacggcaacatgcagctgaccgtgctgaccgaccgcagccagggcggcagcagcctgcgcgacggcagcctggagctgatggtgcaccgccgcctgctgaaggacgacggccgcggcgtgagcgagcccctgatggagaacggcagcggcgcctgggtgcgcggccgccacctggtgctgctggacaccgcccaggccgccgccgccggccaccgcctgctggccgagcaggaggtgctggccccccaggtggtgctggcccccggcggcggcgccgcctacaacctgggcgcccccccccgcacccagttcagcggcctgcgccgcgacctgccccccagcgtgcacctgctgaccctggccagctggggccccgagatggtgctgctgcgcctggagcaccagttcgccgtgggcgaggacagcggccgcaacctgagcgcccccgtgaccctgaacctgcgcgacctgttcagcaccttcaccatcacccgcctgcaggagaccaccctggtggccaaccagctgcgcgaggccgccagccgcctgaagtggaccaccaacaccggccccaccccccaccagaccccctaccagctggaccccgccaacatcaccctggagcccatggagatccgcaccttcctggccagcgtgcagtggaaggaggtggacggc

SEQ ID NO: 1517 - DNA, 2250 bp, synthetic construct
  misc_feature 1..2250: note = source = /note="Description of Artificial Sequence: Synthetic coding sequence"
  source 1..2250: mol_type = other DNA
atgctgcgcgccaagaaccagctgttcctgctgagcccccactacctgcgccaggtgaaggagagcagcggcagccgcctgatccagcagcgcctgctgcaccagcagcagcccctgcaccccgagtgggccgccctggccaagaagcagctgaagggcaagaaccccgaggacctgatctggcacacccccgagggcatcagcatcaagcccctgtacagcaagcgcgacaccatggacctgcccgaggagctgcccggcgtgaagcccttcacccgcggcccctaccccaccatgtacaccttccgcccctggaccatccgccagtacgccggcttcagcaccgtggaggagagcaacaagttctacaaggacaacatcaaggccggccagcagggcctgagcgtggccttcgacctggccacccaccgcggctacgacagcgacaacccccgcgtgcgcggcgacgtgggcatggccggcgtggccatcgacaccgtggaggacaccaagatcctgttcgacggcatccccctggagaagatgagcgtgagcatgaccatgaacggcgccgtgatccccgtgctggccaacttcatcgtgaccggcgaggagcagggcgtgcccaaggagaagctgaccggcaccatccagaacgacatcctgaaggagttcatggtgcgcaacacctacatcttcccccccgagcccagcatgaagatcatcgccgacatcttcgagtacaccgccaagcacatgcccaagttcaacagcatcagcatcagcggctaccacatgcaggaggccggcgccgacgccatcctggagctggcctacaccctggccgacggcctggagtacagccgcaccggcctgcaggccggcctgaccatcgacgagttcgccccccgcctgagcttcttctggggcatcggcatgaacttctacatggagatcgccaagatgcgcgccggccgccgcctgtgggcccacctgatcgagaagatgttccagcccaagaacagcaagagcctgctgctgcgcgcccactgccagaccagcggctggagcctgaccgagcaggacccctacaacaacatcgtgcgcaccgccatcgaggccatggccgccgtgttcggcggcacccagagcctgcacaccaacagcttcgacgaggccctgggcctgcccaccgtgaagagcgcccgcatcgcccgcaacacccagatcatcatccaggaggagagcggcatccccaaggtggccgacccctggggcggcagctacatgatggagtgcctgaccaacgacgtgtacgacgccgccctgaagctgatcaacgagatcgaggagatgggcggcatggccaaggccgtggccgagggcatccccaagctgcgcatcgaggagtgcgccgcccgccgccaggcccgcatcgacagcggcagcgaggtgatcgtgggcgtgaacaagtaccagctggagaaggaggacgccgtggaggtgctggccatcgacaacaccagcgtgcgcaaccgccagatcgagaagctgaagaagatcaagagcagccgcgaccaggccctggccgagcgctgcctggccgccctgaccgagtgcgccgccagcggcgacggcaacatcctggccctggccgtggacgccagccgcgcccgctgcaccgtgggcgagatcaccgacgccctgaagaaggtgttcggcgagcacaaggccaacgaccgcatggtgagcggcgcctaccgccaggagttcggcgagagcaaggagatcaccagcgccatcaagcgcgtgcacaagttcatggagcgcgagggccgccgcccccgcctgctggtggccaagatgggccaggacggccacgaccgcggcgccaaggtgatcgccaccggcttcgccgacctgggcttcgacgtggacatcggccccctgttccagaccccccgcgaggtggcccagcaggccgtggacgccgacgtgcacgccgtgggcatcagcaccctggccgccggccacaagaccctggtgcccgagctgatcaaggagctgaacagcctgggccgccccgacatcctggtgatgtgcggcggcgtgatccccccccaggactacgagttcctgttcgaggtgggcgtgagcaacgtgttcggccccggcacccgcatccccaaggccgccgtgcaggtgctggacgacatcgagaagtgcctggagaagaagcagcagagcgtg

SEQ ID NO: 1518 - DNA, 2682 bp, synthetic construct
  misc_feature 1..2682: note = source = /note="Description of Artificial Sequence: Synthetic coding sequence"
  source 1..2682: mol_type = other DNA
atgatcctgctggccgtgctgttcctgtgcttcatcagcagctacagcgccagcgtgaagggccacaccaccggcctgagcctgaacaacgaccgcctgtacaagctgacctacagcaccgaggtgctgctggaccgcggcaagggcaagctgcaggacagcgtgggctaccgcatcagcagcaacgtggacgtggccctgctgtggcgcaaccccgacggcgacgacgaccagctgatccagatcaccatgaaggacgtgaacgtggagaacgtgaaccagcagcgcggcgagaagagcatcttcaagggcaagagccccagcaagatcatgggcaaggagaacctggaggccctgcagcgccccaccctgctgcacctgatccacggcaaggtgaaggagttctacagctaccagaacgaggccgtggccatcgagaacatcaagcgcggcctggccagcctgttccagacccagctgagcagcggcaccaccaacgaggtggacatcagcggcaactgcaaggtgacctaccaggcccaccaggacaaggtgatcaagatcaaggccctggacagctgcaagatcgcccgcagcggcttcaccacccccaaccaggtgctgggcgtgagcagcaaggccaccagcgtgaccacctacaagatcgaggacagcttcgtgatcgccgtgctggccgaggagacccacaacttcggcctgaacttcctgcagaccatcaagggcaagatcgtgagcaagcagaagctggagctgaagaccaccgaggccggcccccgcctgatgagcggcaagcaggccgccgccatcatcaaggccgtggacagcaagtacaccgccatccccatcgtgggccaggtgttccagagccactgcaagggctgccccagcctgagcgagctgtggcgcagcacccgcaagtacctgcagcccgacaacctgagcaaggccgaggccgtgcgcaacttcctggccttcatccagcacctgcgcaccgccaagaaggaggagatcctgcagatcctgaagatggagaacaaggaggtgctgccccagctggtggacgccgtgaccagcgcccagaccagcgacagcctggaggccatcctggacttcctggacttcaagagcgacagcagcatcatcctgcaggagcgcttcctgtacgcctgcggcttcgccagccaccccaacgaggagctgctgcgcgccctgatcagcaagttcaagggcagcatcggcagcagcgacatccgcgagaccgtgatgatcatcaccggcaccctggtgcgcaagctgtgccagaacgagggctgcaagctgaaggccgtggtggaggccaagaagctgatcctgggcggcctggagaaggccgagaagaaggaggacacccgcatgtacctgctggccctgaagaacgccctgctgcccgagggcatccccagcctgctgaagtacgccgaggccggcgagggccccatcagccacctggccaccaccgccctgcagcgctacgacctgcccttcatcaccgacgaggtgaagaagaccctgaaccgcatctaccaccagaaccgcaaggtgcacgagaagaccgtgcgcaccgccgccgccgccatcatcctgaacaacaaccccagctacatggacgtgaagaacatcctgctgagcatcggcgagctgccccaggagatgaacaagtacatgctggccatcgtgcaggacatcctgcgcttcgagatgcccgccagcaagatcgtgcgccgcgtgctgaaggagatggtggcccacaactacgaccgcttcagccgcagcggcagcagcagcgcctacaccggctacatcgagcgcagcccccgcagcgccagcacctacagcctggacatcctgtacagcggcagcggcatcctgcgccgcagcaacctgaacatcttccagtacatcggcaaggccggcctgcacggcagccaggtggtgatcgaggcccagggcctggaggccctgatcgccgccacccccgacgagggcgaggagaacctggacagctacgccggcatgagcgccatcctgttcgacgtgcagctgcgccccgtgaccttcttcaacggctacagcgacctgatgagcaagatgctgagcgccagcggcgaccccatcagcgtggtgaagggcctgatcctgctgatcgaccacagccaggagctgcagctgcagagcggcctgaaggccaacatcgaggtgcagggcggcctggccatcgacatcagcggcgccatggagttcagcctgtggtaccgcgagagcaagacccgcgtgaagaaccgcgtgaccgtggtgatcaccaccgacatcaccgtggacagcagcttcgtgaaggccggcctggagaccagcaccgagaccgaggccggcctggagttcatcagcaccgtgcagttcagccagtaccccttcctggtgtgcatgcagatggacaaggacgaggcccccttccgccagttcgagaagaagtacgagcgcctgagcaccggccgcggctacgtgagccagaagcgcaaggagagcgtgctggccggctgcgagttccccctgcaccaggagaacagcgagatgtgcaaggtggtgttcgccccccagcccgacagcaccagcagcggctggttc

SEQ ID NO: 1519 - DNA, 534 bp, synthetic construct
  misc_feature 1..534: note = source = /note="Description of Artificial Sequence: Synthetic coding sequence"
  source 1..534: mol_type = other DNA
atggcccgcgcccccctgcgccccgagaacaccatcgtgcgcggcagcgccaaccagtgccaggacacctaccgcgccgaggagctgaccggccacaccaccggcctgagcctgaacaacgaccgcctgtacaagctgacctacagcaccgaggtgctgctggaccgcggcaagggcaagctgcaggacagcgtgggctaccgcatcagcagcaacgtggacgtggccctgctgtggcgcaaccccgacggcgacgacgaccagctgatccagatcaccatgaaggacgtgaacgtggagaacgtgaaccagcagcgcggcgagaagagcatcttcaagggcaagagccccagcaagatcatgggcaaggagaacctggaggccctgcagcgccccaccctgctgcacctgatccacggcaaggtgaaggagttctacagctaccagaacgaggccgtggccatcgagaacatcaagcgcggcctggccagcctgttccagacccagctgagcagcggcaccaccaacgaggtg

SEQ ID NO: 1520 - DNA, 3768 bp, synthetic construct
  misc_feature 1..3768: note = source = /note="Description of Artificial Sequence: Synthetic coding sequence"
  source 1..3768: mol_type = other DNA
atgctgttcaagctgctgcagcgccagacctacacctgcctgagccaccgctacggcctgtacgtgtgcttcctgggcgtggtggtgaccatcgtgagcgccttccagttcggcgaggtggtgctggagtggagccgcgaccagtaccacgtgctgttcgacagctaccgcgacaacatcgccggcaagagcttccagaaccgcctgtgcctgcccatgcccatcgacgtggtgtacacctgggtgaacggcaccgacctggagctgctgaaggagctgcagcaggtgcgcgagcagatggaggaggagcagaaggccatgcgcgagatcctgggcaagaacaccaccgagcccaccaagaagagcgagaagcagctggagtgcctgctgacccactgcatcaaggtgcccatgctggtgctggaccccgccctgcccgccaacatcaccctgaaggacctgcccagcctgtaccccagcttccacagcgccagcgacatcttcaacgtggccaagcccaagaaccccagcaccaacgtgagcgtggtggtgttcgacagcaccaaggacgtggaggacgcccacagcggcctgctgaagggcaacagccgccagaccgtgtggcgcggctacctgaccaccgacaaggaggtgcccggcctggtgctgatgcaggacctggccttcctgagcggcttcccccccaccttcaaggagaccaaccagctgaagaccaagctgcccgagaacctgagcagcaaggtgaagctgctgcagctgtacagcgaggccagcgtggccctgctgaagctgaacaaccccaaggacttccaggagctgaacaagcagaccaagaagaacatgaccatcgacggcaaggagctgaccatcagccccgcctacctgctgtgggacctgagcgccatcagccagagcaagcaggacgaggacatcagcgccagccgcttcgaggacaacgaggagctgcgctacagcctgcgcagcatcgagcgccacgccccctgggtgcgcaacatcttcatcgtgaccaacggccagatccccagctggctgaacctggacaacccccgcgtgaccatcgtgacccaccaggacgtgttccgcaacctgagccacctgcccaccttcagcagccccgccatcgagagccacatccaccgcatcgagggcctgagccagaagttcatctacctgaacgacgacgtgatgttcggcaaggacgtgtggcccgacgacttctacagccacagcaagggccagaaggtgtacctgacctggcccgtgcccaactgcgccgagggctgccccggcagctggatcaaggacggctactgcgacaaggcctgcaacaacagcgcctgcgactgggacggcggcgactgcagcggcaacagcggcggcagccgctacatcgccggcggcggcggcaccggcagcatcggcgtgggccagccctggcagttcggcggcggcatcaacagcgtgagctactgcaaccagggctgcgccaacagctggctggccgacaagttctgcgaccaggcctgcaacgtgctgagctgcggcttcgacgccggcgactgcggccaggaccacttccacgagctgtacaaggtgatcctgctgcccaaccagacccactacatcatccccaagggcgagtgcctgccctacttcagcttcgccgaggtggccaagcgcggcgtggagggcgcctacagcgacaaccccatcatccgccacgccagcatcgccaacaagtggaagaccatccacctgatcatgcacagcggcatgaacgccaccaccatccacttcaacctgaccttccagaacaccaacgacgaggagttcaagatgcagatcaccgtggaggtggacacccgcgagggccccaagctgaacagcaccgcccagaagggctacgagaacctggtgagccccatcaccctgctgcccgaggccgagatcctgttcgaggacatccccaaggagaagcgcttccccaagttcaagcgccacgacgtgaacagcacccgccgcgcccaggaggaggtgaagatccccctggtgaacatcagcctgctgcccaaggacgcccagctgagcctgaacaccctggacctgcagctggagcacggcgacatcaccctgaagggctacaacctgagcaagagcgccctgctgcgcagcttcctgatgaacagccagcacgccaagatcaagaaccaggccatcatcaccgacgagaccaacgacagcctggtggccccccaggagaagcaggtgcacaagagcatcctgcccaacagcctgggcgtgagcgagcgcctgcagcgcctgaccttccccgccgtgagcgtgaaggtgaacggccacgaccagggccagaacccccccctggacctggagaccaccgcccgcttccgcgtggagacccacacccagaagaccatcggcggcaacgtgaccaaggagaagccccccagcctgatcgtgcccctggagagccagatgaccaaggagaagaagatcaccggcaaggagaaggagaacagccgcatggaggagaacgccgagaaccacatcggcgtgaccgaggtgctgctgggccgcaagctgcagcactacaccgacagctacctgggcttcctgccctgggagaagaagaagtacttccaggacctgctggacgaggaggagagcctgaagacccagctggcctacttcaccgacagcaagaacaccggccgccagctgaaggacaccttcgccgacagcctgcgctacgtgaacaagatcctgaacagcaagttcggcttcaccagccgcaaggtgcccgcccacatgccccacatgatcgaccgcatcgtgatgcaggagctgcaggacatgttccccgaggagttcgacaagaccagcttccacaaggtgcgccacagcgaggacatgcagttcgccttcagctacttctactacctgatgagcgccgtgcagcccctgaacatcagccaggtgttcgacgaggtggacaccgaccagagcggcgtgctgagcgaccgcgagatccgcaccctggccacccgcatccacgagctgcccctgagcctgcaggacctgaccggcctggagcacatgctgatcaactgcagcaagatgctgcccgccgacatcacccagctgaacaacatcccccccacccaggagagctactacgaccccaacctgccccccgtgaccaagagcctggtgaccaactgcaagcccgtgaccgacaagatccacaaggcctacaaggacaagaacaagtaccgcttcgagatcatgggcgaggaggagatcgccttcaagatgatccgcaccaacgtgagccacgtggtgggccagctggacgacatccgcaagaacccccgcaagttcgtgtgcctgaacgacaacatcgaccacaaccacaaggacgcccagaccgtgaaggccgtgctgcgcgacttctacgagagcatgttccccatccccagccagttcgagctgccccgcgagtaccgcaaccgcttcctgcacatgcacgagctgcaggagtggcgcgcctaccgcgacaagctgaagttctggacccactgcgtgctggccaccctgatcatgttcaccatcttcagcttcttcgccgagcagctgatcgccctgaagcgcaagatcttcccccgccgccgcatccacaaggaggccagccccaaccgcatccgcgtg

SEQ ID NO: 1521 - DNA, 1470 bp, synthetic construct
  misc_feature 1..1470: note = source = /note="Description of Artificial Sequence: Synthetic coding sequence"
  source 1..1470: mol_type = other DNA
atgctgttcaagctgctgcagcgccagacctacacctgcctgagccaccgctacggcctgtacgtgtgcttcctgggcgtggtggtgaccatcgtgagcgccttccagttcggcgaggtggtgctggagtggagccgcgaccagtaccacgtgctgttcgacagctaccgcgacaacatcgccggcaagagcttccagaaccgcctgtgcctgcccatgcccatcgacgtggtgtacacctgggtgaacggcaccgacctggagctgctgaaggagctgcagcaggtgcgcgagcagatggaggaggagcagaaggccatgcgcgagatcctgggcaagaacaccaccgagcccaccaagaagagcgagaagcagctggagtgcctgctgacccactgcatcaaggtgcccatgctggtgctggaccccgccctgcccgccaacatcaccctgaaggacctgcccagcctgtaccccagcttccacagcgccagcgacatcttcaacgtggccaagcccaagaaccccagcaccaacgtgagcgtggtggtgttcgacagcaccaaggacgtggaggacgcccacagcggcctgctgaagggcaacagccgccagaccgtgtggcgcggctacctgaccaccgacaaggaggtgcccggcctggtgctgatgcaggacctggccttcctgagcggcttcccccccaccttcaaggagaccaaccagctgaagaccaagctgcccgagaacctgagcagcaaggtgaagctgctgcagctgtacagcgaggccagcgtggccctgctgaagctgaacaaccccaaggacttccaggagctgaacaagcagaccaagaagaacatgaccatcgacggcaaggagctgaccatcagccccgcctacctgctgtgggacctgagcgccatcagccagagcaagcaggacgaggacatcagcgccagccgcttcgaggacaacgaggagctgcgctacagcctgcgcagcatcgagcgccacgccccctgggtgcgcaacatcttcatcgtgaccaacggccagatccccagctggctgaacctggacaacccccgcgtgaccatcgtgacccaccaggacgtgttccgcaacctgagccacctgcccaccttcagcagccccgccatcgagagccacatccaccgcatcgagggcctgagccagaagttcatctacctgaacgacgacgtgatgttcggcaaggacgtgtggcccgacgacttctacagccacagcaagggccagaaggtgtacctgacctggcccgtgcccaactgcgccgagggctgccccggcagctggatcaaggacggctactgcgacaaggcctgcaacaacagcgcctgcgactgggacggcggcgactgcagcggcaaggacgtgctgaactgcaacagcttcatcttcatggagtacttcctgctgaaccactac

SEQ ID NO: 1522 - DNA, 1185 bp, synthetic construct
  misc_feature 1..1185: note = source = /note="Description of Artificial Sequence: Synthetic coding sequence"
  source 1..1185: mol_type = other DNA
atgcccggccgcagctgcgtggccctggtgctgctggccgccgccgtgagctgcgccgtggcccagcacgcccccccctggaccgaggactgccgcaagagcacctacccccccagcggccccacctaccgcggcgccgtgccctggtacaccatcaacctggacctgcccccctacaagcgctggcacgagctgatgctggacaaggcccccgtgctgaaggtgatcgtgaacagcctgaagaacatgatcaacaccttcgtgcccagcggcaagatcatgcaggtggtggacgagaagctgcccggcctgctgggcaacttccccggccccttcgaggaggagatgaagggcatcgccgccgtgaccgacatccccctgggcgagatcatcagcttcaacatcttctacgagctgttcaccatctgcaccagcatcgtggccgaggacaagaagggccacctgatccacggccgcaacatggacttcggcgtgttcctgggctggaacatcaacaacgacacctgggtgatcaccgagcagctgaagcccctgaccgtgaacctggacttccagcgcaacaacaagaccgtgttcaaggccagcagcttcgccggctacgtgggcatgctgaccggcttcaagcccggcctgttcagcctgaccctgaacgagcgcttcagcatcaacggcggctacctgggcatcctggagtggatcctgggcaagaaggacgtgatgtggatcggcttcctgacccgcaccgtgctggagaacagcaccagctacgaggaggccaagaacctgctgaccaagaccaagatcctggcccccgcctacttcatcctgggcggcaaccagagcggcgagggctgcgtgatcacccgcgaccgcaaggagagcctggacgtgtacgagctggacgccaagcagggccgctggtacgtggtgcagaccaactacgaccgctggaagcaccccttcttcctggacgaccgccgcacccccgccaagatgtgcctgaaccgcaccagccaggagaacatcagcttcgagaccatgtacgacgtgctgagcaccaagcccgtgctgaacaagctgaccgtgtacaccaccctgatcgacgtgaccaagggccagttcgagacctacctgcgcgactgccccgacccctgcatcggctgg

SEQ ID NO: 1523 - DNA, 1167 bp, synthetic construct
  misc_feature 1..1167: note = source = /note="Description of Artificial Sequence: Synthetic coding sequence"
  source 1..1167: mol_type = other DNA
atgaactgctgcatcggcctgggcgagaaggcccgcggcagccaccgcgccagctaccccagcctgagcgccctgttcaccgaggccagcatcctgggcttcggcagcttcgccgtgaaggcccagtggaccgaggactgccgcaagagcacctacccccccagcggccccaccgtgttccccgccgtgatccgctaccgcggcgccgtgccctggtacaccatcaacctggacctgcccccctacaagcgctggcacgagctgatgctggacaaggcccccgtgcccggcctgctgggcaacttccccggccccttcgaggaggagatgaagggcatcgccgccgtgaccgacatccccctgggcgagatcatcagcttcaacatcttctacgagctgttcaccatctgcaccagcatcgtggccgaggacaagaagggccacctgatccacggccgcaacatggacttcggcgtgttcctgggctggaacatcaacaacgacacctgggtgatcaccgagcagctgaagcccctgaccgtgaacctggacttccagcgcaacaacaagaccgtgttcaaggccagcagcttcgccggctacgtgggcatgctgaccggcttcaagcccggcctgttcagcctgaccctgaacgagcgcttcagcatcaacggcggctacctgggcatcctggagtggatcctgggcaagaaggacgtgatgtggatcggcttcctgacccgcaccgtgctggagaacagcaccagctacgaggaggccaagaacctgctgaccaagaccaagatcctggcccccgcctacttcatcctgggcggcaaccagagcggcgagggctgcgtgatcacccgcgaccgcaaggagagcctggacgtgtacgagctggacgccaagcagggccgctggtacgtggtgcagaccaactacgaccgctggaagcaccccttcttcctggacgaccgccgcacccccgccaagatgtgcctgaaccgcaccagccaggagaacatcagcttcgagaccatgtacgacgtgctgagcaccaagcccgtgctgaacaagctgaccgtgtacaccaccctgatcgacgtgaccaagggccagttcgagacctacctgcgcgactgccccgacccctgcatcggctgg

SEQ ID NO: 1524 - DNA, 1233 bp, synthetic construct
  misc_feature 1..1233: note = source = /note="Description of Artificial Sequence: Synthetic coding sequence"
  source 1..1233: mol_type = other DNA
atgaactgctgcatcggcctgggcgagaaggcccgcggcagccaccgcgccagctaccccagcctgagcgccctgttcaccgaggccagcatcctgggcttcggcagcttcgccgtgaaggcccagtggaccgaggactgccgcaagagcacctacccccccagcggccccacctaccgcggcgccgtgccctggtacaccatcaacctggacctgcccccctacaagcgctggcacgagctgatgctggacaaggcccccgtgctgaaggtgatcgtgaacagcctgaagaacatgatcaacaccttcgtgcccagcggcaagatcatgcaggtggtggacgagaagctgcccggcctgctgggcaacttccccggccccttcgaggaggagatgaagggcatcgccgccgtgaccgacatccccctgggcgagatcatcagcttcaacatcttctacgagctgttcaccatctgcaccagcatcgtggccgaggacaagaagggccacctgatccacggccgcaacatggacttcggcgtgttcctgggctggaacatcaacaacgacacctgggtgatcaccgagcagctgaagcccctgaccgtgaacctggacttccagcgcaacaacaagaccgtgttcaaggccagcagcttcgccggctacgtgggcatgctgaccggcttcaagcccggcctgttcagcctgaccctgaacgagcgcttcagcatcaacggcggctacctgggcatcctggagtggatcctgggcaagaaggacgtgatgtggatcggcttcctgacccgcaccgtgctggagaacagcaccagctacgaggaggccaagaacctgctgaccaagaccaagatcctggcccccgcctacttcatcctgggcggcaaccagagcggcgagggctgcgtgatcacccgcgaccgcaaggagagcctggacgtgtacgagctggacgccaagcagggccgctggtacgtggtgcagaccaactacgaccgctggaagcaccccttcttcctggacgaccgccgcacccccgccaagatgtgcctgaaccgcaccagccaggagaacatcagcttcgagaccatgtacgacgtgctgagcaccaagcccgtgctgaacaagctgaccgtgtacaccaccctgatcgacgtgaccaagggccagttcgagacctacctgcgcgactgccccgacccctgcatcggctgg

SEQ ID NO: 1525 - DNA, 915 bp, synthetic construct
  misc_feature 1..915: note = source = /note="Description of Artificial Sequence: Synthetic coding sequence"
  source 1..915: mol_type = other DNA
atgctggacaaggcccccgtgctgaaggtgatcgtgaacagcctgaagaacatgatcaacaccttcgtgcccagcggcaagatcatgcaggtggtggacgagaagctgcccggcctgctgggcaacttccccggccccttcgaggaggagatgaagggcatcgccgccgtgaccgacatccccctgggccacctgatccacggccgcaacatggacttcggcgtgttcctgggctggaacatcaacaacgacacctgggtgatcaccgagcagctgaagcccctgaccgtgaacctggacttccagcgcaacaacaagaccgtgttcaaggccagcagcttcgccggctacgtgggcatgctgaccggcttcaagcccggcctgttcagcctgaccctgaacgagcgcttcagcatcaacggcggctacctgggcatcctggagtggatcctgggcaagaaggacgtgatgtggatcggcttcctgacccgcaccgtgctggagaacagcaccagctacgaggaggccaagaacctgctgaccaagaccaagatcctggcccccgcctacttcatcctgggcggcaaccagagcggcgagggctgcgtgatcacccgcgaccgcaaggagagcctggacgtgtacgagctggacgccaagcagggccgctggtacgtggtgcagaccaactacgaccgctggaagcaccccttcttcctggacgaccgccgcacccccgccaagatgtgcctgaaccgcaccagccaggagaacatcagcttcgagaccatgtacgacgtgctgagcaccaagcccgtgctgaacaagctgaccgtgtacaccaccctgatcgacgtgaccaagggccagttcgagacctacctgcgcgactgccccgacccctgcatcggctgg

SEQ ID NO: 1526 - DNA, 1110 bp, synthetic construct
  misc_feature 1..1110: note = source = /note="Description of Artificial Sequence: Synthetic coding sequence"
  source 1..1110: mol_type = other DNA
atgcccggccgcagctgcgtggccctggtgctgctggccgccgccgtgagctgcgccgtggcccagcacgcccccccctggaccgaggactgccgcaagagcacctacccccccagcggccccacctaccgcggcgccgtgccctggtacaccatcaacctggacctgcccccctacaagcgctggcacgagctgatgctggacaaggcccccgtgctgaaggtgatcgtgaacagcctgaagaacatgatcaacaccttcgtgcccagcggcaagatcatgcaggtggtggacgagaagctgcccggcctgctgggcaacttccccggccccttcgaggaggagatgaagggcatcgccgccgtgaccgacatccccctgggccacctgatccacggccgcaacatggacttcggcgtgttcctgggctggaacatcaacaacgacacctgggtgatcaccgagcagctgaagcccctgaccgtgaacctggacttccagcgcaacaacaagaccgtgttcaaggccagcagcttcgccggctacgtgggcatgctgaccggcttcaagcccggcctgttcagcctgaccctgaacgagcgcttcagcatcaacggcggctacctgggcatcctggagtggatcctgggcaagaaggacgtgatgtggatcggcttcctgacccgcaccgtgctggagaacagcaccagctacgaggaggccaagaacctgctgaccaagaccaagatcctggcccccgcctacttcatcctgggcggcaaccagagcggcgagggctgcgtgatcacccgcgaccgcaaggagagcctggacgtgtacgagctggacgccaagcagggccgctggtacgtggtgcagaccaactacgaccgctggaagcaccccttcttcctggacgaccgccgcacccccgccaagatgtgcctgaaccgcaccagccaggagaacatcagcttcgagaccatgtacgacgtgctgagcaccaagcccgtgctgaacaagctgaccgtgtacaccaccctgatcgacgtgaccaagggccagttcgagacctacctgcgcgactgccccgacccctgcatcggctgg

SEQ ID NO: 1527 - DNA, 1317 bp, synthetic construct
  misc_feature 1..1317: note = source = /note="Description of Artificial Sequence: Synthetic coding sequence"
  source 1..1317: mol_type = other DNA
atgcccctgaacgtgagcttcaccaaccgcaactacgacctggactacgacagcgtgcagccctacttctactgcgacgaggaggagaacttctaccagcagcagcagcagagcgagctgcagccccccgcccccagcgaggacatctggaagaagttcgagctgctgcccaccccccccctgagccccagccgccgcagcggcctgtgcagccccagctacgtggccgtgacccccttcagcctgcgcggcgacaacgacggcggcggcggcagcttcagcaccgccgaccagctggagatggtgaccgagctgctgggcggcgacatggtgaaccagagcttcatctgcgaccccgacgacgagaccttcatcaagaacatcatcatccaggactgcatgtggagcggcttcagcgccgccgccaagctggtgagcgagaagctggccagctaccaggccgcccgcaaggacagcggcagccccaaccccgcccgcggccacagcgtgtgcagcaccagcagcctgtacctgcaggacctgagcgccgccgccagcgagtgcatcgaccccagcgtggtgttcccctaccccctgaacgacagcagcagccccaagagctgcgccagccaggacagcagcgccttcagccccagcagcgacagcctgctgagcagcaccgagagcagcccccagggcagccccgagcccctggtgctgcacgaggagaccccccccaccaccagcagcgacagcgaggaggagcaggaggacgaggaggagatcgacgtggtgagcgtggagaagcgccaggcccccggcaagcgcagcgagagcggcagccccagcgccggcggccacagcaagcccccccacagccccctggtgctgaagcgctgccacgtgagcacccaccagcacaactacgccgccccccccagcacccgcaaggactaccccgccgccaagcgcgtgaagctggacagcgtgcgcgtgctgcgccagatcagcaacaaccgcaagtgcaccagcccccgcagcagcgacaccgaggagaacgtgaagcgccgcacccacaacgtgctggagcgccagcgccgcaacgagctgaagcgcagcttcttcgccctgcgcgaccagatccccgagctggagaacaacgagaaggcccccaaggtggtgatcctgaagaaggccaccgcctacatcctgagcgtgcaggccgagacccagaagctgatcagcgagatcgacctgctgcgcaagcagaacgagcagctgaagcacaagctggagcagctgcgcaacagctgcgcc

SEQ ID NO: 1528 - DNA, 270 bp, synthetic construct
  misc_feature 1..270: note = source = /note="Description of Artificial Sequence: Synthetic coding sequence"
  source 1..270: mol_type = other DNA
atgaccgaggagaacgtgaagcgccgcacccacaacgtgctggagcgccagcgccgcaacgagctgaagcgcagcttcttcgccctgcgcgaccagatccccgagctggagaacaacgagaaggcccccaaggtggtgatcctgaagaaggccaccgcctacatcctgagcgtgcaggccgagacccagaagctgatcagcgagatcgacctgctgcgcaagcagaacgagcagctgaagcacaagctggagcagctgcgcaacagctgc

SEQ ID NO: 1529 - DNA, 1062 bp, synthetic construct
  misc_feature 1..1062: note = source = /note="Description of Artificial Sequence: Synthetic coding sequence"
  source 1..1062: mol_type = other DNA
atgctgttcaacctgcgcatcctgctgaacaacgccgccttccgcaacggccacaacttcatggtgcgcaacttccgctgcggccagcccctgcagaacaaggtgcagctgaagggccgcgacctgctgaccctgaagaacttcaccggcgaggagatcaagtacatgctgtggctgagcgccgacctgaagttccgcatcaagcagaagggcgagtacctgcccctgctgcagggcaagagcctgggcatgatcttcgagaagcgcagcacccgcacccgcctgagcaccgagaccggcttcgccctgctgggcggccacccctgcttcctgaccacccaggacatccacctgggcgtgaacgagagcctgaccgacaccgcccgcgtgctgagcagcatggccgacgccgtgctggcccgcgtgtacaagcagagcgacctggacaccctggccaaggaggccagcatccccatcatcaacggcctgagcgacctgtaccaccccatccagatcctggccgactacctgaccctgcaggagcactacagcagcctgaagggcctgaccctgagctggatcggcgacggcaacaacatcctgcacagcatcatgatgagcgccgccaagttcggcatgcacctgcaggccgccacccccaagggctacgagcccgacgccagcgtgaccaagctggccgagcagtacgccaaggagaacggcaccaagctgctgctgaccaacgaccccctggaggccgcccacggcggcaacgtgctgatcaccgacacctggatcagcatgggccaggaggaggagaagaagaagcgcctgcaggccttccagggctaccaggtgaccatgaagaccgccaaggtggccgccagcgactggaccttcctgcactgcctgccccgcaagcccgaggaggtggacgacgaggtgttctacagcccccgcagcctggtgttccccgaggccgagaaccgcaagtggaccatcatggccgtgatggtgagcctgctgaccgactacagcccccagctgcagaagcccaagttc

SEQ ID NO: 1530 - DNA, 351 bp, synthetic construct
  misc_feature 1..351: note = source = /note="Description of Artificial Sequence: Synthetic coding sequence"
  source 1..351: mol_type = other DNA
atgagcaccgccgtgctggagaaccccggcctgggccgcaagctgagcgacttcggccaggagaccagctacatcgaggacaactgcaaccagaacggcgccatcagcctgatcttcagcctgaaggaggaggtgggcgccctggccaaggtgctgcgcctgttcgaggagaacgacgtgaacctgacccacatcgagagccgccccagccgcctgaagaaggacgagtacgagttcttcacccacctggacaagcgcagcctgcccgccctgaccaacatcatcaagatcctgcgccacgacatcggcgccaccgtgcacgagctgagccgcgacaagaagaaggacacc

SEQ ID NO: 1531 - DNA, 408 bp, synthetic construct
  misc_feature 1..408: note = source = /note="Description of Artificial Sequence: Synthetic coding sequence"
  source 1..408: mol_type = other DNA
atgagcaccgccgtgctggagaaccccggcctgggccgcaagctgagcgacttcggccaggagaccagctacatcgaggacaactgcaaccagaacggcgccatcagcctgatcttcagcctgaaggaggaggtgggcgccctggccaaggtgctgcgcctgttcgaggagaacgacgtgaacctgacccacatcgagagccgccccagccgcctgaagaaggacgagtacgagttcttcacccacctggacaagcgcagcctgcccgccctgaccaacatcatcaagatcctgcgccacgacatcggcgccaccgtgcacgagctgagccgcgacaagaagaaggacaccgtgccctggttcccccgcaccatccaggagctggaccgcttcgccaaccagatcctg

SEQ ID NO: 1532 - DNA, 1356 bp, synthetic construct
  misc_feature 1..1356: note = source = /note="Description of Artificial Sequence: Synthetic coding sequence"
  source 1..1356: mol_type = other DNA
atgagcaccgccgtgctggagaaccccggcctgggccgcaagctgagcgacttcggccaggagaccagctacatcgaggacaactgcaaccagaacggcgccatcagcctgatcttcagcctgaaggaggaggtgggcgccctggccaaggtgctgcgcctgttcgaggagaacgacgtgaacctgacccacatcgagagccgccccagccgcctgaagaaggacgagtacgagttcttcacccacctggacaagcgcagcctgcccgccctgaccaacatcatcaagatcctgcgccacgacatcggcgccaccgtgcacgagctgagccgcgacaagaagaaggacaccgtgccctggttcccccgcaccatccaggagctggaccgcttcgccaaccagatcctgagctacggcgccgagctggacgccgaccaccccggcttcaaggaccccgtgtaccgcgcccgccgcaagcagttcgccgacatcgcctacaactaccgccacggccagcccatcccccgcgtggagtacatggaggaggagaagaagacctggggcaccgtgttcaagaccctgaagagcctgtacaagacccacgcctgctacgagtacaaccacatcttccccctgctggagaagtactgcggcttccacgaggacaacatcccccagctggaggacgtgagccagttcctgcagacctgcaccggcttccgcctgcgccccgtggccggcctgctgagcagccgcgacttcctgggcggcctggccttccgcgtgttccactgcacccagtacatccgccacggcagcaagcccatgtacacccccgagcccgacatctgccacgagctgctgggccacgtgcccctgttcagcgaccgcagcttcgcccagttcagccaggagatcggcctggccagcctgggcgcccccgacgagtacatcgagaagctggccaccatctactggttcaccgtggagttcggcctgtgcaagcagggcgacagcatcaaggcctacggcgccggcctgctgagcagcttcggcgagctgcagtactgcctgagcgagaagcccaagctgctgcccctggagctggagaagaccgccatccagaactacaccgtgaccgagttccagcccctgtactacgtggccgagagcttcaacgacgccaaggagaaggtgcgcaacttcgccgccaccatcccccgccccttcagcgtgcgctacgacccctacacccagcgcatcgaggtgctggacaacacccagcagctgaagatcctggccgacagcatcaacagcgagatcggcatcctgtgcagcgccctgcagaagatcaag

SEQ ID NO: 1533 - DNA, 2430 bp, synthetic construct
  misc_feature 1..2430: note = source = /note="Description of Artificial Sequence: Synthetic coding sequence"
  source 1..2430: mol_type = other DNA
atggagcacaaggaggtggtgctgctgctgctgctgttcctgaagagcggccagggcgagcccctggacgactacgtgaacacccagggcgccagcctgttcagcgtgaccaagaagcagctgggcgccggcagcatcgaggagtgcgccgccaagtgcgaggaggacgaggagttcacctgccgcgccttccagtaccacagcaaggagcagcagtgcgtgatcatggccgagaaccgcaagagcagcatcatcatccgcatgcgcgacgtggtgctgttcgagaagaaggtgtacctgagcgagtgcaagaccggcaacggcaagaactaccgcggcaccatgagcaagaccaagaacggcatcacctgccagaagtggagcagcaccagcccccaccgcccccgcttcagccccgccacccaccccagcgagggcctggaggagaactactgccgcaaccccgacaacgacccccagggcccctggtgctacaccaccgaccccgagaagcgctacgactactgcgacatcctggagtgcgaggaggagtgcatgcactgcagcggcgagaactacgacggcaagatcagcaagaccatgagcggcctggagtgccaggcctgggacagccagagcccccacgcccacggctacatccccagcaagttccccaacaagaacctgaagaagaactactgccgcaaccccgaccgcgagctgcgcccctggtgcttcaccaccgaccccaacaagcgctgggagctgtgcgacatcccccgctgcaccacccccccccccagcagcggccccacctaccagtgcctgaagggcaccggcgagaactaccgcggcaacgtggccgtgaccgtgagcggccacacctgccagcactggagcgcccagaccccccacacccacaaccgcacccccgagaacttcccctgcaagaacctggacgagaactactgccgcaaccccgacggcaagcgcgccccctggtgccacaccaccaacagccaggtgcgctgggagtactgcaagatccccagctgcgacagcagccccgtgagcaccgagcagctggcccccaccgccccccccgagctgacccccgtggtgcaggactgctaccacggcgacggccagagctaccgcggcaccagcagcaccaccaccaccggcaagaagtgccagagctggagcagcatgaccccccaccgccaccagaagacccccgagaactaccccaacgccggcctgaccatgaactactgccgcaaccccgacgccgacaagggcccctggtgcttcaccaccgaccccagcgtgcgctgggagtactgcaacctgaagaagtgcagcggcaccgaggccagcgtggtggcccccccccccgtggtgctgctgcccgacgtggagacccccagcgaggaggactgcatgttcggcaacggcaagggctaccgcggcaagcgcgccaccaccgtgaccggcaccccctgccaggactgggccgcccaggagccccaccgccacagcatcttcacccccgagaccaacccccgcgccggcctggagaagaactactgccgcaaccccgacggcgacgtgggcggcccctggtgctacaccaccaacccccgcaagctgtacgactactgcgacgtgccccagtgcgccgcccccagcttcgactgcggcaagccccaggtggagcccaagaagtgccccggccgcgtggtgggcggctgcgtggcccacccccacagctggccctggcaggtgagcctgcgcacccgcttcggcatgcacttctgcggcggcaccctgatcagccccgagtgggtgctgaccgccgcccactgcctggagaagagcccccgccccagcagctacaaggtgatcctgggcgcccaccaggaggtgaacctggagccccacgtgcaggagatcgaggtgagccgcctgttcctggagcccacccgcaaggacatcgccctgctgaagctgagcagccccgccgtgatcaccgacaaggtgatccccgcctgcctgcccagccccaactacgtggtggccgaccgcaccgagtgcttcatcaccggctggggcgagacccagggcaccttcggcgccggcctgctgaaggaggcccagctgcccgtgatcgagaacaaggtgtgcaaccgctacgagttcctgaacggccgcgtgcagagcaccgagctgtgcgccggccacctggccggcggcaccgacagctgccagggcgacagcggcggccccctggtgtgcttcgagaaggacaagtacatcctgcagggcgtgaccagctggggcctgggctgcgcccgccccaacaagcccggcgtgtacgtgcgcgtgagccgcttcgtgacctggatcgagggcgtgatgcgcaacaac

SEQ ID NO: 1534 - DNA, 408 bp, synthetic construct
  misc_feature 1..408: note = source = /note="Description of Artificial Sequence: Synthetic coding sequence"
  source 1..408: mol_type = other DNA
atggagcacaaggaggtggtgctgctgctgctgctgttcctgaagagcggccagggcgagcccctggacgactacgtgaacacccagggcgccagcctgttcagcgtgaccaagaagcagctgggcgccggcagcatcgaggagtgcgccgccaagtgcgaggaggacgaggagttcacctgccgcgccttccagtaccacagcaaggagcagcagtgcgtgatcatggccgagaaccgcaagagcagcatcatcatccgcatgcgcgacgtggtgctgttcgagaagaaggtgtacctgagcgagtgcaagaccggcaacggcaagaactaccgcggcaccatgagcaagaccaagaacggcatcacctgccagaagtggagcagcaccagcccccaccgcccccgc

SEQ ID NO: 1535 - DNA, 1686 bp, synthetic construct
  misc_feature 1..1686: note = source = /note="Description of Artificial Sequence: Synthetic coding sequence"
  source 1..1686: mol_type = other DNA
atggacgccatgaagcgcggcctgtgctgcgtgctgctgctgtgcggcgccgtgttcgtgagccccagccaggagatccacgcccgcttccgccgcggcgcccgcagctaccaggtgatctgccgcgacgagaagacccagatgatctaccagcagcaccagagctggctgcgccccgtgctgcgcagcaaccgcgtggagtactgctggtgcaacagcggccgcgcccagtgccacagcgtgcccgtgaagagctgcagcgagccccgctgcttcaacggcggcacctgccagcaggccctgtacttcagcgacttcgtgtgccagtgccccgagggcttcgccggcaagtgctgcgagatcgacacccgcgccacctgctacgaggaccagggcatcagctaccgcggcacctggagcaccgccgagagcggcgccgagtgcaccaactggaacagcagcgccctggcccagaagccctacagcggccgccgccccgacgccatccgcctgggcctgggcaaccacaactactgccgcaaccccgaccgcgacagcaagccctggtgctacgtgttcaaggccggcaagtacagcagcgagttctgcagcacccccgcctgcagcgagggcaacagcgactgctacttcggcaacggcagcgcctaccgcggcacccacagcctgaccgagagcggcgccagctgcctgccctggaacagcatgatcctgatcggcaaggtgtacaccgcccagaaccccagcgcccaggccctgggcctgggcaagcacaactactgccgcaaccccgacggcgacgccaagccctggtgccacgtgctgaagaaccgccgcctgacctgggagtactgcgacgtgcccagctgcagcacctgcggcctgcgccagtacagccagccccagttccgcatcaagggcggcctgttcgccgacatcgccagccacccctggcaggccgccatcttcgccaagcaccgccgcagccccggcgagcgcttcctgtgcggcggcatcctgatcagcagctgctggatcctgagcgccgcccactgcttccaggagcgcttccccccccaccacctgaccgtgatcctgggccgcacctaccgcgtggtgcccggcgaggaggagcagaagttcgaggtggagaagtacatcgtgcacaaggagttcgacgacgacacctacgacaacgacatcgccctgctgcagctgaagagcgacagcagccgctgcgcccaggagagcagcgtggtgcgcaccgtgtgcctgccccccgccgacctgcagctgcccgactggaccgagtgcgagctgagcggctacggcaagcacgaggccctgagccccttctacagcgagcgcctgaaggaggcccacgtgcgcctgtaccccagcagccgctgcaccagccagcacctgctgaaccgcaccgtgaccgacaacatgctgtgcgccggcgacacccgcagcggcggcccccaggccaacctgcacgacgcctgccagggcgacagcggcggccccctggtgtgcctgaacgacggccgcatgaccctggtgggcatcatcagctggggcctgggctgcggccagaaggacgtgcccggcgtgtacaccaaggtgaccaactacctggactggatccgcgacaacatgcgcccc

SEQ ID NO: 1536 - DNA, 879 bp, synthetic construct
  misc_feature 1..879: note = source = /note="Description of Artificial Sequence: Synthetic coding sequence"
  source 1..879: mol_type = other DNA
atggacgccatgaagcgcggcctgtgctgcgtgctgctgctgtgcggcgccgtgttcgtgagccccagccaggagatccacgcccgcttccgccgcggcgcccgcagctaccaggtgatctgccgcgacgagaagacccagatgatctaccagcagcaccagagctggctgcgccccgtgctgcgcagcaaccgcgtggagtactgctggtgcaacagcggccgcgcccagtgccacagcgtgcccgtgaagagctgcagcgagccccgctgcttcaacggcggcacctgccagcaggccctgtacttcagcgacttcgtgtgccagtgccccgagggcttcgccggcaagtgctgcgagatcgacacccgcgccacctgctacgaggaccagggcatcagctaccgcggcacctggagcaccgccgagagcggcgccgagtgcaccaactggaacagcagcgccctggcccagaagccctacagcggccgccgccccgacgccatccgcctgggcctgggcaaccacaactactgccgcaaccccgaccgcgacagcaagccctggtgctacgtgttcaaggccggcaagtacagcagcgagttctgcagcacccccgcctgcagcgagggcaacagcgactgctacttcggcaacggcagcgcctaccgcggcacccacagcctgaccgagagcggcgccagctgcctgccctggaacagcatgatcctgatcggcaaggtgtacaccgcccagaaccccagcgcccaggccctgggcctgggcaagcacaactactgccgctgccgcaccggccgcagcgtgagcagccccgccaccgccagcatgcgcccctgcctgctgagcatccgcagcggc

SEQ ID NO: 1537 - DNA, 1548 bp, synthetic construct
  misc_feature 1..1548: note = source = /note="Description of Artificial Sequence: Synthetic coding sequence"
  source 1..1548: mol_type = other DNA
atggacgccatgaagcgcggcctgtgctgcgtgctgctgctgtgcggcgccgtgttcgtgagccccagccaggagatccacgcccgcttccgccgcggcgcccgcagctaccagggctgcagcgagccccgctgcttcaacggcggcacctgccagcaggccctgtacttcagcgacttcgtgtgccagtgccccgagggcttcgccggcaagtgctgcgagatcgacacccgcgccacctgctacgaggaccagggcatcagctaccgcggcacctggagcaccgccgagagcggcgccgagtgcaccaactggaacagcagcgccctggcccagaagccctacagcggccgccgccccgacgccatccgcctgggcctgggcaaccacaactactgccgcaaccccgaccgcgacagcaagccctggtgctacgtgttcaaggccggcaagtacagcagcgagttctgcagcacccccgcctgcagcgagggcaacagcgactgctacttcggcaacggcagcgcctaccgcggcacccacagcctgaccgagagcggcgccagctgcctgccctggaacagcatgatcctgatcggcaaggtgtacaccgcccagaaccccagcgcccaggccctgggcctgggcaagcacaactactgccgcaaccccgacggcgacgccaagccctggtgccacgtgctgaagaaccgccgcctgacctgggagtactgcgacgtgcccagctgcagcacctgcggcctgcgccagtacagccagccccagttccgcatcaagggcggcctgttcgccgacatcgccagccacccctggcaggccgccatcttcgccaagcaccgccgcagccccggcgagcgcttcctgtgcggcggcatcctgatcagcagctgctggatcctgagcgccgcccactgcttccaggagcgcttccccccccaccacctgaccgtgatcctgggccgcacctaccgcgtggtgcccggcgaggaggagcagaagttcgaggtggagaagtacatcgtgcacaaggagttcgacgacgacacctacgacaacgacatcgccctgctgcagctgaagagcgacagcagccgctgcgcccaggagagcagcgtggtgcgcaccgtgtgcctgccccccgccgacctgcagctgcccgactggaccgagtgcgagctgagcggctacggcaagcacgaggccctgagccccttctacagcgagcgcctgaaggaggcccacgtgcgcctgtaccccagcagccgctgcaccagccagcacctgctgaaccgcaccgtgaccgacaacatgctgtgcgccggcgacacccgcagcggcggcccccaggccaacctgcacgacgcctgccagggcgacagcggcggccccctggtgtgcctgaacgacggccgcatgaccctggtgggcatcatcagctggggcctgggctgcggccagaaggacgtgcccggcgtgtacaccaaggtgaccaactacctggactggatccgcgacaacatgcgcccc

SEQ ID NO: 1538 - DNA, 1308 bp, synthetic construct
  misc_feature 1..1308: note = source = /note="Description of Artificial Sequence: Synthetic coding sequence"
  source 1..1308: mol_type = other DNA
atggacgccatgaagcgcggcctgtgctgcgtgctgctgctgtgcggcgccgtgttcgtgagccccagccaggagatccacgcccgcttccgccgcggcgcccgcagctaccaggtgatctgccgcgacgagaagacccagatgatctaccagcagcaccagagctggctgcgccccgtgctgcgcagcaaccgcgtggagtactgctggtgcaacagcggccgcgcccagtgccacagcgtgcccgtgaagcgcaacagcgactgctacttcggcaacggcagcgcctaccgcggcacccacagcctgaccgagagcggcgccagctgcctgccctggaacagcatgatcctgatcggcaaggtgtacaccgcccagaaccccagcgcccaggccctgggcctgggcaagcacaactactgccgcaaccccgacggcgacgccaagccctggtgccacgtgctgaagaaccgccgcctgacctgggagtactgcgacgtgcccagctgcagcacctgcggcctgcgccagtacagccagccccagttccgcatcaagggcggcctgttcgccgacatcgccagccacccctggcaggccgccatcttcgccaagcaccgccgcagccccggcgagcgcttcctgtgcggcggcatcctgatcagcagctgctggatcctgagcgccgcccactgcttccaggagcgcttccccccccaccacctgaccgtgatcctgggccgcacctaccgcgtggtgcccggcgaggaggagcagaagttcgaggtggagaagtacatcgtgcacaaggagttcgacgacgacacctacgacaacgacatcgccctgctgcagctgaagagcgacagcagccgctgcgcccaggagagcagcgtggtgcgcaccgtgtgcctgccccccgccgacctgcagctgcccgactggaccgagtgcgagctgagcggctacggcaagcacgaggccctgagccccttctacagcgagcgcctgaaggaggcccacgtgcgcctgtaccccagcagccgctgcaccagccagcacctgctgaaccgcaccgtgaccgacaacatgctgtgcgccggcgacacccgcagcggcggcccccaggccaacctgcacgacgcctgccagggcgacagcggcggccccctggtgtgcctgaacgacggccgcatgaccctggtgggcatcatcagctggggcctgggctgcggccagaaggacgtgcccggcgtgtacaccaaggtgaccaactacctggactggatccgcgacaacatgcgcccc

SEQ ID NO: 1539 - DNA, 1497 bp, synthetic construct
  misc_feature 1..1497: note = source = /note="Description of Artificial Sequence: Synthetic coding sequence"
  source 1..1497: mol_type = other DNA
atggacgccatgaagcgcggcctgtgctgcgtgctgctgctgtgcggcgccgtgttcgtgagccccagccaggagatccacgcccgcttccgccgcggcgcccgcagctaccaggtgatctgccgcgacgagaagacccagatgatctaccagcagcaccagagctggctgcgccccgtgctgcgcagcaaccgcgtggagtactgctggtgcaacagcggccgcgcccagtgccacagcgtgcccgtgaagagctgcagcgagccccgctgcttcaacggcggcacctgccagcaggccctgtacttcagcgacttcgtgtgccagtgccccgagggcttcgccggcaagtgctgcgagatcgacagcaagccctggtgctacgtgttcaaggccggcaagtacagcagcgagttctgcagcacccccgcctgcagcgagggcaacagcgactgctacttcggcaacggcagcgcctaccgcggcacccacagcctgaccgagagcggcgccagctgcctgccctggaacagcatgatcctgatcggcaaggtgtacaccgcccagaaccccagcgcccaggccctgggcctgggcaagcacaactactgccgcaaccccgacggcgacgccaagccctggtgccacgtgctgaagaaccgccgcctgacctgggagtactgcgacgtgcccagctgcagcacctgcggcctgcgccagtacagccagccccagttccgcatcaagggcggcctgttcgccgacatcgccagccacccctggcaggccgccatcttcgccaagcaccgccgcagccccggcgagcgcttcctgtgcggcggcatcctgatcagcagctgctggatcctgagcgccgcccactgcttccaggagcgcttccccccccaccacctgaccgtgatcctgggccgcacctaccgcgtggtgcccggcgaggaggagcagaagttcgaggtggagaagtacatcgtgcacaaggagttcgacgacgacacctacgacaacgacatcgccctgctgcagctgaagagcgacagcagccgctgcgcccaggagagcagcgtggtgcgcaccgtgtgcctgccccccgccgacctgcagctgcccgactggaccgagtgcgagctgagcggctacggcaagcacgaggccctgagccccttctacagcgagcgcctgaaggaggcccacgtgcgcctgtaccccagcagccgctgcaccagccagcacctgctgaaccgcaccgtgaccgacaacatgctgtgcgccggcgacacccgcagcggcggcccccaggccaacctgcacgacgcctgccagggcgacagcggcggccccctggtgtgcctgaacgacggccgcatgaccctggtgggcatcatcagctggggcctgggctgcggccagaaggacgtgcccggcgtgtacaccaaggtgaccaactacctggactggatccgcgacaacatgcgcccc

SEQ ID NO: 1540 - DNA, 534 bp, synthetic construct
  misc_feature 1..534: note = source = /note="Description of Artificial Sequence: Synthetic coding sequence"
  source 1..534: mol_type = other DNA
atggacgccatgaagcgcggcctgtgctgcgtgctgctgctgtgcggcgccgtgttcgtgagccccagccaggagatccacgcccgcttccgccgcggcgcccgcagctaccaggtgatctgccgcgacgagaagacccagatgatctaccagcagcaccagagctggctgcgccccgtgctgcgcagcaaccgcgtggagtactgctggtgcaacagcggccgcgcccagtgccacagcgtgcccgtgaagagctgcagcgagccccgctgcttcaacggcggcacctgccagcaggccctgtacttcagcgacttcgtgtgccagtgccccgagggcttcgccggcaagtgctgcgagatcgacacccgcgccacctgctacgaggaccagggcatcagctaccgcggcacctggagcaccgccgagagcggcgccgagtgcaccaactggaacagcagcgccctggcccagaagccctacagcggccgccgccccgacgccatccgcctgggcctgggcaaccacaactac

SEQ ID NO: 1541 - DNA, 471 bp, synthetic construct
  misc_feature 1..471: note = source = /note="Description of Artificial Sequence: Synthetic coding sequence"
  source 1..471: mol_type = other DNA
atggacgccatgaagcgcggcctgtgctgcgtgctgctgctgtgcggcgccgtgttcgtgagccccagccaggagatccacgcccgcttccgccgcggcgcccgcagctaccaggtgatctgccgcgacgagaagacccagatgatctaccagcagcaccagagctggctgcgccccgtgctgcgcagcaaccgcgtggagtactgctggtgcaacagcggccgcgcccagtgccacagcgtgcccgtgaagagctgcagcgagccccgctgcttcaacggcggcacctgccagcaggccctgtacttcagcgacttcgtgtgccagtgccccgagggcttcgccggcaagtgctgcgagatcgacacccgcgccacctgctacgaggaccagggcatcagctaccgcggcacctggagcaccgccgagagcggcgccgagtgcaccaactggaacagcagcgccctggcc

SEQ ID NO: 1542 - DNA, 1419 bp, synthetic construct
  misc_feature 1..1419: note = source = /note="Description of Artificial Sequence: Synthetic coding sequence"
  source 1..1419: mol_type = other DNA
atggacgccatgaagcgcggcctgtgctgcgtgctgctgctgtgcggcgccgtgttcgtgagccccagccaggagatccacgcccgcttccgccgcggcgcccgcagctaccaggtgatctgccgcgacgagaagacccagatgatctaccagcagcaccagagctggctgcgccccgtgctgcgcagcaaccgcgtggagtactgctggtgcaacagcggccgcgcccagtgccacagcgtgcccgtgaagagctgcagcgagccccgctgcttcaacggcggcacctgccagcaggccctgtacttcagcgacttcgtgtgccagtgccccgagggcttcgccggcaagtgctgcgagatcggcaacagcgactgctacttcggcaacggcagcgcctaccgcggcacccacagcctgaccgagagcggcgccagctgcctgccctggaacagcatgatcctgatcggcaaggtgtacaccgcccagaaccccagcgcccaggccctgggcctgggcaagcacaactactgccgcaaccccgacggcgacgccaagccctggtgccacgtgctgaagaaccgccgcctgacctgggagtactgcgacgtgcccagctgcagcacctgcggcctgcgccagtacagccagccccagttccgcatcaagggcggcctgttcgccgacatcgccagccacccctggcaggccgccatcttcgccaagcaccgccgcagccccggcgagcgcttcctgtgcggcggcatcctgatcagcagctgctggatcctgagcgccgcccactgcttccaggagcgcttccccccccaccacctgaccgtgatcctgggccgcacctaccgcgtggtgcccggcgaggaggagcagaagttcgaggtggagaagtacatcgtgcacaaggagttcgacgacgacacctacgacaacgacatcgccctgctgcagctgaagagcgacagcagccgctgcgcccaggagagcagcgtggtgcgcaccgtgtgcctgccccccgccgacctgcagctgcccgactggaccgagtgcgagctgagcggctacggcaagcacgaggccctgagccccttctacagcgagcgcctgaaggaggcccacgtgcgcctgtaccccagcagccgctgcaccagccagcacctgctgaaccgcaccgtgaccgacaacatgctgtgcgccggcgacacccgcagcggcggcccccaggccaacctgcacgacgcctgccagggcgacagcggcggccccctggtgtgcctgaacgacggccgcatgaccctggtgggcatcatcagctggggcctgggctgcggccagaaggacgtgcccggcgtgtacaccaaggtgaccaactacctggactggatccgcgacaacatgcgcccc

SEQ ID NO: 1543 - DNA, 870 bp, synthetic construct
  misc_feature 1..870: note = source = /note="Description of Artificial Sequence: Synthetic coding sequence"
  source 1..870: mol_type = other DNA
atgatcgagaccgacagcggcgtggacgacgacatggcctgccacaagatccccgtggaggccgacttcctgtacgcctacagcaccgcccccggctactacagctggcgcaacagcaaggacggcagctggttcatccagagcctgtgcgccatgctgaagcagtacgccgacaagctggagttcatgcacatcctgacccgcgtgaaccgcaaggtggccaccgagttcgagagcttcagcttcgacgccaccttccacgccaagaagcagatcccctgcatcgtgagcatgctgaccaaggagctgtacttctaccacgacgaggtggacggcggcagccccatggagaacaccgagaacagcgtggacagcaagagcatcaagaacctggagcccaagatcatccacggcagcgagagcatggacagcggcatcagcctggacaacagctacaagatggactaccccgagatgggcctgtgcatcatcatcaacaacaagaacttccacaagagcaccggcatgaccagccgcagcggcaccgacgtggacgccgccaacctgcgcgagaccttccgcaacctgaagtacgaggtgcgcaacaagaacgacctgacccgcgaggagatcgtggagctgatgcgcgacgtgagcaaggaggaccacagcaagcgcagcagcttcgtgtgcgtgctgctgagccacggcgaggagggcatcatcttcggcaccaacggccccgtggacctgaagaagatcaccaacttcttccgcggcgaccgctgccgcagcctgaccggcaagcccaagctgttcatcatccaggcctgccgcggcaccgagctggactgcggcatcgagaccgac

SEQ ID NO: 1544 - DNA, 855 bp, synthetic construct
  misc_feature 1..855: note = source = /note="Description of Artificial Sequence: Synthetic coding sequence"
  source 1..855: mol_type = other DNA
atgatcgagaccgacagcggcgtggacgacgacatggcctgccacaagatccccgtggaggccgacttcctgtacgcctacagcaccgcccccggctactacagctggcgcaacagcaaggacggcagctggttcatccagagcctgtgcgccatgctgaagcagtacgccgacaagctggagttcatgcacatcctgacccgcgtgaaccgcaaggtggccaccgagttcgagagcttcagcttcgacgccaccttccacgccaagaagcagatcccctgcatcgtgagcatgctgaccaaggagctgtacttctaccacggcagccccatggagaacaccgagaacagcgtggccagcaagagcatcaagaacctggagcccaagatcatccacggcagcgagagcatggccagcggcatcagcctggacaacagctacaagatggactaccccgagatgggcctgtgcatcatcatcaacaacaagaacttccacaagagcaccggcatgaccagccgcagcggcaccgacgtggacgccgccaacctgcgcgagaccttccgcaacctgaagtacgaggtgcgcaacaagaacgacctgacccgcgaggagatcgtggagctgatgcgcgacgtgagcaaggaggaccacagcaagcgcagcagcttcgtgtgcgtgctgctgagccacggcgaggagggcatcatcttcggcaccaacggccccgtggacctgaagaagatcaccaacttcttccgcggcgaccgctgccgcagcctgaccggcaagcccaagctgttcatcatccaggcctgccgcggcaccgagctggactgcggcatcgagaccgac

SEQ ID NO: 1545 - DNA, 900 bp, synthetic construct
  misc_feature 1..900: note = source = /note="Description of Artificial Sequence: Synthetic coding sequence"
  source 1..900: mol_type = other DNA
atggtggagatcgacgccgccagcgtgtacaccctgcccgccggcgccgacttcctgatgtgctacagcgtggccgagggctactacagccaccgcgagaccgtgaacggcagctggtacatccaggacctgtgcgagatgctgggcaagtacggcagcagcctggagttcaccgagctgctgaccctggtgaaccgcaaggtgagccagcgccgcgtggacttctgcaaggaccccagcgccatcggcaagaagcaggtgccctgcttcgccagcatgctgaccaagaagctgcacttcttccccaagagcaacctggagcaccaccaccaccaccacgtggagatcgacggcggcagccccatgagcagcgccagcggcctgcgccgcggccaccccgccggcggcgaggagaacatgaccgagaccgacgccttctacaagcgcgagatgttcgaccccgccgagaagtacaagatggaccaccgccgccgcggcatcgccctgatcttcaaccacgagcgcttcttctggcacctgaccctgcccgagcgccgcggcacctgcgccgaccgcgacaacctgacccgccgcttcagcgacctgggcttcgaggtgaagtgcttcaacgacctgaaggccgaggagctgctgctgaagatccacgaggtgagcaccgtgagccacgccgacgccgactgcttcgtgtgcgtgttcctgagccacggcgagggcaaccacatctacgcctacgacgccaagatcgagatccagaccctgaccggcctgttcaagggcgacaagtgccacagcctggtgggcaagcccaagatcttcatcatccaggcctgccgcggcaaccagcacgacgtgcccgtgatccccctggacgtggtggac

SEQ ID NO: 1546 - DNA, 1392 bp, synthetic construct
  misc_feature 1..1392: note = source = /note="Description of Artificial Sequence: Synthetic coding sequence"
  source 1..1392: mol_type = other DNA
atgtacagcaacgtgatcggcaccgtgaccagcggcaagcgcaaggtgtacctgctgagcctgctgctgatcggcttctgggactgcgtgacctgccacggcagccccgtggacatctgcaccgccaagccccgcgacatccccatgaaccccatgtgcatctaccgcagccccgagaagaaggccaccgaggacgagggcagcgagcagaagatccccgaggccaccaaccgccgcgtgtgggagctgagcaaggccaacagccgcttcgccaccaccttctaccagcacctggccgacagcaagaacgacaacgacaacatcttcctgagccccctgagcatcagcaccgccttcgccatgaccaagctgggcgcctgcaacgacaccctgcagcagctgatggaggtgttcaagttcgacaccatcagcgagaagaccagcgaccagatccacttcttcttcgccaagctgaactgccgcctgtaccgcaaggccaacaagagcagcaagctggtgagcgccaaccgcctgttcggcgacaagagcctgaccttcaacgagacctaccaggacatcagcgagctggtgtacggcgccaagctgcagcccctggacttcaaggagaacgccgagcagagccgcgccgccatcaacaagtgggtgagcaacaagaccgagggccgcatcaccgacgtgatccccagcgaggccatcaacgagctgaccgtgctggtgctggtgaacaccatctacttcaagggcctgtggaagagcaagttcagccccgagaacacccgcaaggagctgttctacaaggccgacggcgagagctgcagcgccagcatgatgtaccaggagggcaagttccgctaccgccgcgtggccgagggcacccaggtgctggagctgcccttcaagggcgacgacatcaccatggtgctgatcctgcccaagcccgagaagagcctggccaaggtggagaaggagctgacccccgaggtgctgcaggagtggctggacgagctggaggagatgatgctggtggtgcacatgccccgcttccgcatcgaggacggcttcagcctgaaggagcagctgcaggacatgggcctggtggacctgttcagccccgagaagagcaagctgcccggcatcgtggccgagggccgcgacgacctgtacgtgagcgacgccttccacaaggccttcctggaggtgaacgaggagggcagcgaggccgccgccagcaccgccgtggtgatcgccggccgcagcctgaaccccaaccgcgtgaccttcaaggccaaccgccccttcctggtgttcatccgcgaggtgcccctgaacaccatcatcttcatgggccgcgtggccaacccctgcgtgaag

SEQ ID NO: 1547 - DNA, 1473 bp, synthetic construct
  misc_feature 1..1473: note = source = /note="Description of Artificial Sequence: Synthetic coding sequence"
  source 1..1473: mol_type = other DNA
atggccctgctgtggggcctgctggtgctgagctggagctgcctgcagggcccctgcagcgtgttcagccccgtgagcgccatggagcccctgggccgccagctgaccagcggccccaaccaggagcaggtgagccccctgaccctgctgaagctgggcaaccaggagcccggcggccagaccgccctgaagagcccccccggcgtgtgcagccgcgaccccacccccgagcagacccaccgcctggcccgcgccatgatggccttcaccgccgacctgttcagcctggtggcccagaccagcacctgccccaacctgatcctgagccccctgagcgtggccctggccctgagccacctggccctgggcgcccagaaccacaccctgcagcgcctgcagcaggtgctgcacgccggcagcggcccctgcctgccccacctgctgagccgcctgtgccaggacctgggccccggcgccttccgcctggccgcccgcatgtacctgcagaagggcttccccatcaaggaggacttcctggagcagagcgagcagctgttcggcgccaagcccgtgagcctgaccggcaagcaggaggacgacctggccaacatcaaccagtgggtgaaggaggccaccgagggcaagatccaggagttcctgagcggcctgcccgaggacaccgtgctgctgctgctgaacgccatccacttccagggcttctggcgcaacaagttcgaccccagcctgacccagcgcgacagcttccacctggacgagcagttcaccgtgcccgtggagatgatgcaggcccgcacctaccccctgcgctggttcctgctggagcagcccgagatccaggtggcccacttccccttcaagaacaacatgagcttcgtggtgctggtgcccacccacttcgagtggaacgtgagccaggtgctggccaacctgagctgggacaccctgcacccccccctggtgtgggagcgccccaccaaggtgcgcctgcccaagctgtacctgaagcaccagatggacctggtggccaccctgagccagctgggcctgcaggagctgttccaggcccccgacctgcgcggcatcagcgagcagagcctggtggtgagcggcgtgcagcaccagagcaccctggagctgagcgaggtgggcgtggaggccgccgccgccaccagcatcgccatgagccgcatgagcctgagcagcttcagcgtgaaccgccccttcctgttcttcatcttcgaggacaccaccggcctgcccctgttcgtgggcagcgtgcgcaaccccaaccccagcgccccccgcgagctgaaggagcagcaggacagccccggcaacaaggacttcctgcagagcctgaagggcttcccccgcggcgacaagctgttcggccccgacctgaagctggtgccccccatggaggaggactacccccagttcggcagccccaag

SEQ ID NO: 1548 - DNA, 1281 bp, synthetic construct
  misc_feature 1..1281: note = source = /note="Description of Artificial Sequence: Synthetic coding sequence"
  source 1..1281: mol_type = other DNA
atggccctgctgtggggcctgctggtgctgagctggagctgcctgcagggcccctgcagcgtgttcagccccgtgagcgccatggagcccctgggccgccagctgaccagcggccccaaccaggagcaggtgagccccctgaccctgctgaagctgggcaaccaggtgcagcccggcgcccagaaccacaccctgcagcgcctgcagcaggtgctgcacgccggcagcggcccctgcctgccccacctgctgagccgcctgtgccaggacctgggccccggcgccttccgcctggccgcccgcatgtacctgcagaagggcttccccatcaaggaggacttcctggagcagagcgagcagctgttcggcgccaagcccgtgagcctgaccggcaagcaggaggacgacctggccaacatcaaccagtgggtgaaggaggccaccgagggcaagatccaggagttcctgagcggcctgcccgaggacaccgtgctgctgctgctgaacgccatccacttccagggcttctggcgcaacaagttcgaccccagcctgacccagcgcgacagcttccacctggacgagcagttcaccgtgcccgtggagatgatgcaggcccgcacctaccccctgcgctggttcctgctggagcagcccgagatccaggtggcccacttccccttcaagaacaacatgagcttcgtggtgctggtgcccacccacttcgagtggaacgtgagccaggtgctggccaacctgagctgggacaccctgcacccccccctggtgtgggagcgccccaccaaggtgcgcctgcccaagctgtacctgaagcaccagatggacctggtggccaccctgagccagctgggcctgcaggagctgttccaggcccccgacctgcgcggcatcagcgagcagagcctggtggtgagcggcgtgcagcaccagagcaccctggagctgagcgaggtgggcgtggaggccgccgccgccaccagcatcgccatgagccgcatgagcctgagcagcttcagcgtgaaccgccccttcctgttcttcatcttcgaggacaccaccggcctgcccctgttcgtgggcagcgtgcgcaaccccaaccccagcgccccccgcgagctgaaggagcagcaggacagccccggcaacaaggacttcctgcagagcctgaagggcttcccccgcggcgacaagctgttcggccccgacctgaagctggtgccccccatggaggaggactacccccagttcggcagccccaag

SEQ ID NO: 1549 - DNA, 765 bp, synthetic construct
  misc_feature 1..765: note = source = /note="Description of Artificial Sequence: Synthetic coding sequence"
  source 1..765: mol_type = other DNA
atggccctgctgtggggcctgctggtgctgagctggagctgcctgcagggcccctgcagcgtgttcagccccgtgagcgccatggagcccctgggccgccagctgaccagcggccccaaccaggagcaggtgagccccctgaccctgctgaagctgggcaaccaggagcccggcggccagaccgccctgaagagcccccccggcgtgtgcagccgcgaccccacccccgagcagacccaccgcctggcccgcgccatgatggccttcaccgccgacctgttcagcctggtggcccagaccagcacctgccccaacctgatcctgagccccctgagcgtggccctggccctgagccacctggccctgggcgcccagaaccacaccctgcagcgcctgcagcaggtgctgcacgccggcagcggcccctgcctgccccacctgctgagccgcctgtgccaggacctgggccccggcgccttccgcctggccgcccgcatgtacctgcagaagggcttccccatcaaggaggacttcctggagcagagcgagcagctgttcggcgccaagcccgtgagcctgaccggcaagcaggaggacgacctggccaacatcaaccagtgggtgaaggaggccaccgagggcaagatccaggagttcctgagcggcctgcccgaggacaccgtgctgctgctgctgaacgccatccacttccagggcttctggcgcaacaagttcgaccccagcctgacccagcgcgacagcttc

SEQ ID NO: 1550 - DNA, 1500 bp, synthetic construct
  misc_feature 1..1500: note = source = /note="Description of Artificial Sequence: Synthetic coding sequence"
  source 1..1500: mol_type = other DNA
atggccagccgcctgaccctgctgaccctgctgctgctgctgctggccggcgaccgcgccagcagcaaccccaacgccaccagcagcagcagccaggaccccgagagcctgcaggaccgcggcgagggcaaggtggccaccaccgtgatcagcaagatgctgttcgtggagcccatcctggaggtgagcagcctgcccaccaccaacagcaccaccaacagcgccaccaagatcaccgccaacaccaccgacgagcccaccacccagcccaccaccgagcccaccacccagcccaccatccagcccacccagcccaccacccagctgcccaccgacagccccacccagcccaccaccggcagcttctgccccggccccgtgaccctgtgcagcgacctggagagccacagcaccgaggccgtgctgggcgacgccctggtggacttcagcctgaagctgtaccacgccttcagcgccatgaagaaggtggagaccaacatggccttcagccccttcagcatcgccagcctgctgacccaggtgctgctgggcgccggcgagaacaccaagaccaacctggagagcatcctgagctaccccaaggacttcacctgcgtgcaccaggccctgaagggcttcaccaccaagggcgtgaccagcgtgagccagatcttccacagccccgacctggccatccgcgacaccttcgtgaacgccagccgcaccctgtacagcagcagcccccgcgtgctgagcaacaacagcgacgccaacctggagctgatcaacacctgggtggccaagaacaccaacaacaagatcagccgcctgctggacagcctgcccagcgacacccgcctggtgctgctgaacgccatctacctgagcgccaagtggaagaccaccttcgaccccaagaagacccgcatggagcccttccacttcaagaacagcgtgatcaaggtgcccatgatgaacagcaagaagtaccccgtggcccacttcatcgaccagaccctgaaggccaaggtgggccagctgcagctgagccacaacctgagcctggtgatcctggtgccccagaacctgaagcaccgcctggaggacatggagcaggccctgagccccagcgtgttcaaggccatcatggagaagctggagatgagcaagttccagcccaccctgctgaccctgccccgcatcaaggtgaccaccagccaggacatgctgagcatcatggagaagctggagttcttcgacttcagctacgacctgaacctgtgcggcctgaccgaggaccccgacctgcaggtgagcgccatgcagcaccagaccgtgctggagctgaccgagaccggcgtggaggccgccgccgccagcgccatcagcgtggcccgcaccctgctggtgttcgaggtgcagcagcccttcctgttcgtgctgtgggaccagcagcacaagttccccgtgttcatgggccgcgtgtacgacccccgcgcc

SEQ ID NO: 1551 - DNA, 1515 bp, synthetic construct
  misc_feature 1..1515: note = source = /note="Description of Artificial Sequence: Synthetic coding sequence"
  source 1..1515: mol_type = other DNA
atggccagccgcctgaccctgctgaccctgctgctgctgctgctggccggcttcctggagccccaggaccgcgccagcagcaaccccaacgccaccagcagcagcagccaggaccccgagagcctgcaggaccgcggcgagggcaaggtggccaccaccgtgatcagcaagatgctgttcgtggagcccatcctggaggtgagcagcctgcccaccaccaacagcaccaccaacagcgccaccaagatcaccgccaacaccaccgacgagcccaccacccagcccaccaccgagcccaccacccagcccaccatccagcccacccagcccaccacccagctgcccaccgacagccccacccagcccaccaccggcagcttctgccccggccccgtgaccctgtgcagcgacctggagagccacagcaccgaggccgtgctgggcgacgccctggtggacttcagcctgaagctgtaccacgccttcagcgccatgaagaaggtggagaccaacatggccttcagccccttcagcatcgccagcctgctgacccaggtgctgctgggcgccggcgagaacaccaagaccaacctggagagcatcctgagctaccccaaggacttcacctgcgtgcaccaggccctgaagggcttcaccaccaagggcgtgaccagcgtgagccagatcttccacagccccgacctggccatccgcgacaccttcgtgaacgccagccgcaccctgtacagcagcagcccccgcgtgctgagcaacaacagcgacgccaacctggagctgatcaacacctgggtggccaagaacaccaacaacaagatcagccgcctgctggacagcctgcccagcgacacccgcctggtgctgctgaacgccatctacctgagcgccaagtggaagaccaccttcgaccccaagaagacccgcatggagcccttccacttcaagaacagcgtgatcaaggtgcccatgatgaacagcaagaagtaccccgtggcccacttcatcgaccagaccctgaaggccaaggtgggccagctgcagctgagccacaacctgagcctggtgatcctggtgccccagaacctgaagcaccgcctggaggacatggagcaggccctgagccccagcgtgttcaaggccatcatggagaagctggagatgagcaagttccagcccaccctgctgaccctgccccgcatcaaggtgaccaccagccaggacatgctgagcatcatggagaagctggagttcttcgacttcagctacgacctgaacctgtgcggcctgaccgaggaccccgacctgcaggtgagcgccatgcagcaccagaccgtgctggagctgaccgagaccggcgtggaggccgccgccgccagcgccatcagcgtggcccgcaccctgctggtgttcgaggtgcagcagcccttcctgttcgtgctgtgggaccagcagcacaagttccccgtgttcatgggccgcgtgtacgacccccgcgcc

SEQ ID NO: 1552 - DNA, 1344 bp, synthetic construct
  misc_feature 1..1344: note = source = /note="Description of Artificial Sequence: Synthetic coding sequence"
  source 1..1344: mol_type = other DNA
atgctgttcgtggagcccatcctggaggtgagcagcctgcccaccaccaacagcaccaccaacagcgccaccaagatcaccgccaacaccaccgacgagcccaccacccagcccaccaccgagcccaccacccagcccaccatccagcccacccagcccaccacccagctgcccaccgacagccccacccagcccaccaccggcagcttctgccccggccccgtgaccctgtgcagcgacctggagagccacagcaccgaggccgtgctgggcgacgccctggtggacttcagcctgaagctgtaccacgccttcagcgccatgaagaaggtggagaccaacatggccttcagccccttcagcatcgccagcctgctgacccaggtgctgctgggcgccggcgagaacaccaagaccaacctggagagcatcctgagctaccccaaggacttcacctgcgtgcaccaggccctgaagggcttcaccaccaagggcgtgaccagcgtgagccagatcttccacagccccgacctggccatccgcgacaccttcgtgaacgccagccgcaccctgtacagcagcagcccccgcgtgctgagcaacaacagcgacgccaacctggagctgatcaacacctgggtggccaagaacaccaacaacaagatcagccgcctgctggacagcctgcccagcgacacccgcctggtgctgctgaacgccatctacctgagcgccaagtggaagaccaccttcgaccccaagaagacccgcatggagcccttccacttcaagaacagcgtgatcaaggtgcccatgatgaacagcaagaagtaccccgtggcccacttcatcgaccagaccctgaaggccaaggtgggccagctgcagctgagccacaacctgagcctggtgatcctggtgccccagaacctgaagcaccgcctggaggacatggagcaggccctgagccccagcgtgttcaaggccatcatggagaagctggagatgagcaagttccagcccaccctgctgaccctgccccgcatcaaggtgaccaccagccaggacatgctgagcatcatggagaagctggagttcttcgacttcagctacgacctgaacctgtgcggcctgaccgaggaccccgacctgcaggtgagcgccatgcagcaccagaccgtgctggagctgaccgagaccggcgtggaggccgccgccgccagcgccatcagcgtggcccgcaccctgctggtgttcgaggtgcagcagcccttcctgttcgtgctgtgggaccagcagcacaagttccccgtgttcatgggccgcgtgtacgacccccgcgcc

SEQ ID NO: 1553 - DNA, 480 bp, synthetic construct
  misc_feature 1..480: note = source = /note="Description of Artificial Sequence: Synthetic coding sequence"
  source 1..480: mol_type = other DNA
atggccagccgcctgaccctgctgaccctgctgctgctgctgctggccggcgaccgcgccagcagcaaccccaacgccaccagcagcagcagccaggaccccgagagcctgcaggaccgcggcgagggcaaggtggccaccaccgtgatcagcaagatgctgttcgtggagcccatcctggaggtgagcagcctgcccaccaccaacagcaccaccaacagcgccaccaagatcaccgccaacaccaccgacgagcccaccacccagcccaccaccgagcccaccacccagcccaccatccagcccacccagcccaccacccagctgcccaccgacagccccacccagcccaccaccggcagcttctgccccggccccgtgaccctgtgcagcgacctggagagccacagcaccgaggccgtgctgggcgacgccctggtggacttcagcctgaagctgtaccacgccttcagcgccatg

SEQ ID NO: 1554 - DNA, 2241 bp, synthetic construct
  misc_feature 1..2241: note = source = /note="Description of Artificial Sequence: Synthetic coding sequence"
  source 1..2241: mol_type = other DNA
atggccgacgaggccgccctggccctgcagcccggcggcagccccagcgccgccggcgccgaccgcgaggccgccagcagccccgccggcgagcccctgcgcaagcgcccccgccgcgacggccccggcctggagcgcagccccggcgagcccggcggcgccgcccccgagcgcgaggtgcccgccgccgcccgcggctgccccggcgccgccgccgccgccctgtggcgcgaggccgaggccgaggccgccgccgccggcggcgagcaggaggcccaggccaccgccgccgccggcgagggcgacaacggccccggcctgcagggccccagccgcgagccccccctggccgacaacctgtacgacgaggacgacgacgacgagggcgaggaggaggaggaggccgccgccgccgccatcggctaccgcgacaacctgctgttcggcgacgagatcatcaccaacggcttccacagctgcgagagcgacgaggaggaccgcgccagccacgccagcagcagcgactggaccccccgcccccgcatcggcccctacaccttcgtgcagcagcacctgatgatcggcaccgacccccgcaccatcctgaaggacctgctgcccgagaccatccccccccccgagctggacgacatgaccctgtggcagatcgtgatcaacatcctgagcgagccccccaagcgcaagaagcgcaaggacatcaacaccatcgaggacgccgtgaagctgctgcaggagtgcaagaagatcatcgtgctgaccggcgccggcgtgagcgtgagctgcggcatccccgacttccgcagccgcgacggcatctacgcccgcctggccgtggacttccccgacctgcccgacccccaggccatgttcgacatcgagtacttccgcaaggacccccgccccttcttcaagttcgccaaggagatctaccccggccagttccagcccagcctgtgccacaagttcatcgccctgagcgacaaggagggcaagctgctgcgcaactacacccagaacatcgacaccctggagcaggtggccggcatccagcgcatcatccagtgccacggcagcttcgccaccgccagctgcctgatctgcaagtacaaggtggactgcgaggccgtgcgcggcgacatcttcaaccaggtggtgccccgctgcccccgctgccccgccgacgagcccctggccatcatgaagcccgagatcgtgttcttcggcgagaacctgcccgagcagttccaccgcgccatgaagtacgacaaggacgaggtggacctgctgatcgtgatcggcagcagcctgaaggtgcgccccgtggccctgatccccagcagcatcccccacgaggtgccccagatcctgatcaaccgcgagcccctgccccacctgcacttcgacgtggagctgctgggcgactgcgacgtgatcatcaacgagctgtgccaccgcctgggcggcgagtacgccaagctgtgctgcaaccccgtgaagctgagcgagatcaccgagaagcccccccgcacccagaaggagctggcctacctgagcgagctgccccccacccccctgcacgtgagcgaggacagcagcagccccgagcgcaccagcccccccgacagcagcgtgatcgtgaccctgctggaccaggccgccaagagcaacgacgacctggacgtgagcgagagcaagggctgcatggaggagaagccccaggaggtgcagaccagccgcaacgtggagagcatcgccgagcagatggagaaccccgacctgaagaacgtgggcagcagcaccggcgagaagaacgagcgcaccagcgtggccggcaccgtgcgcaagtgctggcccaaccgcgtggccaaggagcagatcagccgccgcctggacggcaaccagtacctgttcctgccccccaaccgctacatcttccacggcgccgaggtgtacagcgacagcgaggacgacgtgctgagcagcagcagctgcggcagcaacagcgacagcggcacctgccagagccccagcctggaggagcccatggaggacgagagcgagatcgaggagttctacaacggcctggaggacgagcccgacgtgcccgagcgcgccggcggcgccggcttcggcaccgacggcgacgaccaggaggccatcaacgaggccatcagcgtgaagcaggaggtgaccgacatgaactaccccagcaacaagagc

SEQ ID NO: 1555 - DNA, 1332 bp, synthetic construct
  misc_feature 1..1332: note = source = /note="Description of Artificial Sequence: Synthetic coding sequence"
  source 1..1332: mol_type = other DNA
atgtgcctgtgcagcggccgcaagaccatcctggagatctaccccggccagttccagcccagcctgtgccacaagttcatcgccctgagcgacaaggagggcaagctgctgcgcaactacacccagaacatcgacaccctggagcaggtggccggcatccagcgcatcatccagtgccacggcagcttcgccaccgccagctgcctgatctgcaagtacaaggtggactgcgaggccgtgcgcggcgacatcttcaaccaggtggtgccccgctgcccccgctgccccgccgacgagcccctggccatcatgaagcccgagatcgtgttcttcggcgagaacctgcccgagcagttccaccgcgccatgaagtacgacaaggacgaggtggacctgctgatcgtgatcggcagcagcctgaaggtgcgccccgtggccctgatccccagcagcatcccccacgaggtgccccagatcctgatcaaccgcgagcccctgccccacctgcacttcgacgtggagctgctgggcgactgcgacgtgatcatcaacgagctgtgccaccgcctgggcggcgagtacgccaagctgtgctgcaaccccgtgaagctgagcgagatcaccgagaagcccccccgcacccagaaggagctggcctacctgagcgagctgccccccacccccctgcacgtgagcgaggacagcagcagccccgagcgcaccagcccccccgacagcagcgtgatcgtgaccctgctggaccaggccgccaagagcaacgacgacctggacgtgagcgagagcaagggctgcatggaggagaagccccaggaggtgcagaccagccgcaacgtggagagcatcgccgagcagatggagaaccccgacctgaagaacgtgggcagcagcaccggcgagaagaacgagcgcaccagcgtggccggcaccgtgcgcaagtgctggcccaaccgcgtggccaaggagcagatcagccgccgcctggacggcaaccagtacctgttcctgccccccaaccgctacatcttccacggcgccgaggtgtacagcgacagcgaggacgacgtgctgagcagcagcagctgcggcagcaacagcgacagcggcacctgccagagccccagcctggaggagcccatggaggacgagagcgagatcgaggagttctacaacggcctggaggacgagcccgacgtgcccgagcgcgccggcggcgccggcttcggcaccgacggcgacgaccaggaggccatcaacgaggccatcagcgtgaagcaggaggtgaccgacatgaactaccccagcaacaagagc

SEQ ID NO: 1556 - DNA, 1356 bp, synthetic construct
  misc_feature 1..1356: note = source = /note="Description of Artificial Sequence: Synthetic coding sequence"
  source 1..1356: mol_type = other DNA
atgttcgacatcgagtacttccgcaaggacccccgccccttcttcaagttcgccaaggagatctaccccggccagttccagcccagcctgtgccacaagttcatcgccctgagcgacaaggagggcaagctgctgcgcaactacacccagaacatcgacaccctggagcaggtggccggcatccagcgcatcatccagtgccacggcagcttcgccaccgccagctgcctgatctgcaagtacaaggtggactgcgaggccgtgcgcggcgacatcttcaaccaggtggtgccccgctgcccccgctgccccgccgacgagcccctggccatcatgaagcccgagatcgtgttcttcggcgagaacctgcccgagcagttccaccgcgccatgaagtacgacaaggacgaggtggacctgctgatcgtgatcggcagcagcctgaaggtgcgccccgtggccctgatccccagcagcatcccccacgaggtgccccagatcctgatcaaccgcgagcccctgccccacctgcacttcgacgtggagctgctgggcgactgcgacgtgatcatcaacgagctgtgccaccgcctgggcggcgagtacgccaagctgtgctgcaaccccgtgaagctgagcgagatcaccgagaagcccccccgcacccagaaggagctggcctacctgagcgagctgccccccacccccctgcacgtgagcgaggacagcagcagccccgagcgcaccagcccccccgacagcagcgtgatcgtgaccctgctggaccaggccgccaagagcaacgacgacctggacgtgagcgagagcaagggctgcatggaggagaagccccaggaggtgcagaccagccgcaacgtggagagcatcgccgagcagatggagaaccccgacctgaagaacgtgggcagcagcaccggcgagaagaacgagcgcaccagcgtggccggcaccgtgcgcaagtgctggcccaaccgcgtggccaaggagcagatcagccgccgcctggacggcaaccagtacctgttcctgccccccaaccgctacatcttccacggcgccgaggtgtacagcgacagcgaggacgacgtgctgagcagcagcagctgcggcagcaacagcgacagcggcacctgccagagccccagcctggaggagcccatggaggacgagagcgagatcgaggagttctacaacggcctggaggacgagcccgacgtgcccgagcgcgccggcggcgccggcttcggcaccgacggcgacgaccaggaggccatcaacgaggccatcagcgtgaagcaggaggtgaccgacatgaactaccccagcaacaagagc

SEQ ID NO: 1557 - DNA, 984 bp, synthetic construct
  misc_feature 1..984: note = source = /note="Description of Artificial Sequence: Synthetic coding sequence"
  source 1..984: mol_type = other DNA
atgagcgtgaactacgccgccggcctgagcccctacgccgacaagggcaagtgcggcctgcccgagatcttcgacccccccgaggagctggagcgcaaggtgtgggagctggcccgcctggtgtggcagagcagcagcgtggtgttccacaccggcgccggcatcagcaccgccagcggcatccccgacttccgcggcccccacggcgtgtggaccatggaggagcgcggcctggcccccaagttcgacaccaccttcgagagcgcccgccccacccagacccacatggccctggtgcagctggagcgcgtgggcctgctgcgcttcctggtgagccagaacgtggacggcctgcacgtgcgcagcggcttcccccgcgacaagctggccgagctgcacggcaacatgttcgtggaggagtgcgccaagtgcaagacccagtacgtgcgcgacaccgtggtgggcaccatgggcctgaaggccaccggccgcctgtgcaccgtggccaaggcccgcggcctgcgcgcctgccgcaacgccgacctgagcatcaccctgggcaccagcctgcagatccgccccagcggcaacctgcccctggccaccaagcgccgcggcggccgcctggtgatcgtgaacctgcagcccaccaagcacgaccgccacgccgacctgcgcatccacggctacgtggacgaggtgatgacccgcctgatgaagcacctgggcctggagatccccgcctgggacggcccccgcgtgctggagcgcgccctgccccccctgccccgcccccccacccccaagctggagcccaaggaggagagccccacccgcatcaacggcagcatccccgccggccccaagcaggagccctgcgcccagcacaacggcagcgagcccgccagccccaagcgcgagcgccccaccagccccgccccccaccgcccccccaagcgcgtgaaggccaaggccgtgcccagc

SEQ ID NO: 1558 - DNA, 1065 bp, synthetic construct
  misc_feature 1..1065: note = source = /note="Description of Artificial Sequence: Synthetic coding sequence"
  source 1..1065: mol_type = other DNA
atgagcgtgaactacgccgccggcctgagcccctacgccgacaagggcaagtgcggcctgcccgagatcttcgacccccccgaggagctggagcgcaaggtgtgggagctggcccgcctggtgtggcagagcagcagcgtggtgttccacaccggcgccggcatcagcaccgccagcggcatccccgacttccgcggcccccacggcgtgtggaccatggaggagcgcggcctggcccccaagttcgacaccaccttcgagagcgcccgccccacccagacccacatggccctggtgcagctggagcgcgtgggcctgctgcgcttcctggtgagccagaacgtggacggcctgcacgtgcgcagcggcttcccccgcgacaagctggccgagctgcacggcaacatgttcgtggaggagtgcgccaagtgcaagacccagtacgtgcgcgacaccgtggtgggcaccatgggcctgaaggccaccggccgcctgtgcaccgtggccaaggcccgcggcctgcgcgcctgccgcggcgagctgcgcgacaccatcctggactgggaggacagcctgcccgaccgcgacctggccctggccgacgaggccagccgcaacgccgacctgagcatcaccctgggcaccagcctgcagatccgccccagcggcaacctgcccctggccaccaagcgccgcggcggccgcctggtgatcgtgaacctgcagcccaccaagcacgaccgccacgccgacctgcgcatccacggctacgtggacgaggtgatgacccgcctgatgaagcacctgggcctggagatccccgcctgggacggcccccgcgtgctggagcgcgccctgccccccctgccccgcccccccacccccaagctggagcccaaggaggagagccccacccgcatcaacggcagcatccccgccggccccaagcaggagccctgcgcccagcacaacggcagcgagcccgccagccccaagcgcgagcgccccaccagccccgccccccaccgcccccccaagcgcgtgaaggccaaggccgtgcccagc

SEQ ID NO: 1559 - DNA, 849 bp, synthetic construct
  misc_feature 1..849: note = source = /note="Description of Artificial Sequence: Synthetic coding sequence"
  source 1..849: mol_type = other DNA
atggaggagcgcggcctggcccccaagttcgacaccaccttcgagagcgcccgccccacccagacccacatggccctggtgcagctggagcgcgtgggcctgctgcgcttcctggtgagccagaacgtggacggcctgcacgtgcgcagcggcttcccccgcgacaagctggccgagctgcacggcaacatgttcgtggaggagtgcgccaagtgcaagacccagtacgtgcgcgacaccgtggtgggcaccatgggcctgaaggccaccggccgcctgtgcaccgtggccaaggcccgcggcctgcgcgcctgccgcggcgagctgcgcgacaccatcctggactgggaggacagcctgcccgaccgcgacctggccctggccgacgaggccagccgcaacgccgacctgagcatcaccctgggcaccagcctgcagatccgccccagcggcaacctgcccctggccaccaagcgccgcggcggccgcctggtgatcgtgaacctgcagcccaccaagcacgaccgccacgccgacctgcgcatccacggctacgtggacgaggtgatgacccgcctgatgaagcacctgggcctggagatccccgcctgggacggcccccgcgtgctggagcgcgccctgccccccctgccccgcccccccacccccaagctggagcccaaggaggagagccccacccgcatcaacggcagcatccccgccggccccaagcaggagccctgcgcccagcacaacggcagcgagcccgccagccccaagcgcgagcgccccaccagccccgccccccaccgcccccccaagcgcgtgaaggccaaggccgtgcccagc

SEQ ID NO: 1560 - DNA, 1572 bp, synthetic construct
  misc_feature 1..1572: note = source = /note="Description of Artificial Sequence: Synthetic coding sequence"
  source 1..1572: mol_type = other DNA
atgaccgaggacaaggtgaccggcaccctggtgttcaccgtgatcaccgccgtgctgggcagcttccagttcggctacgacatcggcgtgatcaacgccccccagcaggtgatcatcagccactaccgccacgtgctgggcgtgcccctggacgaccgcaaggccatcaacaactacgtgatcaacagcaccgacgagctgcccaccatcagctacagcatgaaccccaagcccaccccctgggccgaggaggagaccgtggccgccgcccagctgatcaccatgctgtggagcctgagcgtgagcagcttcgccgtgggcggcatgaccgccagcttcttcggcggctggctgggcgacaccctgggccgcatcaaggccatgctggtggccaacatcctgagcctggtgggcgccctgctgatgggcttcagcaagctgggccccagccacatcctgatcatcgccggccgcagcatcagcggcctgtactgcggcctgatcagcggcctggtgcccatgtacatcggcgagatcgcccccaccgccctgcgcggcgccctgggcaccttccaccagctggccatcgtgaccggcatcctgatcagccagatcatcggcctggagttcatcctgggcaactacgacctgtggcacatcctgctgggcctgagcggcgtgcgcgccatcctgcagagcctgctgctgttcttctgccccgagagcccccgctacctgtacatcaagctggacgaggaggtgaaggccaagcagagcctgaagcgcctgcgcggctacgacgacgtgaccaaggacatcaacgagatgcgcaaggagcgcgaggaggccagcagcgagcagaaggtgagcatcatccagctgttcaccaacagcagctaccgccagcccatcctggtggccctgatgctgcacgtggcccagcagttcagcggcatcaacggcatcttctactacagcaccagcatcttccagaccgccggcatcagcaagcccgtgtacgccaccatcggcgtgggcgccgtgaacatggtgttcaccgccgtgagcgtgttcctggtggagaaggccggccgccgcagcctgttcctgatcggcatgagcggcatgttcgtgtgcgccatcttcatgagcgtgggcctggtgctgctgaacaagttcagctggatgagctacgtgagcatgatcgccatcttcctgttcgtgagcttcttcgagatcggccccggccccatcccctggttcatggtggccgagttcttcagccagggcccccgccccgccgccctggccatcgccgccttcagcaactggacctgcaacttcatcgtggccctgtgcttccagtacatcgccgacttctgcggcccctacgtgttcttcctgttcgccggcgtgctgctggccttcaccctgttcaccttcttcaaggtgcccgagaccaagggcaagagcttcgaggagatcgccgccgagttccagaagaagagcggcagcgcccaccgccccaaggccgccgtggagatgaagttcctgggcgccaccgagaccgtg

SEQ ID NO: 1561 - DNA, 1215 bp, synthetic construct
  misc_feature 1..1215: note = source = /note="Description of Artificial Sequence: Synthetic coding sequence"
  source 1..1215: mol_type = other DNA
atgcacctgaaccgcatcaaggccatgctggtggccaacatcctgagcctggtgggcgccctgctgatgggcttcagcaagctgggccccagccacatcctgatcatcgccggccgcagcatcagcggcctgtactgcggcctgatcagcggcctggtgcccatgtacatcggcgagatcgcccccaccgccctgcgcggcgccctgggcaccttccaccagctggccatcgtgaccggcatcctgatcagccagatcatcggcctggagttcatcctgggcaactacgacctgtggcacatcctgctgggcctgagcggcgtgcgcgccatcctgcagagcctgctgctgttcttctgccccgagagcccccgctacctgtacatcaagctggacgaggaggtgaaggccaagcagagcctgaagcgcctgcgcggctacgacgacgtgaccaaggacatcaacgagatgcgcaaggagcgcgaggaggccagcagcgagcagaaggtgagcatcatccagctgttcaccaacagcagctaccgccagcccatcctggtggccctgatgctgcacgtggcccagcagttcagcggcatcaacggcatcttctactacagcaccagcatcttccagaccgccggcatcagcaagcccgtgtacgccaccatcggcgtgggcgccgtgaacatggtgttcaccgccgtgagcgtgttcctggtggagaaggccggccgccgcagcctgttcctgatcggcatgagcggcatgttcgtgtgcgccatcttcatgagcgtgggcctggtgctgctgaacaagttcagctggatgagctacgtgagcatgatcgccatcttcctgttcgtgagcttcttcgagatcggccccggccccatcccctggttcatggtggccgagttcttcagccagggcccccgccccgccgccctggccatcgccgccttcagcaactggacctgcaacttcatcgtggccctgtgcttccagtacatcgccgacttctgcggcccctacgtgttcttcctgttcgccggcgtgctgctggccttcaccctgttcaccttcttcaaggtgcccgagaccaagggcaagagcttcgaggagatcgccgccgagttccagaagaagagcggcagcgcccaccgccccaaggccgccgtggagatgaagttcctgggcgccaccgagaccgtg

SEQ ID NO: 1562 - DNA, 2493 bp, synthetic construct
  misc_feature 1..2493: note = source = /note="Description of Artificial Sequence: Synthetic coding sequence"
  source 1..2493: mol_type = other DNA
atggagcgcccctggggcgccgccgacggcctgagccgctggccccacggcctgggcctgctgctgctgctgcagctgctgccccccagcaccctgagccaggaccgcctggacgccccccccccccccgccgcccccctgccccgctggagcggccccatcggcgtgagctggggcctgcgcgccgccgccgccggcggcgccttcccccgcggcggccgctggcgccgcagcgcccccggcgaggacgaggagtgcggccgcgtgcgcgacttcgtggccaagctggccaacaacacccaccagcacgtgttcgacgacctgcgcggcagcgtgagcctgagctgggtgggcgacagcaccggcgtgatcctggtgctgaccaccttccacgtgcccctggtgatcatgaccttcggccagagcaagctgtaccgcagcgaggactacggcaagaacttcaaggacatcaccgacctgatcaacaacaccttcatccgcaccgagttcggcatggccatcggccccgagaacagcggcaaggtggtgctgaccgccgaggtgagcggcggcagccgcggcggccgcatcttccgcagcagcgacttcgccaagaacttcgtgcagaccgacctgcccttccaccccctgacccagatgatgtacagcccccagaacagcgactacctgctggccctgagcaccgagaacggcctgtgggtgagcaagaacttcggcggcaagtgggaggagatccacaaggccgtgtgcctggccaagtggggcagcgacaacaccatcttcttcaccacctacgccaacggcagctgcaaggccgacctgggcgccctggagctgtggcgcaccagcgacctgggcaagagcttcaagaccatcggcgtgaagatctacagcttcggcctgggcggccgcttcctgttcgccagcgtgatggccgacaaggacaccacccgccgcatccacgtgagcaccgaccagggcgacacctggagcatggcccagctgcccagcgtgggccaggagcagttctacagcatcctggccgccaacgacgacatggtgttcatgcacgtggacgagcccggcgacaccggcttcggcaccatcttcaccagcgacgaccgcggcatcgtgtacagcaagagcctggaccgccacctgtacaccaccaccggcggcgagaccgacttcaccaacgtgaccagcctgcgcggcgtgtacatcaccagcgtgctgagcgaggacaacagcatccagaccatgatcaccttcgaccagggcggccgctggacccacctgcgcaagcccgagaacagcgagtgcgacgccaccgccaagaacaagaacgagtgcagcctgcacatccacgccagctacagcatcagccagaagctgaacgtgcccatggcccccctgagcgagcccaacgccgtgggcatcgtgatcgcccacggcagcgtgggcgacgccatcagcgtgatggtgcccgacgtgtacatcagcgacgacggcggctacagctggaccaagatgctggagggcccccactactacaccatcctggacagcggcggcatcatcgtggccatcgagcacagcagccgccccatcaacgtgatcaagttcagcaccgacgagggccagtgctggcagacctacaccttcacccgcgaccccatctacttcaccggcctggccagcgagcccggcgcccgcagcatgaacatcagcatctggggcttcaccgagagcttcctgaccagccagtgggtgagctacaccatcgacttcaaggacatcctggagcgcaactgcgaggagaaggactacaccatctggctggcccacagcaccgaccccgaggactacgaggacggctgcatcctgggctacaaggagcagttcctgcgcctgcgcaagagcagcgtgtgccagaacggccgcgactacgtggtgaccaagcagcccagcatctgcctgtgcagcctggaggacttcctgtgcgacttcggctactaccgccccgagaacgacagcaagtgcgtggagcagcccgagctgaagggccacgacctggagttctgcctgtacggccgcgaggagcacctgaccaccaacggctaccgcaagatccccggcgacaagtgccagggcggcgtgaaccccgtgcgcgaggtgaaggacctgaagaagaagtgcaccagcaacttcctgagccccgagaagcagaacagcaagagcaacagcgtgcccatcatcctggccatcgtgggcctgatgctggtgaccgtggtggccggcgtgctgatcgtgaagaagtacgtgtgcggcggccgcttcctggtgcaccgctacagcgtgctgcagcagcacgccgaggccaacggcgtggacggcgtggacgccctggacaccgccagccacaccaacaagagcggctaccacgacgacagcgacgaggacctgctggag

SEQ ID NO: 1563 - DNA, 2082 bp, synthetic construct
  misc_feature 1..2082: note = source = /note="Description of Artificial Sequence: Synthetic coding sequence"
  source 1..2082: mol_type = other DNA
atgaccttcggccagagcaagctgtaccgcagcgaggactacggcaagaacttcaaggacatcaccgacctgatcaacaacaccttcatccgcaccgagttcggcatggccatcggccccgagaacagcggcaaggtggtgctgaccgccgaggtgagcggcggcagccgcggcggccgcatcttccgcagcagcgacttcgccaagaacttcgtgcagaccgacctgcccttccaccccctgacccagatgatgtacagcccccagaacagcgactacctgctggccctgagcaccgagaacggcctgtgggtgagcaagaacttcggcggcaagtgggaggagatccacaaggccgtgtgcctggccaagtggggcagcgacaacaccatcttcttcaccacctacgccaacggcagctgcaccgacctgggcgccctggagctgtggcgcaccagcgacctgggcaagagcttcaagaccatcggcgtgaagatctacagcttcggcctgggcggccgcttcctgttcgccagcgtgatggccgacaaggacaccacccgccgcatccacgtgagcaccgaccagggcgacacctggagcatggcccagctgcccagcgtgggccaggagcagttctacagcatcctggccgccaacgacgacatggtgttcatgcacgtggacgagcccggcgacaccggcttcggcaccatcttcaccagcgacgaccgcggcatcgtgtacagcaagagcctggaccgccacctgtacaccaccaccggcggcgagaccgacttcaccaacgtgaccagcctgcgcggcgtgtacatcaccagcgtgctgagcgaggacaacagcatccagaccatgatcaccttcgaccagggcggccgctggacccacctgcgcaagcccgagaacagcgagtgcgacgccaccgccaagaacaagaacgagtgcagcctgcacatccacgccagctacagcatcagccagaagctgaacgtgcccatggcccccctgagcgagcccaacgccgtgggcatcgtgatcgcccacggcagcgtgggcgacgccatcagcgtgatggtgcccgacgtgtacatcagcgacgacggcggctacagctggaccaagatgctggagggcccccactactacaccatcctggacagcggcggcatcatcgtggccatcgagcacagcagccgccccatcaacgtgatcaagttcagcaccgacgagggccagtgctggcagacctacaccttcacccgcgaccccatctacttcaccggcctggccagcgagcccggcgcccgcagcatgaacatcagcatctggggcttcaccgagagcttcctgaccagccagtgggtgagctacaccatcgacttcaaggacatcctggagcgcaactgcgaggagaaggactacaccatctggctggcccacagcaccgaccccgaggactacgaggacggctgcatcctgggctacaaggagcagttcctgcgcctgcgcaagagcagcgtgtgccagaacggccgcgactacgtggtgaccaagcagcccagcatctgcctgtgcagcctggaggacttcctgtgcgacttcggctactaccgccccgagaacgacagcaagtgcgtggagcagcccgagctgaagggccacgacctggagttctgcctgtacggccgcgaggagcacctgaccaccaacggctaccgcaagatccccggcgacaagtgccagggcggcgtgaaccccgtgcgcgaggtgaaggacctgaagaagaagtgcaccagcaacttcctgagccccgagaagcagaacagcaagagcaacagcgtgcccatcatcctggccatcgtgggcctgatgctggtgaccgtggtggccggcgtgctgatcgtgaagaagtacgtgtgcggcggccgcttcctggtgcaccgctacagcgtgctgcagcagcacgccgaggccaacggcgtggacggcgtggacgccctggacaccgccagccacaccaacaagagcggctaccacgacgacagcgacgaggacctgctggag

SEQ ID NO: 1564 - DNA, 1761 bp, synthetic construct
  misc_feature 1..1761: note = source = /note="Description of Artificial Sequence: Synthetic coding sequence"
  source 1..1761: mol_type = other DNA
atgccccgctacggcgccagcctgcgccagagctgcccccgcagcggccgcgagcagggccaggacggcaccgccggcgcccccggcctgctgtggatgggcctggtgctggccctggccctggccctggccctggccctggccctgagcgacagccgcgtgctgtgggcccccgccgaggcccaccccctgagcccccagggccaccccgcccgcctgcaccgcatcgtgccccgcctgcgcgacgtgttcggctggggcaacctgacctgccccatctgcaagggcctgttcaccgccatcaacctgggcctgaagaaggagcccaacgtggcccgcgtgggcagcgtggccatcaagctgtgcaacctgctgaagatcgccccccccgccgtgtgccagagcatcgtgcacctgttcgaggacgacatggtggaggtgtggcgccgcagcgtgctgagccccagcgaggcctgcggcctgctgctgggcagcacctgcggccactgggacatcttcagcagctggaacatcagcctgcccaccgtgcccaagcccccccccaagccccccagcccccccgcccccggcgcccccgtgagccgcatcctgttcctgaccgacctgcactgggaccacgactacctggagggcaccgaccccgactgcgccgaccccctgtgctgccgccgcggcagcggcctgccccccgccagccgccccggcgccggctactggggcgagtacagcaagtgcgacctgcccctgcgcaccctggagagcctgctgagcggcctgggccccgccggccccttcgacatggtgtactggaccggcgacatccccgcccacgacgtgtggcaccagacccgccaggaccagctgcgcgccctgaccaccgtgaccgccctggtgcgcaagttcctgggccccgtgcccgtgtaccccgccgtgggcaaccacgagagcacccccgtgaacagcttccccccccccttcatcgagggcaaccacagcagccgctggctgtacgaggccatggccaaggcctgggagccctggctgcccgccgaggccctgcgcaccctgcgctacctgagcagcgtggagacccaggagggcaagcgcaaggtgcacatcatcggccacatcccccccggccactgcctgaagagctggagctggaactactaccgcatcgtggcccgctacgagaacaccctggccgcccagttcttcggccacacccacgtggacgagttcgaggtgttctacgacgaggagaccctgagccgccccctggccgtggccttcctggcccccagcgccaccacctacatcggcctgaaccccggctaccgcgtgtaccagatcgacggcaactacagcggcagcagccacgtggtgctggaccacgagacctacatcctgaacctgacccaggccaacatccccggcgccatcccccactggcagctgctgtaccgcgcccgcgagacctacggcctgcccaacaccctgcccaccgcctggcacaacctggtgtaccgcatgcgcggcgacatgcagctgttccagaccttctggttcctgtaccacaagggccacccccccagcgagccctgcggcaccccctgccgcctggccaccctgtgcgcccagctgagcgcccgcgccgacagccccgccctgtgccgccacctgatgcccgacggcagcctgcccgaggcccagagcctgtggccccgccccctgttctgc

SEQ ID NO: 1565 - DNA, 1893 bp, synthetic construct
  misc_feature 1..1893: note = source = /note="Description of Artificial Sequence: Synthetic coding sequence"
  source 1..1893: mol_type = other DNA
atgccccgctacggcgccagcctgcgccagagctgcccccgcagcggccgcgagcagggccaggacggcaccgccggcgcccccggcctgctgtggatgggcctggtgctggccctggccctggccctggccctggccctggccctgagcgacagccgcgtgctgtgggcccccgccgaggcccaccccctgagcccccagggccaccccgcccgcctgcaccgcatcgtgccccgcctgcgcgacgtgttcggctggggcaacctgacctgccccatctgcaagggcctgttcaccgccatcaacctgggcctgaagaaggagcccaacgtggcccgcgtgggcagcgtggccatcaagctgtgcaacctgctgaagatcgccccccccgccgtgtgccagagcatcgtgcacctgttcgaggacgacatggtggaggtgtggcgccgcagcgtgctgagccccagcgaggcctgcggcctgctgctgggcagcacctgcggccactgggacatcttcagcagctggaacatcagcctgcccaccgtgcccaagcccccccccaagccccccagcccccccgcccccggcgcccccgtgagccgcatcctgttcctgaccgacctgcactgggaccacgactacctggagggcaccgaccccgactgcgccgaccccctgtgctgccgccgcggcagcggcctgccccccgccagccgccccggcgccggctactggggcgagtacagcaagtgcgacctgcccctgcgcaccctggagagcctgctgagcggcctgggccccgccggccccttcgacatggtgtactggaccggcgacatccccgcccacgacgtgtggcaccagacccgccaggaccagctgcgcgccctgaccaccgtgaccgccctggtgcgcaagttcctgggccccgtgcccgtgtaccccgccgtgggcaaccacgagagcacccccgtgaacagcttccccccccccttcatcgagggcaaccacagcagccgctggctgtacgaggccatggccaaggcctgggagccctggctgcccgccgaggccctgcgcaccctgcgcatcggcggcttctacgccctgagcccctaccccggcctgcgcctgatcagcctgaacatgaacttctgcagccgcgagaacttctggctgctgatcaacagcaccgaccccgccggccagctgcagtggctggtgggcgagctgcaggccgccgaggaccgcggcgacaaggtgcacatcatcggccacatcccccccggccactgcctgaagagctggagctggaactactaccgcatcgtggcccgctacgagaacaccctggccgcccagttcttcggccacacccacgtggacgagttcgaggtgttctacgacgaggagaccctgagccgccccctggccgtggccttcctggcccccagcgccaccacctacatcggcctgaaccccggctaccgcgtgtaccagatcgacggcaactacagcggcagcagccacgtggtgctggaccacgagacctacatcctgaacctgacccaggccaacatccccggcgccatcccccactggcagctgctgtaccgcgcccgcgagacctacggcctgcccaacaccctgcccaccgcctggcacaacctggtgtaccgcatgcgcggcgacatgcagctgttccagaccttctggttcctgtaccacaagggccacccccccagcgagccctgcggcaccccctgccgcctggccaccctgtgcgcccagctgagcgcccgcgccgacagccccgccctgtgccgccacctgatgcccgacggcagcctgcccgaggcccagagcctgtggccccgccccctgttctgc

SEQ ID NO: 1566 - DNA, 1725 bp, synthetic construct
  misc_feature 1..1725: note = source = /note="Description of Artificial Sequence: Synthetic coding sequence"
  source 1..1725: mol_type = other DNA
atgccccgctacggcgccagcctgcgccagagctgcccccgcagcggccgcgagcagggccaggacggcaccgccggcgcccccggcctgctgtggatgggcctggtgctggccctggccctggccctggccctggccctggccctgagcgacagccgcgtgctgtgggcccccgccgaggcccaccccctgagcccccagggccaccccgcccgcctgcaccgcatcgtgccccgcctgcgcgacgtgttcggctggggcaacctgacctgccccatctgcaagggcctgttcaccgccatcaacctgggcctgaagaaggagcccaacgtggcccgcgtgggcagcgtggccatcaagctgtgcaacctgctgaagatcgccccccccgccgtgtgccagagcatcgtgcacctgttcgaggacgacatggtggaggtgtggcgccgcagcgtgctgagccccagcgaggcctgcggcctgctgctgggcagcacctgcggccactgggacatcttcagcagctggaacatcagcctgcccaccgtgcccaagcccccccccaagccccccagcccccccgcccccggcgcccccgtgagccgcatcctgttcctgaccgacctgcactgggaccacgactacctggagggcaccgaccccgactgcgccgaccccctgtgctgccgccgcggcagcggcctgccccccgccagccgccccggcgccggctactggggcgagtacagcaagtgcgacctgcccctgcgcaccctggagagcctgctgagcggcctgggccccgccggccccttcgacatggtgtactggaccggcgacatccccgcccacgacgtgtggcaccagacccgccaggaccagctgcgcgccctgaccaccgtgaccgccctggtgcgcaagttcctgggccccgtgcccgtgtaccccgccgtgggcaaccacgagagcacccccgtgaacagcttccccccccccttcatcgagggcaaccacagcagccgctggctgtacgaggccatggccaaggcctgggagccctggctgcccgccgaggccctgcgcaccctgcgcaaggtgcacatcatcggccacatcccccccggccactgcctgaagagctggagctggaactactaccgcatcgtggcccgctacgagaacaccctggccgcccagttcttcggccacacccacgtggacgagttcgaggtgttctacgacgaggagaccctgagccgccccctggccgtggccttcctggcccccagcgccaccacctacatcggcctgaaccccggctaccgcgtgtaccagatcgacggcaactacagcggcagcagccacgtggtgctggaccacgagacctacatcctgaacctgacccaggccaacatccccggcgccatcccccactggcagctgctgtaccgcgcccgcgagacctacggcctgcccaacaccctgcccaccgcctggcacaacctggtgtaccgcatgcgcggcgacatgcagctgttccagaccttctggttcctgtaccacaagggccacccccccagcgagccctgcggcaccccctgccgcctggccaccctgtgcgcccagctgagcgcccgcgccgacagccccgccctgtgccgccacctgatgcccgacggcagcctgcccgaggcccagagcctgtggccccgccccctgttctgc

SEQ ID NO: 1567 - DNA, 1890 bp, synthetic construct
  misc_feature 1..1890: note = source = /note="Description of Artificial Sequence: Synthetic coding sequence"
  source 1..1890: mol_type = other DNA
atgccccgctacggcgccagcctgcgccagagctgcccccgcagcggccgcgagcagggccaggacggcaccgccggcgcccccggcctgctgtggatgggcctggtgctggccctggccctggccctggccctggccctggccctgagcgacagccgcgtgctgtgggcccccgccgaggcccaccccctgagcccccagggccaccccgcccgcctgcaccgcatcgtgccccgcctgcgcgacgtgttcggctggggcaacctgacctgccccatctgcaagggcctgttcaccgccatcaacctgggcctgaaggagcccaacgtggcccgcgtgggcagcgtggccatcaagctgtgcaacctgctgaagatcgccccccccgccgtgtgccagagcatcgtgcacctgttcgaggacgacatggtggaggtgtggcgccgcagcgtgctgagccccagcgaggcctgcggcctgctgctgggcagcacctgcggccactgggacatcttcagcagctggaacatcagcctgcccaccgtgcccaagcccccccccaagccccccagcccccccgcccccggcgcccccgtgagccgcatcctgttcctgaccgacctgcactgggaccacgactacctggagggcaccgaccccgactgcgccgaccccctgtgctgccgccgcggcagcggcctgccccccgccagccgccccggcgccggctactggggcgagtacagcaagtgcgacctgcccctgcgcaccctggagagcctgctgagcggcctgggccccgccggccccttcgacatggtgtactggaccggcgacatccccgcccacgacgtgtggcaccagacccgccaggaccagctgcgcgccctgaccaccgtgaccgccctggtgcgcaagttcctgggccccgtgcccgtgtaccccgccgtgggcaaccacgagagcacccccgtgaacagcttccccccccccttcatcgagggcaaccacagcagccgctggctgtacgaggccatggccaaggcctgggagccctggctgcccgccgaggccctgcgcaccctgcgcatcggcggcttctacgccctgagcccctaccccggcctgcgcctgatcagcctgaacatgaacttctgcagccgcgagaacttctggctgctgatcaacagcaccgaccccgccggccagctgcagtggctggtgggcgagctgcaggccgccgaggaccgcggcgacaaggtgcacatcatcggccacatcccccccggccactgcctgaagagctggagctggaactactaccgcatcgtggcccgctacgagaacaccctggccgcccagttcttcggccacacccacgtggacgagttcgaggtgttctacgacgaggagaccctgagccgccccctggccgtggccttcctggcccccagcgccaccacctacatcggcctgaaccccggctaccgcgtgtaccagatcgacggcaactacagcggcagcagccacgtggtgctggaccacgagacctacatcctgaacctgacccaggccaacatccccggcgccatcccccactggcagctgctgtaccgcgcccgcgagacctacggcctgcccaacaccctgcccaccgcctggcacaacctggtgtaccgcatgcgcggcgacatgcagctgttccagaccttctggttcctgtaccacaagggccacccccccagcgagccctgcggcaccccctgccgcctggccaccctgtgcgcccagctgagcgcccgcgccgacagccccgccctgtgccgccacctgatgcccgacggcagcctgcccgaggcccagagcctgtggccccgccccctgttctgc

SEQ ID NO: 1568 - DNA, 1098 bp, synthetic construct
  misc_feature 1..1098: note = source = /note="Description of Artificial Sequence: Synthetic coding sequence"
  source 1..1098: mol_type = other DNA
atgccccgctacggcgccagcctgcgccagagctgcccccgcagcggccgcgagcagggccaggacggcaccgccggcgcccccggcctgctgtggatgggcctggtgctggccctggccctggccctggccctggccctggccctgagcgacagccgcgtgctgtgggcccccgccgaggcccaccccctgagcccccagggccaccccgcccgcctgcaccgcatcgtgccccgcctgcgcgacgtgttcggctggggcaacctgacctgccccatctgcaagggcctgttcaccgccatcaacctgggcctgaagaaggagcccaacgtggcccgcgtgggcagcgtggccatcaagctgtgcaacctgctgaagatcgccccccccgccgtgtgccagagcatcgtgcacctgttcgaggacgacatggtggaggtgtggcgccgcagcgtgctgagccccagcgaggcctgcggcctgctgctgggcagcacctgcggccactgggacatcttcagcagctggaacatcagcctgcccaccgtgcccaagcccccccccaagccccccagcccccccgcccccggcgcccccgtgagccgcatcctgttcctgaccgacctgcactgggaccacgactacctggagggcaccgaccccgactgcgccgaccccctgtgctgccgccgcggcagcggcctgccccccgccagccgccccggcgccggctactggggcgagtacagcaagtgcgacctgcccctgcgcaccctggagagcctgctgagcggcctgggccccgccggccccttcgacatggtgtactggaccggcgacatccccgcccacgacgtgtggcaccagacccgccaggaccagctgcgcgccctgaccaccgtgaccgccctggtgcgcaagttcctgggccccgtgcccgtgtaccccgccgtgggcaaccacgagagcacccccgtgaacagcttccccccccccttcatcgagggcaaccacagcagccgctggctgtacgaggccatggccaaggcctgggagccctggctgcccgccgaggccctgcgcaccctgcgctgcatc

SEQ ID NO: 1569 - DNA, 1206 bp, synthetic construct
  misc_feature 1..1206: note = source = /note="Description of Artificial Sequence: Synthetic coding sequence"
  source 1..1206: mol_type = other DNA
atgccccgctacggcgccagcctgcgccagagctgcccccgcagcggccgcgagcagggccaggacggcaccgccggcgcccccggcctgctgtggatgggcctggtgctggccctggccctggccctggccctggccctggccctgagcgacagccgcgtgctgtgggcccccgccgaggcccaccccctgagcccccagggccaccccgcccgcctgcaccgcatcgtgccccgcctgcgcgacgtgttcggctggggcaacctgacctgccccatctgcaagggcctgttcaccgccatcaacctgggcctgaagaaggagcccaacgtggcccgcgtgggcagcgtggccatcaagctgtgcaacctgctgaagatcgccccccccgccgtgtgccagagcatcgtgcacctgttcgaggacgacatggtggaggtgtggcgccgcagcgtgctgagccccagcgaggcctgcggcctgctgctgggcagcacctgcggccactgggacatcttcagcagctggaacatcagcctgcccaccgtgcccaagcccccccccaagccccccagcccccccgcccccggcgcccccgtgagccgcatcctgttcctgaccgacctgcactgggaccacgactacctggagggcaccgaccccgactgcgccgaccccctgtgctgccgccgcggcagcggcctgccccccgccagccgccccggcgccggctactggggcgagtacagcaagtgcgacctgcccctgcgcaccctggagagcctgctgagcggcctgggccccgccggccccttcgacatggtgtactggaccggcgacatccccgcccacgacgtgtggcaccagacccgccaggaccagctgcgcgccctgaccaccgtgaccgccctggtgcgcaagttcctgggccccgtgcccgtgtaccccgccgtgggcaaccacgagagcacccccgtgaacagcttccccccccccttcatcgagggcaaccacagcagccgctggctgtacgaggccatggccaaggcctgggagccctggctgcccgccgaggccctgcgcaccctgcgctacctgagcagcgtggagacccaggagggcaagcgcaagaactggggcgtgctgtgcagcttccccatcccccgcagccccccccacctgagccagtacgagttcctgttcccc

SEQ ID NO: 1570 - DNA, 1725 bp, synthetic construct
  misc_feature 1..1725: note = source = /note="Description of Artificial Sequence: Synthetic coding sequence"
  source 1..1725: mol_type = other DNA
atgctgggcgtgctggtgctgggcgccctggccctggccggcctgggcttccccgcccccgccgagccccagcccggcggcagccagtgcgtggagcacgactgcttcgccctgtaccccggccccgccaccttcctgaacgccagccagatctgcgacggcctgcgcggccacctgatgaccgtgcgcagcagcgtggccgccgacgtgatcagcctgctgctgaacggcgacggcggcgtgggccgccgccgcctgtggatcggcctgcagctgccccccggctgcggcgaccccaagcgcctgggccccctgcgcggcttccagtgggtgaccggcgacaacaacaccagctacagccgctgggcccgcctggacctgaacggcgcccccctgtgcggccccctgtgcgtggccgtgagcgccgccgaggccaccgtgcccagcgagcccatctgggaggagcagcagtgcgaggtgaaggccgacggcttcctgtgcgagttccacttccccgccacctgccgccccctggccgtggagcccggcgccgccgccgccgccgtgagcatcacctacggcacccccttcgccgcccgcggcgccgacttccaggccctgcccgtgggcagcagcgccgccgtggcccccctgggcctgcagctgatgtgcaccgccccccccggcgccgtgcagggccactgggcccgcgaggcccccggcgcctgggactgcagcgtggagaacggcggctgcgagcacgcctgcaacgccatccccggcgccccccgctgccagtgccccgccggcgccgccctgcaggccgacggccgcagctgcaccgccagcgccacccagagctgcaacgacctgtgcgagcacttctgcgtgcccaaccccgaccagcccggcagctacagctgcatgtgcgagaccggctaccgcctggccgccgaccagcaccgctgcgaggacgtggacgactgcatcctggagcccagcccctgcccccagcgctgcgtgaacacccagggcggcttcgagtgccactgctaccccaactacgacctggtggacggcgagtgcgtggagcccgtggacccctgcttccgcgccaactgcgagtaccagtgccagcccctgaaccagaccagctacctgtgcgtgtgcgccgagggcttcgcccccatcccccacgagccccaccgctgccagatgttctgcaaccagaccgcctgccccgccgactgcgaccccaacacccaggccagctgcgagtgccccgagggctacatcctggacgacggcttcatctgcaccgacatcgacgagtgcgagaacggcggcttctgcagcggcgtgtgccacaacctgcccggcaccttcgagtgcatctgcggccccgacagcgccctggcccgccacatcggcaccgactgcgacagcggcaaggtggacggcggcgacagcggcagcggcgagcccccccccagccccacccccggcagcaccctgaccccccccgccgtgggcctggtgcacagcggcctgctgatcggcatcagcatcgccagcctgtgcctggtggtggccctgctggccctgctgtgccacctgcgcaagaagcagggcgccgcccgcgccaagatggagtacaagtgcgccgcccccagcaaggaggtggtgctgcagcacgtgcgcaccgagcgcaccccccagcgcctg

SEQ ID NO: 1571 - DNA, 1059 bp, synthetic construct
  misc_feature 1..1059: note = source = /note="Description of Artificial Sequence: Synthetic coding sequence"
  source 1..1059: mol_type = other DNA
atggagctgaccgagctgctgctggtggtgatgctgctgctgaccgcccgcctgaccctgagcagccccgccccccccgcctgcgacctgcgcgtgctgagcaagctgctgcgcgacagccacgtgctgcacagccgcctgagccagtgccccgaggtgcaccccctgcccacccccgtgctgctgcccgccgtggacttcagcctgggcgagtggaagacccagatggaggagaccaaggcccaggacatcctgggcgccgtgaccctgctgctggagggcgtgatggccgcccgcggccagctgggccccacctgcctgagcagcctgctgggccagctgagcggccaggtgcgcctgctgctgggcgccctgcagagcctgctgggcacccagctgcccccccagggccgcaccaccgcccacaaggaccccaacgccatcttcctgagcttccagcacctgctgcgcggcaaggtgcgcttcctgatgctggtgggcggcagcaccctgtgcgtgcgccgcgccccccccaccaccgccgtgcccagccgcaccagcctggtgctgaccctgaacgagctgcccaaccgcaccagcggcctgctggagaccaacttcaccgccagcgcccgcaccaccggcagcggcctgctgaagtggcagcagggcttccgcgccaagatccccggcctgctgaaccagaccagccgcagcctggaccagatccccggctacctgaaccgcatccacgagctgctgaacggcacccgcggcctgttccccggccccagccgccgcaccctgggcgcccccgacatcagcagcggcaccagcgacaccggcagcctgccccccaacctgcagcccggctacagccccagccccacccacccccccaccggccagtacaccctgttccccctgccccccaccctgcccacccccgtggtgcagctgcaccccctgctgcccgaccccagcgcccccacccccacccccaccagccccctgctgaacaccagctacacccacagccagaacctgagccaggagggc

SEQ ID NO: 1572 - DNA, 858 bp, synthetic construct
  misc_feature 1..858: note = source = /note="Description of Artificial Sequence: Synthetic coding sequence"
  source 1..858: mol_type = other DNA
atggagctgaccgagctgctgctggtggtgatgctgctgctgaccgcccgcctgaccctgagcagccccgccccccccgcctgcgacctgcgcgtgctgagcaagctgctgcgcgacagccacgtgctgcacagccgcctgagccagtgccccgaggtgcaccccctgcccacccccgtgctgctgcccgccgtggacttcagcctgggcgagtggaagacccagatggaggagaccaaggcccaggacatcctgggcgccgtgaccctgctgctggagggcgtgatggccgcccgcggccagctgggccccacctgcctgagcagcctgctgggccagctgagcggccaggtgcgcctgctgctgggcgccctgcagagcctgctgggcacccagctgcccccccagggccgcaccaccgcccacaaggaccccaacgccatcttcctgagcttccagcacctgctgcgcggcaaggacttctggatcgtgggcgacaagctgcactgcctgagccagaactactggctgtgggccagcgaggtggccgccggcatccagagccaggacagctggagcgccgagcccaacctgcaggtgcccggccccaacccccgcatccccgagcaggacacccgcaccctggagtggaacagctggaccctgagctggaccctgacccaggacccccgcagccccggccacttcctgcgcaacatccgccaccgcctgcccgccacccagccccccgcctggatcttcagcttccccaaccccagcagctactggaccgtgtacgccctgcccagcagcacccacctggcccacccctgcggccccgcccccccccccgccagc

SEQ ID NO: 1573 - DNA, 1047 bp, synthetic construct
  misc_feature 1..1047: note = source = /note="Description of Artificial Sequence: Synthetic coding sequence"
  source 1..1047: mol_type = other DNA
atggagctgaccgagctgctgctggtggtgatgctgctgctgaccgcccgcctgaccctgagcagccccgccccccccgcctgcgacctgcgcgtgctgagcaagctgctgcgcgacagccacgtgctgcacagccgcctgagccagtgccccgaggtgcaccccctgcccacccccgtgctgctgcccgccgtggacttcagcctgggcgagtggaagacccagatggaggagaccaaggcccaggacatcctgggcgccgtgaccctgctgctggagggcgtgatggccgcccgcggccagctgggccccacctgcctgagcagcctgctgggccagctgagcggccaggtgcgcctgctgctgggcgccctgcagagcctgctgggcacccagggccgcaccaccgcccacaaggaccccaacgccatcttcctgagcttccagcacctgctgcgcggcaaggtgcgcttcctgatgctggtgggcggcagcaccctgtgcgtgcgccgcgccccccccaccaccgccgtgcccagccgcaccagcctggtgctgaccctgaacgagctgcccaaccgcaccagcggcctgctggagaccaacttcaccgccagcgcccgcaccaccggcagcggcctgctgaagtggcagcagggcttccgcgccaagatccccggcctgctgaaccagaccagccgcagcctggaccagatccccggctacctgaaccgcatccacgagctgctgaacggcacccgcggcctgttccccggccccagccgccgcaccctgggcgcccccgacatcagcagcggcaccagcgacaccggcagcctgccccccaacctgcagcccggctacagccccagccccacccacccccccaccggccagtacaccctgttccccctgccccccaccctgcccacccccgtggtgcagctgcaccccctgctgcccgaccccagcgcccccacccccacccccaccagccccctgctgaacaccagctacacccacagccagaacctgagccaggagggc

SEQ ID NO: 1574 - DNA, 1179 bp, synthetic construct
  misc_feature 1..1179: note = source = /note="Description of Artificial Sequence: Synthetic coding sequence"
  source 1..1179: mol_type = other DNA
atggaggagccccagagcgaccccagcgtggagccccccctgagccaggagaccttcagcgacctgtggaagctgctgcccgagaacaacgtgctgagccccctgcccagccaggccatggacgacctgatgctgagccccgacgacatcgagcagtggttcaccgaggaccccggccccgacgaggccccccgcatgcccgaggccgccccccccgtggcccccgcccccgccgcccccacccccgccgcccccgcccccgcccccagctggcccctgagcagcagcgtgcccagccagaagacctaccagggcagctacggcttccgcctgggcttcctgcacagcggcaccgccaagagcgtgacctgcacctacagccccgccctgaacaagatgttctgccagctggccaagacctgccccgtgcagctgtgggtggacagcacccccccccccggcacccgcgtgcgcgccatggccatctacaagcagagccagcacatgaccgaggtggtgcgccgctgcccccaccacgagcgctgcagcgacagcgacggcctggcccccccccagcacctgatccgcgtggagggcaacctgcgcgtggagtacctggacgaccgcaacaccttccgccacagcgtggtggtgccctacgagccccccgaggtgggcagcgactgcaccaccatccactacaactacatgtgcaacagcagctgcatgggcggcatgaaccgccgccccatcctgaccatcatcaccctggaggacagcagcggcaacctgctgggccgcaacagcttcgaggtgcgcgtgtgcgcctgccccggccgcgaccgccgcaccgaggaggagaacctgcgcaagaagggcgagccccaccacgagctgccccccggcagcaccaagcgcgccctgcccaacaacaccagcagcagcccccagcccaagaagaagcccctggacggcgagtacttcaccctgcagatccgcggccgcgagcgcttcgagatgttccgcgagctgaacgaggccctggagctgaaggacgcccaggccggcaaggagcccggcggcagccgcgcccacagcagccacctgaagagcaagaagggccagagcaccagccgccacaagaagctgatgttcaagaccgagggccccgacagcgac

SEQ ID NO: 1575 - DNA, 1029 bp, synthetic construct
  misc_feature 1..1029: note = source = /note="Description of Artificial Sequence: Synthetic coding sequence"
  source 1..1029: mol_type = other DNA
atggaggagccccagagcgaccccagcgtggagccccccctgagccaggagaccttcagcgacctgtggaagctgctgcccgagaacaacgtgctgagccccctgcccagccaggccatggacgacctgatgctgagccccgacgacatcgagcagtggttcaccgaggaccccggccccgacgaggccccccgcatgcccgaggccgccccccccgtggcccccgcccccgccgcccccacccccgccgcccccgcccccgcccccagctggcccctgagcagcagcgtgcccagccagaagacctaccagggcagctacggcttccgcctgggcttcctgcacagcggcaccgccaagagcgtgacctgcacctacagccccgccctgaacaagatgttctgccagctggccaagacctgccccgtgcagctgtgggtggacagcacccccccccccggcacccgcgtgcgcgccatggccatctacaagcagagccagcacatgaccgaggtggtgcgccgctgcccccaccacgagcgctgcagcgacagcgacggcctggcccccccccagcacctgatccgcgtggagggcaacctgcgcgtggagtacctggacgaccgcaacaccttccgccacagcgtggtggtgccctacgagccccccgaggtgggcagcgactgcaccaccatccactacaactacatgtgcaacagcagctgcatgggcggcatgaaccgccgccccatcctgaccatcatcaccctggaggacagcagcggcaacctgctgggccgcaacagcttcgaggtgcgcgtgtgcgcctgccccggccgcgaccgccgcaccgaggaggagaacctgcgcaagaagggcgagccccaccacgagctgccccccggcagcaccaagcgcgccctgcccaacaacaccagcagcagcccccagcccaagaagaagcccctggacggcgagtacttcaccctgcagaagaccttccccgcccgccacggcggcagccacctg

SEQ ID NO: 1576 - DNA, 855 bp, synthetic construct
  misc_feature 1..855: note = source = /note="Description of Artificial Sequence: Synthetic coding sequence"
  source 1..855: mol_type = other DNA
atggaggagccccagagcgaccccagcgtggagccccccctgagccaggagaccttcagcgacctgtggaagctgctgcccgagaacaacgtgctgagccccctgcccagccaggccatggacgacctgatgctgagccccgacgacatcgagcagtggttcaccgaggaccccggccccgacgaggccccccgcatgcccgaggccgccccccccgtggcccccgcccccgccgcccccacccccgccgcccccgcccccgcccccagctggcccctgagcagcagcgtgcccagccagaagacctaccagggcagctacggcttccgcctgggcttcctgcacagcggcaccgccaagagcgtgacctgcacctacagccccgccctgaacaagatgttctgccagctggccaagacctgccccgtgcagctgtgggtggacagcacccccccccccggcacccgcgtgcgcgccatggccatctacaagcagagccagcacatgaccgaggtggtgcgccgctgcccccaccacgagcgctgcagcgacagcgacggcctggcccccccccagcacctgatccgcgtggagggcaacctgcgcgtggagtacctggacgaccgcaacaccttccgccacagcgtggtggtgccctacgagccccccgaggtgggcagcgactgcaccaccatccactacaactacatgtgcaacagcagctgcatgggcggcatgaaccgccgccccatcctgaccatcatcaccctggaggacagccgcccccgccaggtggaccacctgcgcagcggcgtgcaggacagcctggccaacatcgccaagagccacctgtac

SEQ ID NO: 1577 - DNA, 1023 bp, synthetic construct
  misc_feature 1..1023: note = source = /note="Description of Artificial Sequence: Synthetic coding sequence"
  source 1..1023: mol_type = other DNA
atggaggagccccagagcgaccccagcgtggagccccccctgagccaggagaccttcagcgacctgtggaagctgctgcccgagaacaacgtgctgagccccctgcccagccaggccatggacgacctgatgctgagccccgacgacatcgagcagtggttcaccgaggaccccggccccgacgaggccccccgcatgcccgaggccgccccccccgtggcccccgcccccgccgcccccacccccgccgcccccgcccccgcccccagctggcccctgagcagcagcgtgcccagccagaagacctaccagggcagctacggcttccgcctgggcttcctgcacagcggcaccgccaagagcgtgacctgcacctacagccccgccctgaacaagatgttctgccagctggccaagacctgccccgtgcagctgtgggtggacagcacccccccccccggcacccgcgtgcgcgccatggccatctacaagcagagccagcacatgaccgaggtggtgcgccgctgcccccaccacgagcgctgcagcgacagcgacggcctggcccccccccagcacctgatccgcgtggagggcaacctgcgcgtggagtacctggacgaccgcaacaccttccgccacagcgtggtggtgccctacgagccccccgaggtgggcagcgactgcaccaccatccactacaactacatgtgcaacagcagctgcatgggcggcatgaaccgccgccccatcctgaccatcatcaccctggaggacagcagcggcaacctgctgggccgcaacagcttcgaggtgcgcgtgtgcgcctgccccggccgcgaccgccgcaccgaggaggagaacctgcgcaagaagggcgagccccaccacgagctgccccccggcagcaccaagcgcgccctgcccaacaacaccagcagcagcccccagcccaagaagaagcccctggacggcgagtacttcaccctgcaggaccagaccagcttccagaaggagaactgc

SEQ ID NO: 1578 - DNA, 1038 bp, synthetic construct
  misc_feature 1..1038: note = source = /note="Description of Artificial Sequence: Synthetic coding sequence"
  source 1..1038: mol_type = other DNA
atggaggagccccagagcgaccccagcgtggagccccccctgagccaggagaccttcagcgacctgtggaagctgctgcccgagaacaacgtgctgagccccctgcccagccaggccatggacgacctgatgctgagccccgacgacatcgagcagtggttcaccgaggaccccggccccgacgaggccccccgcatgcccgaggccgccccccccgtggcccccgcccccgccgcccccacccccgccgcccccgcccccgcccccagctggcccctgagcagcagcgtgcccagccagaagacctaccagggcagctacggcttccgcctgggcttcctgcacagcggcaccgccaagagcgtgacctgcacctacagccccgccctgaacaagatgttctgccagctggccaagacctgccccgtgcagctgtgggtggacagcacccccccccccggcacccgcgtgcgcgccatggccatctacaagcagagccagcacatgaccgaggtggtgcgccgctgcccccaccacgagcgctgcagcgacagcgacggcctggcccccccccagcacctgatccgcgtggagggcaacctgcgcgtggagtacctggacgaccgcaacaccttccgccacagcgtggtggtgccctacgagccccccgaggtgggcagcgactgcaccaccatccactacaactacatgtgcaacagcagctgcatgggcggcatgaaccgccgccccatcctgaccatcatcaccctggaggacagcagcggcaacctgctgggccgcaacagcttcgaggtgcgcgtgtgcgcctgccccggccgcgaccgccgcaccgaggaggagaacctgcgcaagaagggcgagccccaccacgagctgccccccggcagcaccaagcgcgccctgcccaacaacaccagcagcagcccccagcccaagaagaagcccctggacggcgagtacttcaccctgcagatgctgctggacctgcgctggtgctacttcctgatcaacagcagc

SEQ ID NO: 1579 - DNA, 384 bp, synthetic construct
  misc_feature 1..384: note = source = /note="Description of Artificial Sequence: Synthetic coding sequence"
  source 1..384: mol_type = other DNA
atggaggagccccagagcgaccccagcgtggagccccccctgagccaggagaccttcagcgacctgtggaagctgctgcccgagaacaacgtgctgagccccctgcccagccaggccatggacgacctgatgctgagccccgacgacatcgagcagtggttcaccgaggaccccggccccgacgaggccccccgcatgcccgaggccgccccccccgtggcccccgcccccgccgcccccacccccgccgcccccgcccccgcccccagctggcccctgagcagcagcgtgcccagccagaagacctaccagggcagctacggcttccgcctgggcttcctgcacagcggcaccgccaagagcgtgacctgcacctacagcccc

SEQ ID NO: 1580 - DNA, 495 bp, synthetic construct
  misc_feature 1..495: note = source = /note="Description of Artificial Sequence: Synthetic coding sequence"
  source 1..495: mol_type = other DNA
atggaggagccccagagcgaccccagcgtggagccccccctgagccaggagaccttcagcgacctgtggaagctgctgcccgagaacaacgtgctgagccccctgcccagccaggccatggacgacctgatgctgagccccgacgacatcgagcagtggttcaccgaggaccccggccccgacgaggccccccgcatgcccgaggccgccccccccgtggcccccgcccccgccgcccccacccccgccgcccccgcccccgcccccagctggcccctgagcagcagcgtgcccagccagaagacctaccagggcagctacggcttccgcctgggcttcctgcacagcggcaccgccaagagcgtgacctgcacctacagccccgccctgaacaagatgttctgccagctggccaagacctgccccgtgcagctgtgggtggacagcacccccccccccggcacccgcgtgcgcgccatggccatctacaagcag

SEQ ID NO: 1581 - DNA, 597 bp, synthetic construct
  misc_feature 1..597: note = source = /note="Description of Artificial Sequence: Synthetic coding sequence"
  source 1..597: mol_type = other DNA
atgttctgccagctggccaagacctgccccgtgcagctgtgggtggacagcacccccccccccggcacccgcgtgcgcgccatggccatctacaagcagagccagcacatgaccgaggtggtgcgccgctgcccccaccacgagcgctgcagcgacagcgacggcctggcccccccccagcacctgatccgcgtggagggcaacctgcgcgtggagtacctggacgaccgcaacaccttccgccacagcgtggtggtgccctacgagccccccgaggtgggcagcgactgcaccaccatccactacaactacatgtgcaacagcagctgcatgggcggcatgaaccgccgccccatcctgaccatcatcaccctggaggacagcagcggcaacctgctgggccgcaacagcttcgaggtgcgcgtgtgcgcctgccccggccgcgaccgccgcaccgaggaggagaacctgcgcaagaagggcgagccccaccacgagctgccccccggcagcaccaagcgcgccctgcccaacaacaccagcagcagcccccagcccaagaagaagcccctggacggcgagtacttcaccctgcag

SEQ ID NO: 1582 - DNA, 465 bp, synthetic construct
  misc_feature 1..465: note = source = /note="Description of Artificial Sequence: Synthetic coding sequence"
  source 1..465: mol_type = other DNA
atggaggagccccagagcgaccccagcgtggagccccccctgagccaggagaccttcagcgacctgtggaagctgctgcccgagaacaacgtgctgtacagccccgccctgaacaagatgttctgccagctggccaagacctgccccgtgcagctgtgggtggacagcacccccccccccggcacccgcgtgcgcgccatggccatctacaagcagagccagcacatgaccgaggtggtgcgccgctgcccccaccacgagcgctgcagcgacagcgacggcctggcccccccccagcacctgatccgcgtggagggcaacctgcgcgtggagtacctggacgaccgcaacaccttccgccacagcgtggtggtgccctacgagccccccgaggtgggcagcgactgcaccaccatccactacaactacatgtgcaacagcagctgcatgggcggcatgaaccgc

SEQ ID NO: 1583 - DNA, 1362 bp, synthetic construct
  misc_feature 1..1362: note = source = /note="Description of Artificial Sequence: Synthetic coding sequence"
  source 1..1362: mol_type = other DNA
atggacccctacatgatccagatgagcagcaagggcaacctgcccagcatcctggacgtgcacgtgaacgtgggcggccgcagcagcgtgcccggcaagatgaagggccgcaaggcccgctggagcgtgcgccccagcgacatggccaagaagaccttcaaccccatccgcgccatcgtggacaacatgaaggtgaagcccaaccccaacaagaccatgatcagcctgagcatcggcgaccccaccgtgttcggcaacctgcccaccgaccccgaggtgacccaggccatgaaggacgccctggacagcggcaagtacaacggctacgcccccagcatcggcttcctgagcagccgcgaggagatcgccagctactaccactgccccgaggcccccctggaggccaaggacgtgatcctgaccagcggctgcagccaggccatcgacctgtgcctggccgtgctggccaaccccggccagaacatcctggtgccccgccccggcttcagcctgtacaagaccctggccgagagcatgggcatcgaggtgaagctgtacaacctgctgcccgagaagagctgggagatcgacctgaagcagctggagtacctgatcgacgagaagaccgcctgcctgatcgtgaacaaccccagcaacccctgcggcagcgtgttcagcaagcgccacctgcagaagatcctggccgtggccgcccgccagtgcgtgcccatcctggccgacgagatctacggcgacatggtgttcagcgactgcaagtacgagcccctggccaccctgagcaccgacgtgcccatcctgagctgcggcggcctggccaagcgctggctggtgcccggctggcgcctgggctggatcctgatccacgaccgccgcgacatcttcggcaacgagatccgcgacggcctggtgaagctgagccagcgcatcctgggcccctgcaccatcgtgcagggcgccctgaagagcatcctgtgccgcacccccggcgagttctaccacaacaccctgagcttcctgaagagcaacgccgacctgtgctacggcgccctggccgccatccccggcctgcgccccgtgcgccccagcggcgccatgtacctgatggtgggcatcgagatggagcacttccccgagttcgagaacgacgtggagttcaccgagcgcctggtggccgagcagagcgtgcactgcctgcccgccacctgcttcgagtaccccaacttcatccgcgtggtgatcaccgtgcccgaggtgatgatgctggaggcctgcagccgcatccaggagttctgcgagcagcactaccactgcgccgagggcagccaggaggagtgcgacaag

SEQ ID NO: 1584 - DNA, 1599 bp, synthetic construct
  misc_feature 1..1599: note = source = /note="Description of Artificial Sequence: Synthetic coding sequence"
  source 1..1599: mol_type = other DNA
atggccgtggagagccagggcggccgccccctggtgctgggcctgctgctgtgcgtgctgggccccgtggtgagccacgccggcaagatcctgctgatccccgtggacggcagccactggctgagcatgctgggcgccatccagcagctgcagcagcgcggccacgagatcgtggtgctggcccccgacgccagcctgtacatccgcgacggcgccttctacaccctgaagacctaccccgtgcccttccagcgcgaggacgtgaaggagagcttcgtgagcctgggccacaacgtgttcgagaacgacagcttcctgcagcgcgtgatcaagacctacaagaagatcaagaaggacagcgccatgctgctgagcggctgcagccacctgctgcacaacaaggagctgatggccagcctggccgagagcagcttcgacgtgatgctgaccgaccccttcctgccctgcagccccatcgtggcccagtacctgagcctgcccaccgtgttcttcctgcacgccctgccctgcagcctggagttcgaggccacccagtgccccaaccccttcagctacgtgccccgccccctgagcagccacagcgaccacatgaccttcctgcagcgcgtgaagaacatgctgatcgccttcagccagaacttcctgtgcgacgtggtgtacagcccctacgccaccctggccagcgagttcctgcagcgcgaggtgaccgtgcaggacctgctgagcagcgccagcgtgtggctgttccgcagcgacttcgtgaaggactacccccgccccatcatgcccaacatggtgttcgtgggcggcatcaactgcctgcaccagaaccccctgagccaggagttcgaggcctacatcaacgccagcggcgagcacggcatcgtggtgttcagcctgggcagcatggtgagcgagatccccgagaagaaggccatggccatcgccgacgccctgggcaagatcccccagaccgtgctgtggcgctacaccggcacccgccccagcaacctggccaacaacaccatcctggtgaagtggctgccccagaacgacctgctgggccaccccatgacccgcgccttcatcacccacgccggcagccacggcgtgtacgagagcatctgcaacggcgtgcccatggtgatgatgcccctgttcggcgaccagatggacaacgccaagcgcatggagaccaagggcgccggcgtgaccctgaacgtgctggagatgaccagcgaggacctggagaacgccctgaaggccgtgatcaacgacaagagctacaaggagaacatcatgcgcctgagcagcctgcacaaggaccgccccgtggagcccctggacctggccgtgttctgggtggagttcgtgatgcgccacaagggcgccccccacctgcgccccgccgcccacgacctgacctggtaccagtaccacagcctggacgtgatcggcttcctgctggccgtggtgctgaccgtggccttcatcaccttcaagtgctgcgcctacggctaccgcaagtgcctgggcaagaagggccgcgtgaagaaggcccacaagagcaagacccac

SEQ ID NO: 1585 - DNA, 1332 bp, synthetic construct
  misc_feature 1..1332: note = source = /note="Description of Artificial Sequence: Synthetic coding sequence"
  source 1..1332: mol_type = other DNA
atggccgtggagagccagggcggccgccccctggtgctgggcctgctgctgtgcgtgctgggccccgtggtgagccacgccggcaagatcctgctgatccccgtggacggcagccactggctgagcatgctgggcgccatccagcagctgcagcagcgcggccacgagatcgtggtgctggcccccgacgccagcctgtacatccgcgacggcgccttctacaccctgaagacctaccccgtgcccttccagcgcgaggacgtgaaggagagcttcgtgagcctgggccacaacgtgttcgagaacgacagcttcctgcagcgcgtgatcaagacctacaagaagatcaagaaggacagcgccatgctgctgagcggctgcagccacctgctgcacaacaaggagctgatggccagcctggccgagagcagcttcgacgtgatgctgaccgaccccttcctgccctgcagccccatcgtggcccagtacctgagcctgcccaccgtgttcttcctgcacgccctgccctgcagcctggagttcgaggccacccagtgccccaaccccttcagctacgtgccccgccccctgagcagccacagcgaccacatgaccttcctgcagcgcgtgaagaacatgctgatcgccttcagccagaacttcctgtgcgacgtggtgtacagcccctacgccaccctggccagcgagttcctgcagcgcgaggtgaccgtgcaggacctgctgagcagcgccagcgtgtggctgttccgcagcgacttcgtgaaggactacccccgccccatcatgcccaacatggtgttcgtgggcggcatcaactgcctgcaccagaaccccctgagccaggagttcgaggcctacatcaacgccagcggcgagcacggcatcgtggtgttcagcctgggcagcatggtgagcgagatccccgagaagaaggccatggccatcgccgacgccctgggcaagatcccccagaccgtgctgtggcgctacaccggcacccgccccagcaacctggccaacaacaccatcctggtgaagtggctgccccagaacgacctgctgggccaccccatgacccgcgccttcatcacccacgccggcagccacggcgtgtacgagagcatctgcaacggcgtgcccatggtgatgatgcccctgttcggcgaccagatggacaacgccaagcgcatggagaccaagggcgccggcgtgaccctgaacgtgctggagatgaccagcgaggacctggagaacgccctgaaggccgtgatcaacgacaagcgcaagaagcagcagagcggccgccagatg

SEQ ID NO: 1586 - DNA, 489 bp, synthetic construct
  misc_feature 1..489: note = source = /note="Description of Artificial Sequence: Synthetic coding sequence"
  source 1..489: mol_type = other DNA
atggccgagggcggcggccagaaccaccacgaggtggtgaagttcatggacgtgtaccagcgcagctactgccaccccatcgagaccctggtggacatcttccaggagtaccccgacgagatcgagtacatcttcaagcccagctgcgtgcccctgatgcgctgcggcggctgctgcaacgacgagggcctggagtgcgtgcccaccgaggagagcaacatcaccatgcagatcatgcgcatcaagccccaccagggccagcacatcggcgagatgagcttcctgcagcacaacaagtgcgagtgccgccccaagaaggaccgcgcccgccaggagaacccctgcggcccctgcagcgagcgccgcaagcacctgttcgtgcaggacccccagacctgcaagtgcagctgcaagaacaccgacagccgctgcaaggcccgccagctggagctgaacgagcgcacctgccgctgcgacaagccccgccgc

SEQ ID NO: 1587 - DNA, 951 bp, synthetic construct
  misc_feature 1..951: note = source = /note="Description of Artificial Sequence: Synthetic coding sequence"
  source 1..951: mol_type = other DNA
ctgaccgaccgccagaccgacaccgcccccagccccagctaccacctgctgcccggccgccgccgcaccgtggacgccgccgccagccgcggccagggccccgagcccgcccccggcggcggcgtggagggcgtgggcgcccgcggcgtggccctgaagctgttcgtgcagctgctgggctgcagccgcttcggcggcgccgtggtgcgcgccggcgaggccgagcccagcggcgccgcccgcagcgccagcagcggccgcgaggagccccagcccgaggagggcgaggaggaggaggagaaggaggaggagcgcggcccccagtggcgcctgggcgcccgcaagcccggcagctggaccggcgaggccgccgtgtgcgccgacagcgcccccgccgcccgcgccccccaggccctggcccgcgccagcggccgcggcggccgcgtggcccgccgcggcgccgaggagagcggccccccccacagccccagccgccgcggcagcgccagccgcgccggccccggccgcgccagcgagaccatgaacttcctgctgagctgggtgcactggagcctggccctgctgctgtacctgcaccacgccaagtggagccaggccgcccccatggccgagggcggcggccagaaccaccacgaggtggtgaagttcatggacgtgtaccagcgcagctactgccaccccatcgagaccctggtggacatcttccaggagtaccccgacgagatcgagtacatcttcaagcccagctgcgtgcccctgatgcgctgcggcggctgctgcaacgacgagggcctggagtgcgtgcccaccgaggagagcaacatcaccatgcagatcatgcgcatcaagccccaccagggccagcacatcggcgagatgagcttcctgcagcacaacaagtgcgagtgccgctgcgacaagccccgccgc

SEQ ID NO: 1588 - DNA, 1236 bp, synthetic construct
  misc_feature 1..1236: note = source = /note="Description of Artificial Sequence: Synthetic coding sequence"
  source 1..1236: mol_type = other DNA
ctgaccgaccgccagaccgacaccgcccccagccccagctaccacctgctgcccggccgccgccgcaccgtggacgccgccgccagccgcggccagggccccgagcccgcccccggcggcggcgtggagggcgtgggcgcccgcggcgtggccctgaagctgttcgtgcagctgctgggctgcagccgcttcggcggcgccgtggtgcgcgccggcgaggccgagcccagcggcgccgcccgcagcgccagcagcggccgcgaggagccccagcccgaggagggcgaggaggaggaggagaaggaggaggagcgcggcccccagtggcgcctgggcgcccgcaagcccggcagctggaccggcgaggccgccgtgtgcgccgacagcgcccccgccgcccgcgccccccaggccctggcccgcgccagcggccgcggcggccgcgtggcccgccgcggcgccgaggagagcggccccccccacagccccagccgccgcggcagcgccagccgcgccggccccggccgcgccagcgagaccatgaacttcctgctgagctgggtgcactggagcctggccctgctgctgtacctgcaccacgccaagtggagccaggccgcccccatggccgagggcggcggccagaaccaccacgaggtggtgaagttcatggacgtgtaccagcgcagctactgccaccccatcgagaccctggtggacatcttccaggagtaccccgacgagatcgagtacatcttcaagcccagctgcgtgcccctgatgcgctgcggcggctgctgcaacgacgagggcctggagtgcgtgcccaccgaggagagcaacatcaccatgcagatcatgcgcatcaagccccaccagggccagcacatcggcgagatgagcttcctgcagcacaacaagtgcgagtgccgccccaagaaggaccgcgcccgccaggagaagaagagcgtgcgcggcaagggcaagggccagaagcgcaagcgcaagaagagccgctacaagagctggagcgtgtacgtgggcgcccgctgctgcctgatgccctggagcctgcccggcccccacccctgcggcccctgcagcgagcgccgcaagcacctgttcgtgcaggacccccagacctgcaagtgcagctgcaagaacaccgacagccgctgcaaggcccgccagctggagctgaacgagcgcacctgccgctgcgacaagccccgccgc

SEQ ID NO: 1589 - DNA, 981 bp, synthetic construct
  misc_feature 1..981: note = source = /note="Description of Artificial Sequence: Synthetic coding sequence"
  source 1..981: mol_type = other DNA
ctgaccgaccgccagaccgacaccgcccccagccccagctaccacctgctgcccggccgccgccgcaccgtggacgccgccgccagccgcggccagggccccgagcccgcccccggcggcggcgtggagggcgtgggcgcccgcggcgtggccctgaagctgttcgtgcagctgctgggctgcagccgcttcggcggcgccgtggtgcgcgccggcgaggccgagcccagcggcgccgcccgcagcgccagcagcggccgcgaggagccccagcccgaggagggcgaggaggaggaggagaaggaggaggagcgcggcccccagtggcgcctgggcgcccgcaagcccggcagctggaccggcgaggccgccgtgtgcgccgacagcgcccccgccgcccgcgccccccaggccctggcccgcgccagcggccgcggcggccgcgtggcccgccgcggcgccgaggagagcggccccccccacagccccagccgccgcggcagcgccagccgcgccggccccggccgcgccagcgagaccatgaacttcctgctgagctgggtgcactggagcctggccctgctgctgtacctgcaccacgccaagtggagccaggccgcccccatggccgagggcggcggccagaaccaccacgaggtggtgaagttcatggacgtgtaccagcgcagctactgccaccccatcgagaccctggtggacatcttccaggagtaccccgacgagatcgagtacatcttcaagcccagctgcgtgcccctgatgcgctgcggcggctgctgcaacgacgagggcctggagtgcgtgcccaccgaggagagcaacatcaccatgcagatcatgcgcatcaagccccaccagggccagcacatcggcgagatgagcttcctgcagcacaacaagtgcgagtgccgccccaagaaggaccgcgcccgccaggagaagtgcgacaagccccgccgc

SEQ ID NO: 1590 - DNA, 1113 bp, synthetic construct
  misc_feature 1..1113: note = source = /note="Description of Artificial Sequence: Synthetic coding sequence"
  source 1..1113: mol_type = other DNA
ctgaccgaccgccagaccgacaccgcccccagccccagctaccacctgctgcccggccgccgccgcaccgtggacgccgccgccagccgcggccagggccccgagcccgcccccggcggcggcgtggagggcgtgggcgcccgcggcgtggccctgaagctgttcgtgcagctgctgggctgcagccgcttcggcggcgccgtggtgcgcgccggcgaggccgagcccagcggcgccgcccgcagcgccagcagcggccgcgaggagccccagcccgaggagggcgaggaggaggaggagaaggaggaggagcgcggcccccagtggcgcctgggcgcccgcaagcccggcagctggaccggcgaggccgccgtgtgcgccgacagcgcccccgccgcccgcgccccccaggccctggcccgcgccagcggccgcggcggccgcgtggcccgccgcggcgccgaggagagcggccccccccacagccccagccgccgcggcagcgccagccgcgccggccccggccgcgccagcgagaccatgaacttcctgctgagctgggtgcactggagcctggccctgctgctgtacctgcaccacgccaagtggagccaggccgcccccatggccgagggcggcggccagaaccaccacgaggtggtgaagttcatggacgtgtaccagcgcagctactgccaccccatcgagaccctggtggacatcttccaggagtaccccgacgagatcgagtacatcttcaagcccagctgcgtgcccctgatgcgctgcggcggctgctgcaacgacgagggcctggagtgcgtgcccaccgaggagagcaacatcaccatgcagatcatgcgcatcaagccccaccagggccagcacatcggcgagatgagcttcctgcagcacaacaagtgcgagtgccgccccaagaaggaccgcgcccgccaggagaacccctgcggcccctgcagcgagcgccgcaagcacctgttcgtgcaggacccccagacctgcaagtgcagctgcaagaacaccgacagccgctgcaaggcccgccagctggagctgaacgagcgcacctgccgctgcgacaagccccgccgc

SEQ ID NO: 1591 - DNA, 441 bp, synthetic construct
  misc_feature 1..441: note = source = /note="Description of Artificial Sequence: Synthetic coding sequence"
  source 1..441: mol_type = other DNA
atgaacttcctgctgagctgggtgcactggagcctggccctgctgctgtacctgcaccacgccaagtggagccaggccgcccccatggccgagggcggcggccagaaccaccacgaggtggtgaagttcatggacgtgtaccagcgcagctactgccaccccatcgagaccctggtggacatcttccaggagtaccccgacgagatcgagtacatcttcaagcccagctgcgtgcccctgatgcgctgcggcggctgctgcaacgacgagggcctggagtgcgtgcccaccgaggagagcaacatcaccatgcagatcatgcgcatcaagccccaccagggccagcacatcggcgagatgagcttcctgcagcacaacaagtgcgagtgccgccccaagaaggaccgcgcccgccaggagaagtgcgacaagccccgccgc

SEQ ID NO: 1592 - DNA, 1167 bp, synthetic construct
  misc_feature 1..1167: note = source = /note="Description of Artificial Sequence: Synthetic coding sequence"
  source 1..1167: mol_type = other DNA
ctgaccgaccgccagaccgacaccgcccccagccccagctaccacctgctgcccggccgccgccgcaccgtggacgccgccgccagccgcggccagggccccgagcccgcccccggcggcggcgtggagggcgtgggcgcccgcggcgtggccctgaagctgttcgtgcagctgctgggctgcagccgcttcggcggcgccgtggtgcgcgccggcgaggccgagcccagcggcgccgcccgcagcgccagcagcggccgcgaggagccccagcccgaggagggcgaggaggaggaggagaaggaggaggagcgcggcccccagtggcgcctgggcgcccgcaagcccggcagctggaccggcgaggccgccgtgtgcgccgacagcgcccccgccgcccgcgccccccaggccctggcccgcgccagcggccgcggcggccgcgtggcccgccgcggcgccgaggagagcggccccccccacagccccagccgccgcggcagcgccagccgcgccggccccggccgcgccagcgagaccatgaacttcctgctgagctgggtgcactggagcctggccctgctgctgtacctgcaccacgccaagtggagccaggccgcccccatggccgagggcggcggccagaaccaccacgaggtggtgaagttcatggacgtgtaccagcgcagctactgccaccccatcgagaccctggtggacatcttccaggagtaccccgacgagatcgagtacatcttcaagcccagctgcgtgcccctgatgcgctgcggcggctgctgcaacgacgagggcctggagtgcgtgcccaccgaggagagcaacatcaccatgcagatcatgcgcatcaagccccaccagggccagcacatcggcgagatgagcttcctgcagcacaacaagtgcgagtgccgccccaagaaggaccgcgcccgccaggagaagaagagcgtgcgcggcaagggcaagggccagaagcgcaagcgcaagaagagccgcccctgcggcccctgcagcgagcgccgcaagcacctgttcgtgcaggacccccagacctgcaagtgcagctgcaagaacaccgacagccgctgcaaggcccgccagctggagctgaacgagcgcacctgccgctgcgacaagccccgccgc

SEQ ID NO: 1593 - DNA, 1062 bp, synthetic construct
  misc_feature 1..1062: note = source = /note="Description of Artificial Sequence: Synthetic coding sequence"
  source 1..1062: mol_type = other DNA
ctgaccgaccgccagaccgacaccgcccccagccccagctaccacctgctgcccggccgccgccgcaccgtggacgccgccgccagccgcggccagggccccgagcccgcccccggcggcggcgtggagggcgtgggcgcccgcggcgtggccctgaagctgttcgtgcagctgctgggctgcagccgcttcggcggcgccgtggtgcgcgccggcgaggccgagcccagcggcgccgcccgcagcgccagcagcggccgcgaggagccccagcccgaggagggcgaggaggaggaggagaaggaggaggagcgcggcccccagtggcgcctgggcgcccgcaagcccggcagctggaccggcgaggccgccgtgtgcgccgacagcgcccccgccgcccgcgccccccaggccctggcccgcgccagcggccgcggcggccgcgtggcccgccgcggcgccgaggagagcggccccccccacagccccagccgccgcggcagcgccagccgcgccggccccggccgcgccagcgagaccatgaacttcctgctgagctgggtgcactggagcctggccctgctgctgtacctgcaccacgccaagtggagccaggccgcccccatggccgagggcggcggccagaaccaccacgaggtggtgaagttcatggacgtgtaccagcgcagctactgccaccccatcgagaccctggtggacatcttccaggagtaccccgacgagatcgagtacatcttcaagcccagctgcgtgcccctgatgcgctgcggcggctgctgcaacgacgagggcctggagtgcgtgcccaccgaggagagcaacatcaccatgcagatcatgcgcatcaagccccaccagggccagcacatcggcgagatgagcttcctgcagcacaacaagtgcgagtgccgccccaagaaggaccgcgcccgccaggagaacccctgcggcccctgcagcgagcgccgcaagcacctgttcgtgcaggacccccagacctgcaagtgcagctgcaagaacaccgacagccgctgcaagatg

SEQ ID NO: 1594 - DNA, 1185 bp, synthetic construct
  misc_feature 1..1185: note = source = /note="Description of Artificial Sequence: Synthetic coding sequence"
  source 1..1185: mol_type = other DNA
ctgaccgaccgccagaccgacaccgcccccagccccagctaccacctgctgcccggccgccgccgcaccgtggacgccgccgccagccgcggccagggccccgagcccgcccccggcggcggcgtggagggcgtgggcgcccgcggcgtggccctgaagctgttcgtgcagctgctgggctgcagccgcttcggcggcgccgtggtgcgcgccggcgaggccgagcccagcggcgccgcccgcagcgccagcagcggccgcgaggagccccagcccgaggagggcgaggaggaggaggagaaggaggaggagcgcggcccccagtggcgcctgggcgcccgcaagcccggcagctggaccggcgaggccgccgtgtgcgccgacagcgcccccgccgcccgcgccccccaggccctggcccgcgccagcggccgcggcggccgcgtggcccgccgcggcgccgaggagagcggccccccccacagccccagccgccgcggcagcgccagccgcgccggccccggccgcgccagcgagaccatgaacttcctgctgagctgggtgcactggagcctggccctgctgctgtacctgcaccacgccaagtggagccaggccgcccccatggccgagggcggcggccagaaccaccacgaggtggtgaagttcatggacgtgtaccagcgcagctactgccaccccatcgagaccctggtggacatcttccaggagtaccccgacgagatcgagtacatcttcaagcccagctgcgtgcccctgatgcgctgcggcggctgctgcaacgacgagggcctggagtgcgtgcccaccgaggagagcaacatcaccatgcagatcatgcgcatcaagccccaccagggccagcacatcggcgagatgagcttcctgcagcacaacaagtgcgagtgccgccccaagaaggaccgcgcccgccaggagaagaagagcgtgcgcggcaagggcaagggccagaagcgcaagcgcaagaagagccgctacaagagctggagcgtgccctgcggcccctgcagcgagcgccgcaagcacctgttcgtgcaggacccccagacctgcaagtgcagctgcaagaacaccgacagccgctgcaaggcccgccagctggagctgaacgagcgcacctgccgctgcgacaagccccgccgc

SEQ ID NO: 1595 - DNA, 411 bp, synthetic construct
  misc_feature 1..411: note = source = /note="Description of Artificial Sequence: Synthetic coding sequence"
  source 1..411: mol_type = other DNA
atgaacttcctgctgagctgggtgcactggagcctggccctgctgctgtacctgcaccacgccaagtggagccaggccgcccccatggccgagggcggcggccagaaccaccacgaggtggtgaagttcatggacgtgtaccagcgcagctactgccaccccatcgagaccctggtggacatcttccaggagtaccccgacgagatcgagtacatcttcaagcccagctgcgtgcccctgatgcgctgcggcggctgctgcaacgacgagggcctggagtgcgtgcccaccgaggagagcaacatcaccatgcagatcatgcgcatcaagccccaccagggccagcacatcggcgagatgagcttcctgcagcacaacaagtgcgagtgccgctgcgacaagccccgccgc

SEQ ID NO: 1596 - DNA, 1113 bp, synthetic construct
  misc_feature 1..1113: note = source = /note="Description of Artificial Sequence: Synthetic coding sequence"
  source 1..1113: mol_type = other DNA
ctgaccgaccgccagaccgacaccgcccccagccccagctaccacctgctgcccggccgccgccgcaccgtggacgccgccgccagccgcggccagggccccgagcccgcccccggcggcggcgtggagggcgtgggcgcccgcggcgtggccctgaagctgttcgtgcagctgctgggctgcagccgcttcggcggcgccgtggtgcgcgccggcgaggccgagcccagcggcgccgcccgcagcgccagcagcggccgcgaggagccccagcccgaggagggcgaggaggaggaggagaaggaggaggagcgcggcccccagtggcgcctgggcgcccgcaagcccggcagctggaccggcgaggccgccgtgtgcgccgacagcgcccccgccgcccgcgccccccaggccctggcccgcgccagcggccgcggcggccgcgtggcccgccgcggcgccgaggagagcggccccccccacagccccagccgccgcggcagcgccagccgcgccggccccggccgcgccagcgagaccatgaacttcctgctgagctgggtgcactggagcctggccctgctgctgtacctgcaccacgccaagtggagccaggccgcccccatggccgagggcggcggccagaaccaccacgaggtggtgaagttcatggacgtgtaccagcgcagctactgccaccccatcgagaccctggtggacatcttccaggagtaccccgacgagatcgagtacatcttcaagcccagctgcgtgcccctgatgcgctgcggcggctgctgcaacgacgagggcctggagtgcgtgcccaccgaggagagcaacatcaccatgcagatcatgcgcatcaagccccaccagggccagcacatcggcgagatgagcttcctgcagcacaacaagtgcgagtgccgccccaagaaggaccgcgcccgccaggagaacccctgcggcccctgcagcgagcgccgcaagcacctgttcgtgcaggacccccagacctgcaagtgcagctgcaagaacaccgacagccgctgcaaggcccgccagctggagctgaacgagcgcacctgccgcagcctgacccgcaaggac

SEQ ID NO: 1597 - DNA, 627 bp, synthetic construct
  misc_feature 1..627: note = source = /note="Description of Artificial Sequence: Synthetic coding sequence"
  source 1..627: mol_type = other DNA
atgaacttcctgctgagctgggtgcactggagcctggccctgctgctgtacctgcaccacgccaagtggagccaggccgcccccatggccgagggcggcggccagaaccaccacgaggtggtgaagttcatggacgtgtaccagcgcagctactgccaccccatcgagaccctggtggacatcttccaggagtaccccgacgagatcgagtacatcttcaagcccagctgcgtgcccctgatgcgctgcggcggctgctgcaacgacgagggcctggagtgcgtgcccaccgaggagagcaacatcaccatgcagatcatgcgcatcaagccccaccagggccagcacatcggcgagatgagcttcctgcagcacaacaagtgcgagtgccgccccaagaaggaccgcgcccgccaggagaagaagagcgtgcgcggcaagggcaagggccagaagcgcaagcgcaagaagagccgcccctgcggcccctgcagcgagcgccgcaagcacctgttcgtgcaggacccccagacctgcaagtgcagctgcaagaacaccgacagccgctgcaaggcccgccagctggagctgaacgagcgcacctgccgctgcgacaagccccgccgc

SEQ ID NO: 1598 - DNA, 573 bp, synthetic construct
  misc_feature 1..573: note = source = /note="Description of Artificial Sequence: Synthetic coding sequence"
  source 1..573: mol_type = other DNA
atgaacttcctgctgagctgggtgcactggagcctggccctgctgctgtacctgcaccacgccaagtggagccaggccgcccccatggccgagggcggcggccagaaccaccacgaggtggtgaagttcatggacgtgtaccagcgcagctactgccaccccatcgagaccctggtggacatcttccaggagtaccccgacgagatcgagtacatcttcaagcccagctgcgtgcccctgatgcgctgcggcggctgctgcaacgacgagggcctggagtgcgtgcccaccgaggagagcaacatcaccatgcagatcatgcgcatcaagccccaccagggccagcacatcggcgagatgagcttcctgcagcacaacaagtgcgagtgccgccccaagaaggaccgcgcccgccaggagaacccctgcggcccctgcagcgagcgccgcaagcacctgttcgtgcaggacccccagacctgcaagtgcagctgcaagaacaccgacagccgctgcaaggcccgccagctggagctgaacgagcgcacctgccgcagcctgacccgcaaggac

SEQ ID NO: 1599 - DNA, 966 bp, synthetic construct
  misc_feature 1..966: note = source = /note="Description of Artificial Sequence: Synthetic coding sequence"
  source 1..966: mol_type = other DNA
cgcggccagggccccgagcccgcccccggcggcggcgtggagggcgtgggcgcccgcggcgtggccctgaagctgttcgtgcagctgctgggctgcagccgcttcggcggcgccgtggtgcgcgccggcgaggccgagcccagcggcgccgcccgcagcgccagcagcggccgcgaggagccccagcccgaggagggcgaggaggaggaggagaaggaggaggagcgcggcccccagtggcgcctgggcgcccgcaagcccggcagctggaccggcgaggccgccgtgtgcgccgacagcgcccccgccgcccgcgccccccaggccctggcccgcgccagcggccgcggcggccgcgtggcccgccgcggcgccgaggagagcggccccccccacagccccagccgccgcggcagcgccagccgcgccggccccggccgcgccagcgagaccatgaacttcctgctgagctgggtgcactggagcctggccctgctgctgtacctgcaccacgccaagtggagccaggccgcccccatggccgagggcggcggccagaaccaccacgaggtggtgaagttcatggacgtgtaccagcgcagctactgccaccccatcgagaccctggtggacatcttccaggagtaccccgacgagatcgagtacatcttcaagcccagctgcgtgcccctgatgcgctgcggcggctgctgcaacgacgagggcctggagtgcgtgcccaccgaggagagcaacatcaccatgcagatcatgcgcatcaagccccaccagggccagcacatcggcgagatgagcttcctgcagcacaacaagtgcgagtgccgccccaagaaggaccgcgcccgccaggagaagaagagcgtgcgcggcaagggcaagggccagaagcgcaagcgcaagaagagccgctacaagagctggagcgtgtgcgacaagccccgccgc

SEQ ID NO: 1600 - DNA, 645 bp, synthetic construct
  misc_feature 1..645: note = source = /note="Description of Artificial Sequence: Synthetic coding sequence"
  source 1..645: mol_type = other DNA
atgaacttcctgctgagctgggtgcactggagcctggccctgctgctgtacctgcaccacgccaagtggagccaggccgcccccatggccgagggcggcggccagaaccaccacgaggtggtgaagttcatggacgtgtaccagcgcagctactgccaccccatcgagaccctggtggacatcttccaggagtaccccgacgagatcgagtacatcttcaagcccagctgcgtgcccctgatgcgctgcggcggctgctgcaacgacgagggcctggagtgcgtgcccaccgaggagagcaacatcaccatgcagatcatgcgcatcaagccccaccagggccagcacatcggcgagatgagcttcctgcagcacaacaagtgcgagtgccgccccaagaaggaccgcgcccgccaggagaagaagagcgtgcgcggcaagggcaagggccagaagcgcaagcgcaagaagagccgctacaagagctggagcgtgccctgcggcccctgcagcgagcgccgcaagcacctgttcgtgcaggacccccagacctgcaagtgcagctgcaagaacaccgacagccgctgcaaggcccgccagctggagctgaacgagcgcacctgccgctgcgacaagccccgccgc

SEQ ID NO: 1601 - DNA, 522 bp, synthetic construct
  misc_feature 1..522: note = source = /note="Description of Artificial Sequence: Synthetic coding sequence"
  source 1..522: mol_type = other DNA
atgaacttcctgctgagctgggtgcactggagcctggccctgctgctgtacctgcaccacgccaagtggagccaggccgcccccatggccgagggcggcggccagaaccaccacgaggtggtgaagttcatggacgtgtaccagcgcagctactgccaccccatcgagaccctggtggacatcttccaggagtaccccgacgagatcgagtacatcttcaagcccagctgcgtgcccctgatgcgctgcggcggctgctgcaacgacgagggcctggagtgcgtgcccaccgaggagagcaacatcaccatgcagatcatgcgcatcaagccccaccagggccagcacatcggcgagatgagcttcctgcagcacaacaagtgcgagtgccgccccaagaaggaccgcgcccgccaggagaacccctgcggcccctgcagcgagcgccgcaagcacctgttcgtgcaggacccccagacctgcaagtgcagctgcaagaacaccgacagccgctgcaagatg

SEQ ID NO: 1602 - DNA, 696 bp, synthetic construct
  misc_feature 1..696: note = source = /note="Description of Artificial Sequence: Synthetic coding sequence"
  source 1..696: mol_type = other DNA
atgaacttcctgctgagctgggtgcactggagcctggccctgctgctgtacctgcaccacgccaagtggagccaggccgcccccatggccgagggcggcggccagaaccaccacgaggtggtgaagttcatggacgtgtaccagcgcagctactgccaccccatcgagaccctggtggacatcttccaggagtaccccgacgagatcgagtacatcttcaagcccagctgcgtgcccctgatgcgctgcggcggctgctgcaacgacgagggcctggagtgcgtgcccaccgaggagagcaacatcaccatgcagatcatgcgcatcaagccccaccagggccagcacatcggcgagatgagcttcctgcagcacaacaagtgcgagtgccgccccaagaaggaccgcgcccgccaggagaagaagagcgtgcgcggcaagggcaagggccagaagcgcaagcgcaagaagagccgctacaagagctggagcgtgtacgtgggcgcccgctgctgcctgatgccctggagcctgcccggcccccacccctgcggcccctgcagcgagcgccgcaagcacctgttcgtgcaggacccccagacctgcaagtgcagctgcaagaacaccgacagccgctgcaaggcccgccagctggagctgaacgagcgcacctgccgctgcgacaagccccgccgc

SEQ ID NO: 1603 - DNA, 573 bp, synthetic construct
  misc_feature 1..573: note = source = /note="Description of Artificial Sequence: Synthetic coding sequence"
  source 1..573: mol_type = other DNA
atgaacttcctgctgagctgggtgcactggagcctggccctgctgctgtacctgcaccacgccaagtggagccaggccgcccccatggccgagggcggcggccagaaccaccacgaggtggtgaagttcatggacgtgtaccagcgcagctactgccaccccatcgagaccctggtggacatcttccaggagtaccccgacgagatcgagtacatcttcaagcccagctgcgtgcccctgatgcgctgcggcggctgctgcaacgacgagggcctggagtgcgtgcccaccgaggagagcaacatcaccatgcagatcatgcgcatcaagccccaccagggccagcacatcggcgagatgagcttcctgcagcacaacaagtgcgagtgccgccccaagaaggaccgcgcccgccaggagaacccctgcggcccctgcagcgagcgccgcaagcacctgttcgtgcaggacccccagacctgcaagtgcagctgcaagaacaccgacagccgctgcaaggcccgccagctggagctgaacgagcgcacctgccgctgcgacaagccccgccgc

SEQ ID NO: 1604 - DNA, 1260 bp, synthetic construct
  misc_feature 1..1260: note = source = /note="Description of Artificial Sequence: Synthetic coding sequence"
  source 1..1260: mol_type = other DNA
atgcacctgctgggcttcttcagcgtggcctgcagcctgctggccgccgccctgctgcccggcccccgcgaggcccccgccgccgccgccgccttcgagagcggcctggacctgagcgacgccgagcccgacgccggcgaggccaccgcctacgccagcaaggacctggaggagcagctgcgcagcgtgagcagcgtggacgagctgatgaccgtgctgtaccccgagtactggaagatgtacaagtgccagctgcgcaagggcggctggcagcacaaccgcgagcaggccaacctgaacagccgcaccgaggagaccatcaagttcgccgccgcccactacaacaccgagatcctgaagagcatcgacaacgagtggcgcaagacccagtgcatgccccgcgaggtgtgcatcgacgtgggcaaggagttcggcgtggccaccaacaccttcttcaagcccccctgcgtgagcgtgtaccgctgcggcggctgctgcaacagcgagggcctgcagtgcatgaacaccagcaccagctacctgagcaagaccctgttcgagatcaccgtgcccctgagccagggccccaagcccgtgaccatcagcttcgccaaccacaccagctgccgctgcatgagcaagctggacgtgtaccgccaggtgcacagcatcatccgccgcagcctgcccgccaccctgccccagtgccaggccgccaacaagacctgccccaccaactacatgtggaacaaccacatctgccgctgcctggcccaggaggacttcatgttcagcagcgacgccggcgacgacagcaccgacggcttccacgacatctgcggccccaacaaggagctggacgaggagacctgccagtgcgtgtgccgcgccggcctgcgccccgccagctgcggcccccacaaggagctggaccgcaacagctgccagtgcgtgtgcaagaacaagctgttccccagccagtgcggcgccaaccgcgagttcgacgagaacacctgccagtgcgtgtgcaagcgcacctgcccccgcaaccagcccctgaaccccggcaagtgcgcctgcgagtgcaccgagagcccccagaagtgcctgctgaagggcaagaagttccaccaccagacctgcagctgctaccgccgcccctgcaccaaccgccagaaggcctgcgagcccggcttcagctacagcgaggaggtgtgccgctgcgtgcccagctactggaagcgcccccagatgatgagc

SEQ ID NO: 1605 - DNA, 507 bp, synthetic construct
  misc_feature 1..507: note = source = /note="Description of Artificial Sequence: Synthetic coding sequence"
  source 1..507: mol_type = other DNA
atggacacccgcaacaaggcccagctgctggtgctgctgaccctgctgagcgtgctgttcagccagaccagcgcctggcccctgtaccgcgcccccagcgccctgcgcctgggcgaccgcatccccttcgagggcgccaacgagcccgaccaggtgagcctgaaggaggacatcgacatgctgcagaacgccctggccgagaacgacaccccctactacgacgtgagccgcaacgcccgccacgccgacggcgtgttcaccagcgacttcagcaagctgctgggccagctgagcgccaagaagtacctggagagcctgatgggcaagcgcgtgagcaacatcagcgaggaccccgtgcccgtgaagcgccacagcgacgccgtgttcaccgacaactacacccgcctgcgcaagcagatggccgtgaagaagtacctgaacagcatcctgaacggcaagcgcagcagcgagggcgagagccccgacttccccgaggagctggagaag

SEQ ID NO: 1606 - DNA, 510 bp, synthetic construct
  misc_feature 1..510: note = source = /note="Description of Artificial Sequence: Synthetic coding sequence"
  source 1..510: mol_type = other DNA
atggacacccgcaacaaggcccagctgctggtgctgctgaccctgctgagcgtgctgttcagccagaccagcgcctggcccctgtaccgcgcccccagcgccctgcgcctgggcgaccgcatccccttcgagggcgccaacgagcccgaccaggtgagcctgaaggaggacatcgacatgctgcagaacgccctggccgagaacgacaccccctactacgacgtgagccgcaacgcccgccacgccgacggcgtgttcaccagcgacttcagcaagctgctgggccagctgagcgccaagaagtacctggagagcctgatgggcaagcgcgtgagcagcaacatcagcgaggaccccgtgcccgtgaagcgccacagcgacgccgtgttcaccgacaactacacccgcctgcgcaagcagatggccgtgaagaagtacctgaacagcatcctgaacggcaagcgcagcagcgagggcgagagccccgacttccccgaggagctggagaag

SEQ ID NO: 1607 - DNA, 354 bp, synthetic construct
  misc_feature 1..354: note = source = /note="Description of Artificial Sequence: Synthetic coding sequence"
  source 1..354: mol_type = other DNA
gtgagcctgaaggaggacatcgacatgctgcagaacgccctggccgagaacgacaccccctactacgacgtgagccgcaacgcccgccacgccgacggcgtgttcaccagcgacttcagcaagctgctgggccagctgagcgccaagaagtacctggagagcctgatgggcaagcgcgtgagcagcaacatcagcgaggaccccgtgcccgtgaagcgccacagcgacgccgtgttcaccgacaactacacccgcctgcgcaagcagatggccgtgaagaagtacctgaacagcatcctgaacggcaagcgcagcgagggcgagagccccgacttccccgaggagctggagaag

SEQ ID NO: 1608 - DNA, 8439 bp, synthetic construct
  misc_feature 1..8439: note = source = /note="Description of Artificial Sequence: Synthetic coding sequence"
  source 1..8439: mol_type = other DNA
atgatccccgcccgcttcgccggcgtgctgctggccctggccctgatcctgcccggcaccctgtgcgccgagggcacccgcggccgcagcagcaccgcccgctgcagcctgttcggcagcgacttcgtgaacaccttcgacggcagcatgtacagcttcgccggctactgcagctacctgctggccggcggctgccagaagcgcagcttcagcatcatcggcgacttccagaacggcaagcgcgtgagcctgagcgtgtacctgggcgagttcttcgacatccacctgttcgtgaacggcaccgtgacccagggcgaccagcgcgtgagcatgccctacgccagcaagggcctgtacctggagaccgaggccggctactacaagctgagcggcgaggcctacggcttcgtggcccgcatcgacggcagcggcaacttccaggtgctgctgagcgaccgctacttcaacaagacctgcggcctgtgcggcaacttcaacatcttcgccgaggacgacttcatgacccaggagggcaccctgaccagcgacccctacgacttcgccaacagctgggccctgagcagcggcgagcagtggtgcgagcgcgccagcccccccagcagcagctgcaacatcagcagcggcgagatgcagaagggcctgtgggagcagtgccagctgctgaagagcaccagcgtgttcgcccgctgccaccccctggtggaccccgagcccttcgtggccctgtgcgagaagaccctgtgcgagtgcgccggcggcctggagtgcgcctgccccgccctgctggagtacgcccgcacctgcgcccaggagggcatggtgctgtacggctggaccgaccacagcgcctgcagccccgtgtgccccgccggcatggagtaccgccagtgcgtgagcccctgcgcccgcacctgccagagcctgcacatcaacgagatgtgccaggagcgctgcgtggacggctgcagctgccccgagggccagctgctggacgagggcctgtgcgtggagagcaccgagtgcccctgcgtgcacagcggcaagcgctacccccccggcaccagcctgagccgcgactgcaacacctgcatctgccgcaacagccagtggatctgcagcaacgaggagtgccccggcgagtgcctggtgaccggccagagccacttcaagagcttcgacaaccgctacttcaccttcagcggcatctgccagtacctgctggcccgcgactgccaggaccacagcttcagcatcgtgatcgagaccgtgcagtgcgccgacgaccgcgacgccgtgtgcacccgcagcgtgaccgtgcgcctgcccggcctgcacaacagcctggtgaagctgaagcacggcgccggcgtggccatggacggccaggacgtgcagctgcccctgctgaagggcgacctgcgcatccagcacaccgtgaccgccagcgtgcgcctgagctacggcgaggacctgcagatggactgggacggccgcggccgcctgctggtgaagctgagccccgtgtacgccggcaagacctgcggcctgtgcggcaactacaacggcaaccagggcgacgacttcctgacccccagcggcctggccgagccccgcgtggaggacttcggcaacgcctggaagctgcacggcgactgccaggacctgcagaagcagcacagcgacccctgcgccctgaacccccgcatgacccgcttcagcgaggaggcctgcgccgtgctgaccagccccaccttcgaggcctgccaccgcgccgtgagccccctgccctacctgcgcaactgccgctacgacgtgtgcagctgcagcgacggccgcgagtgcctgtgcggcgccctggccagctacgccgccgcctgcgccggccgcggcgtgcgcgtggcctggcgcgagcccggccgctgcgagctgaactgccccaagggccaggtgtacctgcagtgcggcaccccctgcaacctgacctgccgcagcctgagctaccccgacgaggagtgcaacgaggcctgcctggagggctgcttctgcccccccggcctgtacatggacgagcgcggcgactgcgtgcccaaggcccagtgcccctgctactacgacggcgagatcttccagcccgaggacatcttcagcgaccaccacaccatgtgctactgcgaggacggcttcatgcactgcaccatgagcggcgtgcccggcagcctgctgcccgacgccgtgctgagcagccccctgagccaccgcagcaagcgcagcctgagctgccgcccccccatggtgaagctggtgtgccccgccgacaacctgcgcgccgagggcctggagtgcaccaagacctgccagaactacgacctggagtgcatgagcatgggctgcgtgagcggctgcctgtgcccccccggcatggtgcgccacgagaaccgctgcgtggccctggagcgctgcccctgcttccaccagggcaaggagtacgcccccggcgagaccgtgaagatcggctgcaacacctgcgtgtgccaggaccgcaagtggaactgcaccgaccacgtgtgcgacgccacctgcagcaccatcggcatggcccactacctgaccttcgacggcctgaagtacctgttccccggcgagtgccagtacgtgctggtgcaggactactgcggcagcaaccccggcaccttccgcatcctggtgggcaacaagggctgcagccaccccagcgtgaagtgcaagaagcgcgtgaccatcctggtggagggcggcgagatcgagctgttcgacggcgaggtgaacgtgaagcgccccatgaaggacgagacccacttcgaggtggtggagagcggccgctacatcatcctgctgctgggcaaggccctgagcgtggtgtgggaccgccacctgagcatcagcgtggtgctgaagcagacctaccaggagaaggtgtgcggcctgtgcggcaacttcgacggcatccagaacaacgacctgaccagcagcaacctgcaggtggaggaggaccccgtggacttcggcaacagctggaaggtgagcagccagtgcgccgacacccgcaaggtgcccctggacagcagccccgccacctgccacaacaacatcatgaagcagaccatggtggacagcagctgccgcatcctgaccagcgacgtgttccaggactgcaacaagctggtggaccccgagccctacctggacgtgtgcatctacgacacctgcagctgcgagagcatcggcgactgcgcctgcttctgcgacaccatcgccgcctacgcccacgtgtgcgcccagcacggcaaggtggtgacctggcgcaccgccaccctgtgcccccagagctgcgaggagcgcaacctgcgcgagaacggctacgagtgcgagtggcgctacaacagctgcgcccccgcctgccaggtgacctgccagcaccccgagcccctggcctgccccgtgcagtgcgtggagggctgccacgcccactgcccccccggcaagatcctggacgagctgctgcagacctgcgtggaccccgaggactgccccgtgtgcgaggtggccggccgccgcttcgccagcggcaagaaggtgaccctgaaccccagcgaccccgagcactgccagatctgccactgcgacgtggtgaacctgacctgcgaggcctgccaggagcccggcggcctggtggtgccccccaccgacgcccccgtgagccccaccaccctgtacgtggaggacatcagcgagccccccctgcacgacttctactgcagccgcctgctggacctggtgttcctgctggacggcagcagccgcctgagcgaggccgagttcgaggtgctgaaggccttcgtggtggacatgatggagcgcctgcgcatcagccagaagtgggtgcgcgtggccgtggtggagtaccacgacggcagccacgcctacatcggcctgaaggaccgcaagcgccccagcgagctgcgccgcatcgccagccaggtgaagtacgccggcagccaggtggccagcaccagcgaggtgctgaagtacaccctgttccagatcttcagcaagatcgaccgccccgaggccagccgcatcaccctgctgctgatggccagccaggagccccagcgcatgagccgcaacttcgtgcgctacgtgcagggcctgaagaagaagaaggtgatcgtgatccccgtgggcatcggcccccacgccaacctgaagcagatccgcctgatcgagaagcaggcccccgagaacaaggccttcgtgctgagcagcgtggacgagctggagcagcagcgcgacgagatcgtgagctacctgtgcgacctggcccccgaggcccccccccccaccctgccccccgacatggcccaggtgaccgtgggccccggcctgctgggcgtgagcaccctgggccccaagcgcaacagcatggtgctggacgtggccttcgtgctggagggcagcgacaagatcggcgaggccgacttcaaccgcagcaaggagttcatggaggaggtgatccagcgcatggacgtgggccaggacagcatccacgtgaccgtgctgcagtacagctacatggtgaccgtggagtaccccttcagcgaggcccagagcaagggcgacatcctgcagcgcgtgcgcgagatccgctaccagggcggcaaccgcaccaacaccggcctggccctgcgctacctgagcgaccacagcttcctggtgagccagggcgaccgcgagcaggcccccaacctggtgtacatggtgaccggcaaccccgccagcgacgagatcaagcgcctgcccggcgacatccaggtggtgcccatcggcgtgggccccaacgccaacgtgcaggagctggagcgcatcggctggcccaacgcccccatcctgatccaggacttcgagaccctgccccgcgaggcccccgacctggtgctgcagcgctgctgcagcggcgagggcctgcagatccccaccctgagccccgcccccgactgcagccagcccctggacgtgatcctgctgctggacggcagcagcagcttccccgccagctacttcgacgagatgaagagcttcgccaaggccttcatcagcaaggccaacatcggcccccgcctgacccaggtgagcgtgctgcagtacggcagcatcaccaccatcgacgtgccctggaacgtggtgcccgagaaggcccacctgctgagcctggtggacgtgatgcagcgcgagggcggccccagccagatcggcgacgccctgggcttcgccgtgcgctacctgaccagcgagatgcacggcgcccgccccggcgccagcaaggccgtggtgatcctggtgaccgacgtgagcgtggacagcgtggacgccgccgccgacgccgcccgcagcaaccgcgtgaccgtgttccccatcggcatcggcgaccgctacgacgccgcccagctgcgcatcctggccggccccgccggcgacagcaacgtggtgaagctgcagcgcatcgaggacctgcccaccatggtgaccctgggcaacagcttcctgcacaagctgtgcagcggcttcgtgcgcatctgcatggacgaggacggcaacgagaagcgccccggcgacgtgtggaccctgcccgaccagtgccacaccgtgacctgccagcccgacggccagaccctgctgaagagccaccgcgtgaactgcgaccgcggcctgcgccccagctgccccaacagccagagccccgtgaaggtggaggagacctgcggctgccgctggacctgcccctgcgtgtgcaccggcagcagcacccgccacatcgtgaccttcgacggccagaacttcaagctgaccggcagctgcagctacgtgctgttccagaacaaggagcaggacctggaggtgatcctgcacaacggcgcctgcagccccggcgcccgccagggctgcatgaagagcatcgaggtgaagcacagcgccctgagcgtggagctgcacagcgacatggaggtgaccgtgaacggccgcctggtgagcgtgccctacgtgggcggcaacatggaggtgaacgtgtacggcgccatcatgcacgaggtgcgcttcaaccacctgggccacatcttcaccttcaccccccagaacaacgagttccagctgcagctgagccccaagaccttcgccagcaagacctacggcctgtgcggcatctgcgacgagaacggcgccaacgacttcatgctgcgcgacggcaccgtgaccaccgactggaagaccctggtgcaggagtggaccgtgcagcgccccggccagacctgccagcccatcctggaggagcagtgcctggtgcccgacagcagccactgccaggtgctgctgctgcccctgttcgccgagtgccacaaggtgctggcccccgccaccttctacgccatctgccagcaggacagctgccaccaggagcaggtgtgcgaggtgatcgccagctacgcccacctgtgccgcaccaacggcgtgtgcgtggactggcgcacccccgacttctgcgccatgagctgcccccccagcctggtgtacaaccactgcgagcacggctgcccccgccactgcgacggcaacgtgagcagctgcggcgaccaccccagcgagggctgcttctgcccccccgacaaggtgatgctggagggcagctgcgtgcccgaggaggcctgcacccagtgcatcggcgaggacggcgtgcagcaccagttcctggaggcctgggtgcccgaccaccagccctgccagatctgcacctgcctgagcggccgcaaggtgaactgcaccacccagccctgccccaccgccaaggcccccacctgcggcctgtgcgaggtggcccgcctgcgccagaacgccgaccagtgctgccccgagtacgagtgcgtgtgcgaccccgtgagctgcgacctgccccccgtgccccactgcgagcgcggcctgcagcccaccctgaccaaccccggcgagtgccgccccaacttcacctgcgcctgccgcaaggaggagtgcaagcgcgtgagcccccccagctgccccccccaccgcctgcccaccctgcgcaagacccagtgctgcgacgagtacgagtgcgcctgcaactgcgtgaacagcaccgtgagctgccccctgggctacctggccagcaccgccaccaacgactgcggctgcaccaccaccacctgcctgcccgacaaggtgtgcgtgcaccgcagcaccatctaccccgtgggccagttctgggaggagggctgcgacgtgtgcacctgcaccgacatggaggacgccgtgatgggcctgcgcgtggcccagtgcagccagaagccctgcgaggacagctgccgcagcggcttcacctacgtgctgcacgagggcgagtgctgcggccgctgcctgcccagcgcctgcgaggtggtgaccggcagcccccgcggcgacagccagagcagctggaagagcgtgggcagccagtgggccagccccgagaacccctgcctgatcaacgagtgcgtgcgcgtgaaggaggaggtgttcatccagcagcgcaacgtgagctgcccccagctggaggtgcccgtgtgccccagcggcttccagctgagctgcaagaccagcgcctgctgccccagctgccgctgcgagcgcatggaggcctgcatgctgaacggcaccgtgatcggccccggcaagaccgtgatgatcgacgtgtgcaccacctgccgctgcatggtgcaggtgggcgtgatcagcggcttcaagctggagtgccgcaagaccacctgcaacccctgccccctgggctacaaggaggagaacaacaccggcgagtgctgcggccgctgcctgcccaccgcctgcaccatccagctgcgcggcggccagatcatgaccctgaagcgcgacgagaccctgcaggacggctgcgacacccacttctgcaaggtgaacgagcgcggcgagtacttctgggagaagcgcgtgaccggctgcccccccttcgacgagcacaagtgcctggccgagggcggcaagatcatgaagatccccggcacctgctgcgacacctgcgaggagcccgagtgcaacgacatcaccgcccgcctgcagtacgtgaaggtgggcagctgcaagagcgaggtggaggtggacatccactactgccagggcaagtgcgccagcaaggccatgtacagcatcgacatcaacgacgtgcaggaccagtgcagctgctgcagccccacccgcaccgagcccatgcaggtggccctgcactgcaccaacggcagcgtggtgtaccacgaggtgctgaacgccatggagtgcaagtgcagcccccgcaagtgcagcaag

SEQ ID NO: 1609 - RNA, 581 nt, synthetic construct
  misc_feature 1..581: note = source = /note="Description of Artificial Sequence: Synthetic coding sequence"
  source 1..581: mol_type = other RNA
gggaaataagagagaaaagaagagtaagaagaaatataagagccaccatgtcgaccgagggtgggggaaggcgctgtcaggcgcaggtatcaagacgaatcagcttcagcgcgtcgcaccggctttactcaaagttcttgtcggatgaagagaacctcaagctgtttgggaagtgcaacaatcctaatggacatggacacaattacaaagtcgtggtcacggtgcacggcgaaatcgaccccgccacgggtatggtcatgaatttggccgacttgaagaagtacatggaagaggctattatgcaacccctggaccataagaacctcgatatggatgtcccgtattttgcggatgtagtctccactacagagaacgtggcagtatacatttgggacaaccttcagaaagtgctcccagtgggggtgctgtataaagtaaaagtctatgagacagacaataacatcgtggtgtacaaaggagaatgataagctgccttctgcggggcttgccttctggccatgcccttcttctctcccttgcacctgtacctcttggtctttgaataaagcctgagtaggaag

SEQ ID NO: 1610 - RNA, 4427 nt, synthetic construct
  misc_feature 1..4427: note = source = /note="Description of Artificial Sequence: Synthetic coding sequence"
  source 1..4427: mol_type = other RNA
gggaaataagagagaaaagaagagtaagaagaaatataagagccaccatgcaccaacgacatccacgagcacgatgccctcccctgtgcgtagcgggaatcttggcatgcgggtttcttctcggttgctggggaccaagccacttccagcaatcctgcctccaagcgcttgagccccaggcggtgtcgtcctacctgtcgcctggggcacccctcaagggtagacccccttcccccggtttccagaggcaacgacagagacagcggcgggccgcgggtggcatcttgcatctggaactgctggtcgctgtaggaccggacgtattccaggcgcatcaggaggacacagagcgatatgtcctgactaacttgaacatcggtgcagaattgttgagggacccttcgttgggggcgcagtttcgggtacatcttgtaaagatggtaatcctgacagaaccggaaggagcgcccaatatcacggcaaatctgacatcgagcttgttgtcggtctgcggttggagccaaaccatcaaccccgaggacgacacagatcccggccacgcggacctggtcctctatatcacacgattcgaccttgagctgcccgatggtaaccgacaggtccgaggagtcacacagttgggtggagcatgctcccctacttggtcatgcttgatcacggaggacaccgggtttgaccttggggtgacgatcgcacatgagattggccattcgttcggattggaacacgacggggcccccggaagcgggtgcggaccgtcgggacacgtgatggcgagcgatggggccgccccgcgagcaggactcgcctggagcccgtgtagccgccgacagctcctctcccttctttcggcgggacgcgcgaggtgcgtgtgggatccccctcgaccgcagcccgggagcgcgggtcatccgccagacgcacagcccggtctttactatagcgcaaacgagcagtgcagggtcgccttcggacctaaagccgtagcgtgtacattcgcgcgagaacatctcgacatgtgccaggcactcagctgccataccgacccgctggaccagtcatcctgttcaaggcttttggtccccctcctggatggcacagagtgtggggtggaaaagtggtgttcaaaaggtcggtgtagatcacttgtcgaattgacgccaattgccgccgtccacgggaggtggtcatcatggggccctcgcagcccgtgctcgcgatcgtgtggagggggcgtcgtgactcggaggagacagtgcaacaaccccagaccggccttcggcggtagagcctgcgtcggggcggaccttcaagcggagatgtgtaacacgcaggcctgtgaaaagactcagttggagtttatgagccaacagtgtgccagaaccgatgggcaacccctgcggtcatcgccaggaggggcgtcattttaccactggggagccgcagtgcctcactcacaaggggacgcgctgtgccggcatatgtgcagggccattggggaatcattcatcatgaaacggggtgactcattccttgacggaacacgatgtatgcctagcgggcctagagaggacggaaccctttccttgtgtgtgtcgggatcatgtagaacatttgggtgcgatggtcggatggacagccaacaggtgtgggacagatgccaagtgtgcgggggtgacaactcgacgtgctcgccacgaaaaggctcgttcaccgccggtcgagcccgggagtatgtgacattcctcacggtaacgcccaatctgacgagcgtctacatcgccaaccacagacccctctttacccaccttgctgtgcggatcggagggcgctacgtcgtagcggggaagatgtcgatctcgccaaatactacatacccgtcgcttctcgaagatgggcgcgtcgagtacagggtggcgttgaccgaggaccggctcccgcgcttggaagagattaggatttggggacctcttcaagaggatgcggatatccaagtatacaggcgctacggagaggagtacggaaacctcacaagaccggatattacgtttacgtattttcagccgaagcctcgacaggcgtgggtctgggcagctgtgcgcggtccttgttcagtctcatgtggtgcggggttgaggtgggtcaactactcgtgcctcgaccaggcgcgaaaggaactcgtggaaacagtacagtgtcaggggtcccagcagccgccagcatggcctgaagcgtgtgtgttggaaccttgtccgccctattgggcggtgggagacttcgggccctgttcggcttcgtgcggtggtggactgagagaacgcccggtgagatgcgtcgaggcccagggctcacttcttaagactcttcctccagcaagatgtagagcgggagcgcagcagcccgccgtggcacttgaaacttgcaacccgcaaccatgcccagctaggtgggaggtgtcggaaccgtcgtcgtgcacgtcagccggaggtgcagggttggcgcttgagaatgagacttgcgtaccgggagccgacgggcttgaggcacctgtcactgagggaccgggttcggtcgacgaaaaactccccgcccctgagccttgcgtaggcatgtcgtgcccgccaggatggggacacctggacgcgaccagcgcaggcgaaaaagctccgtcgccgtggggttccattcgcaccggagctcaagcagcacacgtctggaccccggcagcggggtcatgctccgtatcgtgcggcagagggctgatggaactcagattcttgtgtatggattcggcgctgcgggtgcctgtgcaagaagagctttgtgggctcgcctcaaagcctggtagcagacgcgaagtgtgtcaagcggtgccgtgcccagcaagatggcagtacaaactggcagcctgctcggtatcgtgtggtagaggagtcgtccggcgaattctctattgcgcacgggcgcacggagaggacgatggggaggagatccttttggatactcagtgccagggattgcccaggcccgaaccccaagaagcgtgttcgctcgaaccctgtccgccacggtggaaagtaatgtcgctcgggccgtgctcagcgtcgtgtgggttgggaactgcacggcggagcgtggcgtgtgtccagttggatcaagggcaggatgtggaggtggacgaggcagcgtgtgcggcacttgtacggcccgaagcgtcggtgccgtgcttgatcgcagattgcacataccgctggcatgtcggcacgtggatggagtgttccgtgtcatgcggggacggaatccagcggcgacgcgatacgtgtcttgggccgcaggcgcaggcaccggtcccggctgacttctgccagcacctcccgaagcctgtcacggtgcgcgggtgctgggcgggaccctgcgtggggcagggaactccctcactcgtgccgcatgaggaagcagctgctccgggacggactactgcgaccccggcaggggcatcattggaatggtcacaggccagagggttgttgttctcgcctgcaccacaaccgcgcagactcctccctggaccacaagagaacagcgtccagtcaagcgcatgtggacgacagcaccttgaaccgactggaacgatcgacatgaggggtccggggcaggcagactgcgccgtggccatcggtagaccgttgggtgaggtggtaacgcttagggtcctcgaatcatcgcttaattgctcagccggtgacatgctcctgttgtgggggaggctgacctggcggaagatgtgtcgcaagctcctcgatatgacgttttcgtccaaaacgaatacacttgtggtgagacagagatgtggtcgaccgggtggcggtgtgctgctcagatatggctcgcagttggcacccgaaacattctaccgagaatgtgacatgcaactgtttgggccatggggagagattgtcagcccgtcgctctcaccggcaacttcgaacgccggaggctgtcgactcttcatcaatgtggcccctcatgcccgcattgcaatccacgctctcgcgacgaacatgggggcaggaactgaaggggcgaatgcgtcctatatcttgatcagggatacacactcattgcgaacaacggcgtttcatggtcagcaagtactgtattgggaatcggagtcctcgcaagcggagatggagttttcggaaggctttcttaaagcccaggcctcgcttaggggccagtattggacccttcagagctgggtccctgaaatgcaagacccccagtcgtggaaagggaaagagggaacgtgataagctgccttctgcggggcttgccttctggccatgcccttcttctctcccttgcacctgtacctcttggtctttgaataaagcctgagtaggaag

SEQ ID NO: 1611 - RNA, 4427 nt, synthetic construct; identical to SEQ ID NO: 1610
  misc_feature 1..4427: note = source = /note="Description of Artificial Sequence: Synthetic coding sequence"
  source 1..4427: mol_type = other RNA

SEQ ID NO: 1612 - RNA, 1487 nt, synthetic construct
  misc_feature 1..1487: note = source = /note="Description of Artificial Sequence: Synthetic coding sequence"
  source 1..1487: mol_type = other RNA
gggaaataagagagaaaagaagagtaagaagaaatataagagccaccatgtccgcgtcaaaaatcccactctttaagatgaaagatctcatcctcattctctgccttttggagatgtcctttgcagtgcctttcttcccccagcagtccggcacccctggtatggccagcctttcgctggaaacaatgaggcagctcggcagccttcagcgactgaacacattgtcgcagtattcccgctacggtttcgggaagtcgttcaatagcttgtggatgcatgggttgcttcccccacactcgtcactgccctggatgaggccaagagaacacgagacacagcaatatgagtactcgcttccagtgcatcctccccctcttcccagccagccttcgctcaagccacagcagcctgggttgaagcctttcttgcagtccgcagccgcgacaacgaatcaggccactgctctgaaagaagccttgcagccgcctattcaccttgggcatctcccgctccaagaaggcgagctgccacttgtacagcagcaggtcgccccttcggacaagcccccaaaaccggaactccccggtgtcgattttgctgaccctcaagggccctcattgcctggaatggactttcccgatccccaaggcccgtcgcttccgggtttggatttcgcagacccgcaaggatcgacaatctttcaaattgcgcggcttatctcgcacgggcctatgccgcagaataagcagtcacccctgtaccccggaatgctttatgtcccctttggggccaatcagctcaatgcccctgcccgattgggcatcatgtcgtcagaagaggtagcaggtgggcgcgaggatccgatggcgtacggggccatgttccccggattcggtggtatgagacccgggttcgaggggatgcctcacaacccggcgatgggtggcgattttaccttggagtttgattcgcccgtggcggcgactaaaggaccggagaacgaagagggtggtgcgcagggatccccgatgccggaagccaatccggataacctcgagaatccggctttcctgacggagctcgagccagcgccgcatgccgggttgctggcgctccctaaagatgacatccctggccttccccggtcccctagcggaaagatgaagggtctgccgtccgtgacaccggctgccgcggaccccctgatgacgccagaactcgccgacgtctatcgcacctacgatgcagacatgacgacgtcggtggacttccaagaagaagcgacaatggacacgacaatggcgccgaactcgctgcagacctcgatgccgggaaacaaggcgcaagagcccgagatgatgcacgacgcgtggcactttcaagagccataatgagctgccttctgcggggcttgccttctggccatgcccttcttctctcccttgcacctgtacctcttggtctttgaataaagcctgagtaggaag

SEQ ID NO: 1613 - RNA, 764 nt, synthetic construct
  misc_feature 1..764: note = source = /note="Description of Artificial Sequence: Synthetic coding sequence"
  source 1..764: mol_type = other RNA
gggaaataagagagaaaagaagagtaagaagaaatataagagccaccatgggaacatggattctctttgcgtgcttggtgggagcggccttcgcgatgcccctgccgcctcatcccggacatccggggtatatcaacttttcgtacgagaactcccactcccaagccatcaatgtagatcgaatcgcgctcgtgcttacgcctttgaagtggtatcaatcaatgattcggccaccctatagcagctacgggtacgaaccgatgggtggctggctccaccatcagattatccccgtagtgtcgcagcagcacccgctcacgcataccctgcagtcgcaccaccacatccctgtcgtgccagcccagcaaccgagagtccgccagcaggcattgatgcccgtccccggtcagcagtcaatgactccgacgcagcatcatcagcccaatctcccgcttcctgctcagcagcccttccagcctcagcccgtgcaaccgcagccacaccagcccatgcagccccagccgcctgtccaaccaatgcagcctctgcttccacaaccgccactgccgccgatgttccccttgaggcctcttcccccaatcctgccggatcttcacctcgaggcgtggcccgcaaccgacaaaacaaagcaagaagaggtagactaatgagctgccttctgcggggcttgccttctggccatgcccttcttctctcccttgcacctgtacctcttggtctttgaataaagcctgagtaggaag

SEQ ID NO: 1614 - RNA, 947 nt, synthetic construct
  misc_feature 1..947: note = source = /note="Description of Artificial Sequence: Synthetic coding sequence"
  source 1..947: mol_type = other RNA
gggaaataagagagaaaagaagagtaagaagaaatataagagccaccatgaaagcagcggtgcttacgctcgctgtgttgttcctgacaggctcgcaagcgcggcatttttggcagcaggacgaaccgcctcagtcgccatgggaccgcgtgaaagacttggcgaccgtctacgtggacgtcttgaaggattcgggtcgggattacgtatcacagttcgaagggtcggcactgggaaagcagttgaatctcaaactgttggataactgggacagcgtgacctcgactttttcaaaactgagggagcagttgggacccgtcacccaagagttttgggacaacctcgagaaggagacagaggggttgcgacaggagatgagcaaggatttggaagaagtaaaggcgaaggtacagccttatcttgatgacttccaaaagaaatggcaggaagaaatggaactctatcgccagaaggtagagccccttcgggcggaacttcaagagggagcgaggcaaaaactccacgaactccaagagaaactttccccgcttggggaagagatgcgcgatagagccagggcgcatgtcgacgccttgcgaacgcacctggcgccctactccgatgagttgagacagtgcctggccgccaggctcgaagcgctgaaagaaaatggtggtgcccggctggcagagtatcacgccaaggcgacagagcacctcagcacgctttccgagaaggctaaaccggcacttgaggaccttagacagggactgcttcccgtcttggaatcgttcaaggtgtcatttctgtcagccctcgaggaatacacgaagaagctcaacactcagtgataagctgccttctgcggggcttgccttctggccatgcccttcttctctcccttgcacctgtacctcttggtctttgaataaagcctgagtaggaag

SEQ ID NO: 1615 - RNA, 947 nt, synthetic construct
  misc_feature 1..947: note = source = /note="Description of Artificial Sequence: Synthetic coding sequence"
  source 1..947: mol_type = other RNA
gggaaataagagagaaaagaagagtaagaagaaatataagagccaccatgaaggcggcagtcttgacgctcgcggtactctttctgacagggtcacaggccaggcacttctggcagcaggacgaaccgcctcagtcgccctgggaccgagtgaaagatttggcgacggtatacgtcgatgtgttgaaggattccggtagagattatgtgtcacagtttgagggatcagcccttgggaaacaactcaatctcaaactcctcgacaactgggacagcgtcacatccacgttctcgaagctgcgcgagcaacttggacccgtaacccaagagttctgggataatcttgaaaaagagacagaggggttgcgccaggaaatgagcaaggacctcgaggaagtgaaggcgaaagtgcagccttatcttgacgacttccaaaagaagtggcaggaagaaatggaattgtacagacagaaggtcgagccactcagggcggagcttcaagaaggcgctcgacagaagttgcacgagctgcaagagaagctcagcccgttgggagaggaaatgcgggactgcgcacgcgcccacgtcgacgcgttgcggactcatctggccccatactcggatgaactcaggcagcggcttgctgcaagacttgaggcactgaaggaaaacggtggggctcggttggcggagtatcatgcgaaagccacggagcacctttccaccctttcggagaaagcaaaacccgcccttgaagatctgcgccagggattgctgccggtacttgagtcgtttaaggtgtcgtttttgtccgcgctggaagagtacactaagaaactgaacacacagtgataagctgccttctgcggggcttgccttctggccatgcccttcttctctcccttgcacctgtacctcttggtctttgaataaagcctgagtaggaag

SEQ ID NO: 1616 - RNA, 947 nt, synthetic construct
  misc_feature 1..947: note = source = /note="Description of Artificial Sequence: Synthetic coding sequence"
  source 1..947: mol_type = other RNA
gggaaataagagagaaaagaagagtaagaagaaatataagagccaccatgaaagcggcggtcctgacgctcgccgtcctgtttttgacgggaagccaagcgcggcacttttggcaacaggacgaaccccctcagtccccctgggatagagtgaaggatctcgcgactgtgtatgtcgatgtgcttaaggattcgggaagagactatgtgtcacagttcgaaggctcggcactggggaaacagcttaatctgaagttgttggacaattgggattcggtcacgtccacgttctcaaaactccgcgaacagcttggtccggtaacccaagagttctgggacaacttggagaaggagacagaagggctgcgacaggagatgagcaaagaccttgaggaagtcaaagccaaggtacagccgtacttggacgacttccaaaagaagtggcaggaagaaatggaactctaccggcagaaagtggagccgctcagagcggagctgcaagaaggggcacggcagaagctccacgaacttcaagagaaattgtccccactgggagaagagatgcgggaccgcgcacgagcccacgtggatgcgttgaggacccatcttgcaccttactccgacgagctgaggcagcgattggcagccaggcttgaagcgcttaaggagaacggtggagcccgcctggctgaataccatgcaaaggcgactgaacacctctcgacattgtcggagaaggccaaacccgcacttgaggatttgagacaggggctcctgcccgtgctggaaagctttaaggtatcatttctttcggcgctcgaggagtacaccaaaaagctcaacacacagtgataagctgccttctgcggggcttgccttctggccatgcccttcttctctcccttgcacctgtacctcttggtctttgaataaagcctgagtaggaag

SEQ ID NO: 1617 - RNA, 941 nt, synthetic construct
  misc_feature 1..941: note = source = /note="Description of Artificial Sequence: Synthetic coding sequence"
  source 1..941: mol_type = other RNA
gggaaataagagagaaaagaagagtaagaagaaatataagagccaccatgaagaaagaggtctgctccgtggcgtttttgaaggcagtgtttgccgagtttctggcgacattgattttcgtgttcttcggcctgggatcggctttgaaatggccctcggcgctgcccacgatccttcaaatcgcgcttgcgtttgggctcgcgatcgggacactcgcgcaggcacttggccctgtgtcgggtgggcatatcaacccagcgatcactttggcccttttggtcggaaatcagatcagcctgcttcgggcattcttttacgtcgcagcccagctcgtcggtgcgattgcgggagcggggatcttgtatggtgtggcaccgttgaacgcaagagggaacctggccgtgaatgccctcaataacaatacaacgcaaggtcaggccatggtagtagagttgatcctcactttccagcttgcactctgcatttttgcgagcacggatagcaggcgcacgagccccgtcggatcgcctgcgttgtcaattggactctcagtcactctggggcacctggtgggaatctacttcacggggtgttccatgaatccggccagatcgttcggaccggcggtagtgatgaaccgcttttcccctgcccactgggtattctgggtgggtcccattgtgggggctgtccttgctgccatcttgtatttctacctgctctttccgaactcactctcgttgtcggagcgcgtagccattatcaagggaacgtatgaacccgacgaggactgggaagagcagagggaagagcggaagaaaaccatggaactcacaacccggtgataagctgccttctgcggggcttgccttctggccatgcccttcttctctcccttgcacctgtacctcttggtctttgaataaagcctgagtaggaag

SEQ ID NO: 1618 - RNA, 1745 nt, synthetic construct
  misc_feature 1..1745: note = source = /note="Description of Artificial Sequence: Synthetic coding sequence"
  source 1..1745: mol_type = other RNA
gggaaataagagagaaaagaagagtaagaagaaatataagagccaccatggggccaagaggagcggcttcactcccgcgaggaccaggacctaggcgattgcttctccccgtggtccttcctctgctgcttcttttgcttctcgcgccacctggttcgggtgcgggagcctcaagaccgccccacctcgtatttctgctcgccgatgacctcgggtggaatgacgtagggttccacggatcgcgaatccgaacgccgcatcttgatgcattggcagcaggtggagtacttttggataactactacacgcagccattgtgtacaccctcgaggagccagttgctgactggccgctaccagatccggaccggacttcagcaccagatcatctggccctgtcagccgtcatgtgtcccccttgatgagaagcttttgcctcagctgcttaaagaagcggggtatacgacacatatggtggggaagtggcacctcggaatgtacagaaaagaatgccttcccaccagaaggggattcgatacctacttcggttatctgctggggtcagaggactactactcccacgaacgctgcacgcttatcgatgcattgaacgtaacccgctgcgccctcgactttcgggatggagaggaagtcgccacagggtataagaacatgtattcgacaaacatcttcacgaaaagggccattgcgctgattacgaatcatcccccggaaaagcccctctttctctacttggcgctgcagagcgtgcatgagcctctgcaagtgcccgaggagtatcttaaaccctacgatttcatccaagacaagaaccggcaccactacgcgggaatggtgtcgttgatggatgaggcggtcggaaatgtgacagcggctttgaagtcgagcggactctggaacaatacggtgttcatcttttcaactgataatgggggacagacgttggcgggtggtaataactggccccttaggggaagaaaatggtcgctgtgggaaggtggagtgaggggtgtcgggtttgtcgcgagccccttgctgaaacaaaagggggtcaagaaccgagaattgattcatatcagcgactggctgccgaccctcgtcaagctggcacgcgggcacacaaacggtacgaagccattggacgggtttgacgtgtggaaaacaatctccgagggctcgccttcgccgaggattgagttgctccacaacatcgaccccaactttgtagacagctcaccgtgcccccgaaattcgatggcgcctgctaaagatgatagcagcctgccagagtactccgcgttcaacacttcagtgcatgcagcaattcgccacggaaattggaagcttctgactgggtatcctggttgtggctattggttcccaccgccgtcgcagtataatgtatcggagattccgtcctcggatccgccgactaaaacattgtggttgttcgacatcgaccgcgaccccgaagagcggcacgacctttcgagggaatatccccatattgtgacgaagttgcttagccggttgcagttctaccataaacacagcgtaccggtgtattttcctgcccaagatcctcgctgcgaccccaaggccacgggagtctggggtccctggatgtgataagctgccttctgcggggcttgccttctggccatgcccttcttctctcccttgcacctgtacctcttggtctttgaataaagcctgagtaggaag

SEQ ID NO: 1619 - RNA, 4541 nt, synthetic construct
  misc_feature 1..4541: note = source = /note="Description of Artificial Sequence: Synthetic coding sequence"
  source 1..4541: mol_type = other RNA
gggaaataagagagaaaagaagagtaagaagaaatataagagccaccatgccggagcaggagaggcagattacagcgagagagggcgcatcacggaagatcctgtcgaaactctcgctgcccacccgcgcatgggagcctgcgatgaaaaagtccttcgcgttcgataacgtgggatacgagggtgggctggatggactggggccatcgtcccaagtagcgacgagcacggtaagaatcttgggtatgacgtgccagtcatgtgtaaagtccattgaggaccgcatctcgaacttgaagggaattatctcgatgaaggtatcccttgagcagggatcggcgactgtcaagtatgtcccttcggtggtgtgccttcagcaggtctgtcaccagatcggggacatgggttttgaggcgtccatcgccgaaggaaaagccgcatcctggcccagccgatcccttcccgcacaagaagcggtggtaaagctccgcgtcgaagggatgacgtgtcaatcatgcgtgtcaagcattgaaggcaaagtgcggaaactgcagggtgtggtacgagtgaaagtgtccctgagcaaccaagaggcggtgatcacttatcagccatatctcatccagccagaggatctgcgggatcacgtcaatgatatggggtttgaggcagcgatcaaatcgaaagtagctcccctgtcgctggggcccattgatatcgagcggctgcagtcaacaaaccccaagaggccccttagctcggccaatcagaatttcaataacagcgaaacactcgggcatcaggggtcccatgtagtgacccttcagctccggattgatgggatgcattgcaaaagctgtgtcctcaacatcgaggagaatattggtcagttgcttggggtgcagtcgatccaagtgtcgcttgaaaacaagaccgcgcaggtgaagtatgatccttcatgcacatcaccggtggcgctgcagagggcgatcgaagcgttgcctccgggaaatttcaaagtcagcctgccggatggggcggaaggatcgggtacggaccaccggtcaagctccagccattcacccggctcgcccccaagaaaccaggtccaggggacgtgctccacgactctcatcgcaatcgccgggatgacatgtgcgtcatgcgtccacagcattgagggtatgatctcacagcttgagggagtgcagcagatcagcgtcagcctcgcggagggaacggccacagtcctctataaccctagcgtcatctcgcccgaagagctgagagcggctattgaggacatggggttcgaggcgtccgtggtgtcggagagctgttcgacgaacccactggggaatcactcggcgggaaattcgatggtccaaacgacagatggaacgcccacgtccgtgcaagaggtggcaccacatacgggaagattgcccgcgaatcacgcgcctgacattcttgcgaagtcgccccagtcaactcgcgccgtggcaccccaaaagtgcttcttgcagatcaagggaatgacgtgcgcaagctgcgtgagcaacattgagaggaaccttcaaaaagaagccggggtcctctcagtcctcgtggcgttgatggctggaaaggcggaaatcaaatacgacccagaggtaatccagcctcttgagatcgcgcagtttatccaagacctcggattcgaagctgcagtgatggaagattacgcggggtcagatgggaacatcgagctcactatcacgggcatgacctgcgcttcgtgtgtccacaatatcgagtccaagctgactaggacgaacggaattacatatgcgtcagtagctctggcgacgtccaaagccctcgtcaaattcgatcccgagatcattggaccgcgggacatcattaagattattgaagaaatcggatttcacgctagcctcgctcagagaaaccccaacgcccaccatttggaccacaagatggagattaagcagtggaagaaatcattcctttgttccctggtgtttggaatcccggtcatggcgcttatgatctacatgctcatcccttcaaacgaacctcaccaatcgatggtgctggatcacaacattattccggggttgtcaatcctcaacctcatcttctttatcctttgcacttttgtgcagctccttggcggatggtatttctatgtgcaggcgtacaaatccctgcgacacagatcagcaaatatggatgtactgattgtcctggcgacaagcattgcgtacgtatacagcttggtcattttggtagtggccgtagccgaaaaggcagaaagatcaccggtcactttcttcgacacaccgcctatgctttttgtgttcatcgctctcggacgctggctggaacacctggcaaagagcaagacatcggaagcattggccaaattgatgtcgctccaggccaccgaggcaactgtggtgacgttgggggaagataacctgattattcgggaagagcaggtacccatggaactcgtgcagagaggagatattgtgaaggtcgtaccgggtgggaagtttcccgtagacggaaaagtgttggaagggaataccatggcggatgagagcttgattacgggagaagcgatgcctgtgacgaagaagcctggatcgacagtcattgcgggatcgatcaacgcacatggttcggtacttatcaaagcaacgcacgtgggtaatgacactactctggcccagatcgtaaagctcgtggaagaagcacaaatgagcaaagccccgattcagcaactggccgatcggttcagcggttacttcgtgccctttatcattatcatgtcgacccttacactcgtagtgtggatcgtaattgggttcatcgactttggagtggtccagcggtactttccaaatcctaacaaacatatttcgcaaactgaagtgatcatccgctttgctttccaaacctcaattacagtactctgtatcgcgtgtccatgctcattgggcttggctacgcccacggccgtaatggtagggacgggagtcgcagcgcagaatggaatcctgatcaagggcgggaaaccccttgagatggcacacaaaatcaagacagtcatgttcgacaagacggggacaattactcacggtgtgccccgggtaatgcgcgtgttgttgctcggggacgtggcgacattgccgctgaggaaggtcttggcggtcgtgggcacagcggaagcctcgtcggagcacccgctgggagtggcggtaacgaagtattgcaaagaggaactcggcactgaaacgctgggctactgcacagattttcaagccgtgcccggttgcgggattggctgtaaagtgagcaatgtggaagggattctcgcgcactcagagcgaccactctcggcaccggcttcgcatctcaatgaggccggatccctgccagccgagaaggatgctgtcccgcagaccttttccgtgttgatcggcaaccgggagtggcttaggcgcaacgggttgacgatttcgtcggatgtgtcagacgccatgacagatcatgagatgaagggacagacagcgatcctggtcgcgattgacggagtgttgtgcggtatgattgccatcgccgatgcggtaaaacaggaagcggcgctcgctgtccacacgctccagtcaatgggggtagacgtagtgctgatcaccggggacaaccgaaagaccgctcgcgccatcgccacgcaagtcgggattaacaaggtgttcgccgaggtgctcccctcgcacaaggtagcaaaagtacaagaactgcaaaacaaagggaagaaggtagcgatggtgggggatggtgtgaacgactcgccggcactcgctcaggcggacatgggtgtagccatcggaacaggaactgacgtagctatcgaggcggccgacgtagtcctcattaggaatgacctcttggacgtcgtcgcatcgatccatctttcgaagcgcactgtcaggcgcatcaggattaatttggtgctggccctgatctacaacttggtgggaatccccatcgcagcgggagtgttcatgcccatcggtattgtactgcagccatggatggggtcggccgcaatggcagcgtcaagcgtatcggtagtattgagctccttgcagctcaagtgctacaagaaacctgacttggagcgctacgaggcacaggcgcacggccatatgaagccgcttacggcatcccaagtgtccgtccacattgggatggatgataggtggcgggattcacccagggcaacaccctgggaccaggtgtcatatgtatcgcaggtgtcgctctcgtcccttacatcggataagccctcaaggcacagcgcggctgcggacgacgatggtgataaatggtcactcctgctgaatggacgcgacgaagaacagtacatttgaagcgctgccttctgcggggcttgccttctggccatgcccttcttctctcccttgcacctgtacctcttggtctttgaataaagcctgagtaggaag

SEQ ID NO: 1620 - RNA, 656 nt, synthetic construct
  misc_feature 1..656: note = source = /note="Description of Artificial Sequence: Synthetic coding sequence"
  source 1..656: mol_type = other RNA
gggaaataagagagaaaagaagagtaagaagaaatataagagccaccatgaaaacacaacgggatggacactcgcttggacgctggtcccttgtcttgttgctgctcggcctcgtgatgcctctcgccatcattgcgcaagtgctctcatacaaagaggctgtcttgagagcgatcgatggtatcaaccagagatcgtcagatgccaatctgtatcggttgctggaccttgacccccgaccaacaatggacggggatccggatacccccaagcccgtgagctttaccgtaaaagaaacggtgtgtccgaggactactcagcagtcccccgaggactgcgatttcaagaaggacgggctcgtcaagcggtgtatggggacggtaacgctgaaccaggcgaggggatcattcgatatttcgtgcgacaaggacaacaaacggtttgcacttcttggtgactttttccgcaagtcgaaagagaagatcggaaaagaattcaagaggatcgtccagcgcattaaggactttttgagaaatctcgtgccgcgaacagaaagctaatgagctgccttctgcggggcttgccttctggccatgcccttcttctctcccttgcacctgtacctcttggtctttgaataaagcctgagtaggaag

SEQ ID NO: 1621 - RNA, 3341 nt, synthetic construct
  misc_feature 1..3341: note = source = /note="Description of Artificial Sequence: Synthetic coding sequence"
  source 1..3341: mol_type = other RNA
gggaaataagagagaaaagaagagtaagaagaaatataagagccaccatgaaaatccttattctcgggattttcctgttcttgtgctcgacaccggcatgggccaaagaaaagcactactacattgggattatcgagacaacgtgggattatgcgtcggaccatggggagaaaaagttgatctcggtggacacggaacactcaaacatctacctccaaaatggaccggacagaatcggacggctctacaagaaggcattgtacctccagtacaccgatgaaacttttcgaacaacaattgagaaacctgtctggctgggctttctgggacccatcattaaggctgagactggggataaggtgtatgtccacctcaagaatcttgcgtccaggccgtatactttccatagccatggaatcacatattacaaagaacatgagggggcgatctacccagacaacacgacggactttcagcgggcagacgacaaagtgtacccgggtgaacagtatacttatatgctcctggccacggaggaacagtcaccgggcgagggcgacggaaattgcgtaacgcggatctaccactcccacattgacgcgcctaaagatatcgcgtcgggattgattggtccgctcatcatttgcaaaaaggattccctggacaaagagaaggaaaaacatatcgatcgcgaatttgtggtcatgttcagcgtggtcgatgaaaactttagctggtacttggaggataacatcaagacatactgtagcgagcccgaaaaagtggataaggacaacgaagatttccaagagtccaatagaatgtactcggtgaacggttatacgttcggctccctgccgggactgtccatgtgcgctgaggaccgcgtgaaatggtacttgtttggtatggggaacgaagtggatgtgcacgcggcgttctttcacggccaagcgttgacgaacaaaaactacagaatcgatacgatcaatttgttccccgcaacgttgtttgatgcgtacatggtggcgcagaacccgggagagtggatgctttcgtgtcaaaatctcaatcatcttaaagcagggcttcaagcctttttccaagtgcaagaatgtaataagtcatcatccaaagataacattaggggtaaacacgtacgccactattacattgcggcggaggagatcatctggaattacgcgccgtcagggatcgacattttcacaaaagagaacttgaccgcaccagggtcagattcagcagtgtttttcgagcaggggacaaccagaatcggcggaagctataagaaacttgtgtaccgggagtacacagacgcctcctttacgaataggaaggagagaggtcccgaagaggagcacttggggattcttgggccggtgatttgggcggaagtaggggatactatccgggtcaccttccacaacaagggggcgtatccgctgtcgatcgaacccattggagtgcggttcaataagaataatgagggaacctactattcgcccaactataacccccagtcacgctcggtgcccccttcggcctcccatgtggctcccacggaaacgttcacgtatgaatggactgtacccaaagaagtgggaccaaccaacgcggaccccgtgtgtctggcgaagatgtattactccgcggtggaccctacgaaggacatctttacgggactgattggacctatgaagatttgtaagaagggatcgttgcacgccaacggtaggcagaaggatgtcgacaaggagttctacttatttcctactgtgtttgatgagaatgagtcacttctccttgaggacaatattcggatgttcaccactgcgccagaccaggtagacaaagaagatgaggattttcaagaatcaaataagatgcactcgatgaatggtttcatgtacggaaaccaacccggcctgacaatgtgcaagggggacagcgtagtctggtacttattctcagcaggaaacgaggctgacgtccacgggatctactttagcggaaacacctatttgtggaggggtgaacggagggataccgccaaccttttcccgcagacttccctcacgcttcatatgtggcccgacacagagggaactttcaatgtcgaatgccttacaaccgatcattataccggtggtatgaaacagaagtacacggtaaaccaatgtcggaggcagtcggaagattcgaccttctacttgggggagaggacgtactatatcgcggcagtcgaggtcgaatgggattactcgccccaacgggagtgggaaaaggaactgcaccatctccaagagcagaatgtcagcaatgcgttccttgacaaaggagagttttacatcggatcgaagtataagaaggtcgtatatcgccaatacacggattccacgttccgggtgccggtcgaaaggaaggcagaggaggagcaccttggaatcctcggaccgcagttgcacgcggatgtgggtgacaaggtgaagattatcttcaagaatatggccactcggccctattccattcacgcccacggtgtgcagacagagagctcgacagtcacgccaacacttcccggagagactcttacgtatgtctggaaaattccagaacgcagcggagcaggaacggaggactcagcctgcatcccctgggcctactactcaacggtagaccaagtaaaggacttgtacagcgggctcatcggtcccttgattgtctgtagacgaccgtacttgaaagtctttaacccccgacgcaaacttgaatttgctcttctctttcttgtgttcgacgagaacgagagctggtatttggacgacaacattaagacatacagcgaccaccccgagaaggtcaataaggacgacgaagagtttatcgaatcaaacaaaatgcacgcgatcaatggtcgcatgtttgggaatcttcaaggtcttacaatgcacgtgggcgatgaggtgaactggtatctcatgggaatgggaaacgagatcgacctccacactgtacactttcatggacactcatttcagtataagcaccggggagtctattcatcggatgtattcgacatctttcccgggacgtatcagacgctggaaatgttcccgcggacgccgggaatctggctccttcactgccatgtaacggaccacatccatgcagggatggaaacaacatacactgtactgcagaatgaggatactaagagcggttaatgagctgccttctgcggggcttgccttctggccatgcccttcttctctcccttgcacctgtacctcttggtctttgaataaagcctgagtaggaag

SEQ ID NO: 1622 - RNA, 1536 nt, synthetic construct
  misc_feature 1..1536: note = source = /note="Description of Artificial Sequence: Synthetic coding sequence"
  source 1..1536: mol_type = other RNA
gggaaataagagagaaaagaagagtaagaagaaatataagagccaccaatgcagcgcgtcaacatgattatggccgaatcgccgggactcatcacaatctgcctcttgggttatctcttgtcggcagaatgtaccgtgttcttggatcacgaaaacgcgaacaaaattcttaatcgcccgaagcggtataactccgggaaacttgaggagtttgtgcagggcaatcttgaacgagagtgcatggaggagaaatgctcctttgaggaggcgagggaagtgtttgaaaacacagagcgaacaacggagttttggaagcaatacgtagatggggaccagtgtgagtcgaatccgtgcctcaatgggggatcatgtaaagatgacatcaatagctatgaatgctggtgcccgtttgggtttgaagggaagaactgtgagctggatgtgacgtgcaacatcaaaaacggacgctgtgagcagttttgtaagaactcggctgacaataaggtagtatgctcgtgcacagagggataccggctggcggagaaccaaaaatcgtgcgagcccgcagtcccgttcccttgtgggagggtgagcgtgtcacagactagcaagttgacgagagcggagactgtattccccgacgtggactacgtcaacagcaccgaagccgaaacaatcctcgataacatcacgcagagcactcagtccttcaatgactttacgagggtcgtaggtggtgaggacgcgaaacccggtcagttcccctggcaggtggtattgaacggaaaagtcgatgccttttgtggaggttccattgtcaacgagaagtggattgtcacagcggcacactgcgtagaaacaggagtgaaaatcacggtagtggcgggagagcataacattgaagagacagagcacacggaacaaaagcgaaatgtcatcagaatcattccacaccataactataacgcggcaatcaataagtacaatcacgacatcgcacttttggagcttgacgaacctttggtgcttaattcgtacgtcacccctatttgtattgccgacaaagagtatacaaacatcttcttgaaattcggctccgggtacgtatcgggctggggcagagtgttccataagggtagatccgcactggtgttgcaatacctcagggtgcccctcgtggatcgagccacttgtctgcggtccaccaaattcacaatctacaacaatatgttctgtgcgggattccatgaaggtgggagagatagctgccagggagactcagggggtccccacgtgacggaagtcgaggggacgtcatttctgacgggaattatctcatggggagaggaatgtgcgatgaaggggaaatatggcatctacactaaagtgtcacggtatgtcaattggatcaaggaaaagacgaaactcacgtgatcagccagcgctgccttctgcggggcttgccttctggccatgcccttcttctctcccttgcacctgtacctcttggtctttgaataaagcctgagtaggaag

SEQ ID NO: 1623 - RNA, 1544 nt, synthetic construct
  misc_feature 1..1544: note = source = /note="Description of Artificial Sequence: Synthetic coding sequence"
  source 1..1544: mol_type = other RNA
gggaaataagagagaaaagaagagtaagaagaaatataagagccaccatggtcagccaggcactcagactgctctgcctgttgcttgggctgcagggttgcttggccgctgggggagtcgcgaaagcgtcgggtggagaaacgcgggacatgccatggaagcctggaccccatcgcgtattcgtgacacaagaagaagcccacggagtgttgcatagacggcgcagagcaaacgcctttctcgaagagctcagaccggggtcgctcgagagggagtgtaaggaagagcagtgttcctttgaagaagcacgcgaaatcttcaaagacgccgaacgaaccaagctgttttggatctcgtattcagatggagatcagtgtgcctcatcgccgtgtcaaaatgggggaagctgcaaagatcagcttcagagctacatttgcttttgtttgcccgcgttcgaggggcggaactgtgagactcacaaagatgaccaactgatctgcgtcaacgagaatggtgggtgcgagcagtattgctccgaccacaccggcacaaaaagatcatgccgctgtcacgagggatattcgctgctcgcggacggagtcagctgtacgccgacagtcgagtatccatgcggaaagattccgattcttgagaaacgcaatgcctcgaagccccaggggcggatcgtcggtggaaaagtgtgcccgaagggggagtgcccctggcaggtgctcctcttggtgaatggagcccagttgtgtggcggcacgttgatcaatacaatctgggtagtatcggctgcccattgcttcgacaaaatcaaaaactggcgaaacctgattgcggtgctgggtgaacacgacttgtccgagcacgatggggacgagcagtcgaggcgggtagcgcaagtcatcatcccatccacctacgtccctggaacaactaaccacgatattgcactgctcaggctgcaccaacccgtcgtgttgacggatcatgtggtgcccctttgtctccccgagagaaccttcagcgagagaacgttggccttcgtgcggttctcgcttgtgtcggggtgggggcagcttctcgataggggagcgacagctttggaactgatggtactgaacgtaccgaggcttatgacccaagactgtttgcaacagtcgcgcaaggtgggagattcgccgaatatcactgagtacatgttctgtgcgggttactccgacggatcaaaggactcatgcaagggtgatagcggtggtccccatgcgacgcattaccgagggacgtggtaccttacgggaatcgtatcatgggggcagggatgcgcgacggtggggcactttggtgtctacactcgcgtcagccagtatattgagtggttgcagaagttgatgaggagcgaacctcggcctggagtgctgctcagggcaccgtttccttgataagctgccttctgcggggcttgccttctggccatgcccttcttctctcccttgcacctgtacctcttggtctttgaataaagcctgagtaggaag

SEQ ID NO: 1624 - RNA, 7199 nt, synthetic construct
  misc_feature 1..7199: note = source = /note="Description of Artificial Sequence: Synthetic coding sequence"
  source 1..7199: mol_type = other RNA
gggaaataagagagaaaagaagagtaagaagaaatataagagccaccatgcagatcgagctctcgacatgcttcttcttgtgcctgcttcgcttttgtttttcggcaacgaggcgctactaccttggtgccgtggaactttcatgggactacatgcagtcggatcttggagaacttccagtggacgccaggtttccacctcgggtgcccaagtcatttccctttaacacatcggtggtgtacaagaaaacattgttcgtggaattcacagaccacttgtttaacattgcgaagcccagaccgccgtggatgggtttgctcggcccgacgatccaggcggaagtctacgacacggtagtgatcacgctcaagaacatggcctcgcatcccgtatcacttcacgcagtaggagtctcctattggaaagcgtccgaaggggcagagtacgatgatcaaacatcacagcgcgagaaggaagatgacaaggtgtttccgggtggatcgcatacatatgtgtggcaggtccttaaagagaacggacccatggcatcagatcctctttgcctcacgtactcgtatttgtcgcatgtagacttggtcaaggacttgaattcaggtcttattggagcattacttgtttgtagagaaggttctctggctaaagaaaagacacagacattgcacaagtttatcctgcttttcgcggtgttcgacgagggaaaatcatggcactcggaaacgaaaaactcccttatgcaggatagggacgcagcgtcggccagagcctggcccaaaatgcacactgtcaacggttatgtcaacagaagccttcccggtttgatcggatgccacagaaaatcggtgtactggcacgtgattgggatggggacgacgcccgaagtacactccatctttttggaagggcacacctttttggtacgcaaccatagacaggcatccctcgagatttcgcctattactttcttgacggcgcagacgttgttgatggacttgggtcagtttttgctcttttgccacatctcgtcgcatcagcacgatggaatggaagcgtacgtcaaggtagacagctgtccggaagagccgcaattgaggatgaagaataacgaagaagccgaagattatgatgacgatttgacagactcagaaatggacgtcgtgcgattcgacgatgacaatagcccgagcttcatccagatcagatcagtcgccaaaaagcatccaaagacatgggtacactacatcgccgctgaagaagaggactgggattatgcacctttagttctggctcctgatgatagatcttacaagtcacagtacttgaacaacggtccgcagcggatcggaagaaagtacaaaaaggtccgctttatggcctatacagacgagacattcaagaccagggaagcaattcagcatgagagcggaattctcggacctctgctctatggagaggtcggtgacacgctgttgatcatcttcaaaaaccaggcatcaaggccctacaacatctatccgcacggtattactgacgtccggcctctctactcccgcagactccccaagggagtgaaacatcttaaagattttcccattctgcctggggagatcttcaagtataagtggacagtgacggtcgaggatggtccaaccaaatcagacccgagatgtctgacgcggtattactcgtcattcgtcaatatggagcgggacttggcctcggggttgattggaccactcctcatttgctacaaagaaagcgtcgatcagcgcggtaaccagatcatgtcggataagcgcaacgtcatccttttctcggtctttgatgaaaatcgctcgtggtatctcacggagaacatccagaggtttctgccgaatccagcgggagtacagcttgaggaccccgagttccaggcgtcgaacatcatgcatagcatcaacgggtatgtctttgatagccttcagttgagcgtgtgtcttcatgaggtcgcatactggtacatcttgagcatcggagcgcagacggactttttgtcggtgttctttagcggatacacattcaaacataagatggtgtatgaagatacactgactctctttcccttctcgggagagacagtcttcatgtcgatggagaaccccggtttgtggatcttggggtgtcataactcggatttcagaaatcgcgggatgacagctttgctgaaggtgtccagctgcgacaagaataccggagactattacgaagactcgtatgaggacatcagcgcgtacttgctctcaaagaacaatgcgattgaacctaggtcattctcgcaaaactcacggcatccttcgactcgacagaaacagttcaatgcgaccacgatccccgagaatgatatcgaaaagaccgacccttggtttgcacacagaacccccatgcctaagatccagaacgtatcatccagcgacctgcttatgcttcttaggcaatctcctacacctcatggattatcgctctccgatctccaagaagcgaagtacgagaccttttcggatgacccttcccccggtgcaattgactcaaacaattccttgtccgagatgacacacttccgaccccagcttcaccacagcggagacatggtgtttacccccgaatcgggacttcaactgaggcttaacgagaaactcgggacaacagctgcgaccgagttgaaaaagctcgatttcaaggtatcatcaacatcgaacaacctgatctccacgatcccatccgataacttggcagccggaacggacaatacgtcatcgctcggaccgccatcgatgccggtgcactatgattcgcaattggacactactctgttcggaaagaagtcgtcgcctttgacggagagcggtgggcctctctcactctcagaagagaacaacgattcgaaactgctcgaaagcggacttatgaactcccaagagtcctcatgggggaagaacgtgagctcaacagaatcaggtagactgtttaaaggaaaacgagctcatggtcctgcactcctgactaaagacaatgcgctcttcaaggtgtcgatctcgctcttgaaaaccaacaaaacatccaacaactcggcgaccaaccgaaaaacccacattgatggtccctcgcttctgattgaaaactcgccgtcggtgtggcagaacattcttgagtcggataccgagtttaagaaggtcacaccgttgatccacgaccgcatgctgatggacaaaaacgcgacggctctgaggttgaatcatatgtcgaacaagaccacttcgagcaagaatatggaaatggtgcagcaaaagaaggaaggacctattccgcccgacgcgcagaatcccgatatgtcctttttcaagatgctgtttctgcctgaatcagcaagatggatacaacgtacacatggaaaaaattctcttaactctggccaaggacctagtccaaagcagttggtgtccttgggtcccgaaaagtcagtggaggggcagaactttctctccgaaaagaacaaagtggtcgtggggaagggagaattcacaaaggatgtggggctcaaggagatggtgtttccgtcctcgcgaaaccttttcttgaccaatctggataaccttcatgagaacaacactcacaaccaggagaagaagattcaggaagaaatcgagaagaaagaaacacttattcaggaaaatgtcgtcctgccccagatccataccgtgaccgggacgaagaactttatgaagaatctcttcttgcttagcacaaggcagaacgtcgaggggagctacgatggagcgtatgcgccggtgctgcaggattttcgctcattgaacgattcaaccaatagaaccaagaaacatacggcgcacttctcgaagaaaggggaagaagagaatcttgaggggctcggcaatcagactaaacagattgtggagaaatatgcgtgtaccactcgaatttcccccaatacctcgcaacagaattttgtgactcagaggtcgaagcgggcattgaaacagtttcggttgcctcttgaagagactgaattggagaagaggattatcgtagacgatacaagcacccagtggtcgaaaaacatgaagcacctgacaccctcgacgctgacgcagatcgactataatgagaaggagaagggagccatcacccagtcgcccttgtcagattgtctgacgagatcacattcgatcccgcaagcgaatcgtagtccacttccaattgcaaaagttagctcatttccttctattcgtcctatctacctgactagggtcctcttccaagataattcaagccatctgccagcagcaagctataggaagaaagactcgggggtgcaggagtcaagccactttctgcaaggggcgaagaaaaacaatctttccctcgcgatcctcacattggagatgacaggtgaccaacgcgaagtggggtcgctcggaacatcggctacgaattcagtcacatacaagaaggtagaaaacaccgtcctgccgaagccggatttgcccaaaacttccggtaaagtcgagcttctgcccaaggtccatatctaccagaaagatttgttcccgacggagacatcaaacggctccccgggacatctcgaccttgtagagggatcgctgcttcagggaactgagggtgcgattaagtggaacgaggcgaataggcctgggaaggtgccattcttgcgcgtagccacggaatcgagcgcgaagactccatcgaaactcttggatcctcttgcgtgggacaaccattacgggacacagatccctaaggaagaatggaagtcacaagaaaagtccccggagaaaaccgcattcaaaaagaaagacactatcctttcgcttaacgcgtgtgagtcaaatcacgcgattgcggcgatcaatgaggggcagaacaagcctgaaatcgaagtcacgtgggcaaaacaggggcgcaccgaacggctgtgttcgcaaaatccgcctgtgcttaagagacatcagagagagattaccagaaccacactccagtcagaccaggaagagatcgactacgacgataccatttcagtcgagatgaagaaagaggacttcgatatctacgacgaggatgagaaccagtcacctcggtcattccagaagaagacacggcattacttcattgcagcagtggagcgcttgtgggactatggaatgtcttcaagtcctcatgttctaagaaatagggctcaatcgggatcggttcctcagttcaaaaaggtagtgtttcaggaattcacggacgggagcttcacacagcccctgtataggggtgagttgaacgagcacttgggactcctcggtccgtacattagagcagaagtcgaagacaacatcatggtgacattccggaaccaggcctcgcgaccctatagcttctatagcagcctcatttcgtacgaagaagatcagagacaaggggcggagccccgaaagaactttgtgaagccgaatgaaacaaagacctatttctggaaagtgcagcatcacatggccccaacaaaagacgagttcgattgcaaggcttgggcctacttttccgatgtggatctcgagaaagacgtccactcgggactgatcggaccccttctggtctgtcatacaaatactcttaaccctgcgcatggtcgccaggtgacggtgcaagaattcgctcttttctttaccattttcgacgaaacaaagtcctggtacttcaccgaaaacatggaacgaaattgcagagcgccttgtaacatccaaatggaggatcccacgtttaaagaaaactatcgcttccatgcaatcaatggttacatcatggacacgctccccggacttgtgatggcccaagaccagagaattcgatggtacttgctttcgatgggaagcaatgagaacattcactcgatccatttcagcggacacgtctttaccgtgcgcaagaaagaagagtataagatggcgctctacaatctttacccgggtgtgttcgaaacagtggagatgctgccctcgaaggcgggtatctggcgcgtggaatgtctgatcggcgagcacctgcacgcgggaatgtcgacgttgtttcttgtgtactcgaacaaatgtcagacgcctctcggtatggcgagcgggcatatccgggactttcagattacggcgtcagggcagtacggacagtgggcacctaaactggcacggctccactacagcgggtcaatcaacgcctggtcgacgaaagaacctttcagctggatcaaagtggaccttctggcccctatgatcattcatggaatcaagacccagggagcccggcagaagttctcgtccttgtatatctcacagtttatcatcatgtactcgcttgatgggaagaaatggcaaacgtacaggggaaactcgacggggactctgatggtattcttcgggaacgtcgactcgtcgggaatcaaacacaacatctttaacccacccatcattgcgcgatacattagactccaccccacccattactcaatcaggtcgactttgcgcatggaactgatgggatgtgacctcaattcgtgctcgatgccactggggatggagtcaaaagccatttcggacgcacagatcaccgccagctcatacttcaccaatatgttcgcaacgtggtcgccctcgaaagcgaggctccatctccagggaaggtcgaatgcgtggcgaccgcaagtgaataaccccaaagagtggttgcaggtcgatttccagaaaaccatgaaggtgacaggggtaacgacacagggggtgaaatcactgctcacttcgatgtacgtgaaagagttcttgatcagctcgtcccaagatggacatcagtggacactgttctttcagaacgggaaggtcaaagtgttccaggggaatcaggatagcttcacgcccgtcgtaaactcattggatcccccactcttgacacgctatttgcgaatccacccacaatcgtgggtgcaccagatcgcactccggatggaagtccttggttgtgaagcgcaggatctgtactgatgagctgccttctgcggggcttgccttctggccatgcccttcttctctcccttgcacctgtacctcttggtctttgaataaagcctgagtaggaag

SEQ ID NO: 1625 - RNA, 2021 nt, synthetic construct
  misc_feature 1..2021: note = source = /note="Description of Artificial Sequence: Synthetic coding sequence"
  source 1..2021: mol_type = other RNA
gggaaataagagagaaaagaagagtaagaagaaatataagagccaccatgatcttcctctatcaggtcgtccatttcatcttgttcacgtcggtgtccggcgaatgcgtcacgcagttgttgaaggacacgtgctttgaaggaggagacattacaacggtgtttacgccatccgcgaaatactgtcaggtggtctgtacctaccatccccggtgtctgctgtttacattcactgccgaatcccctagcgaggaccccactcggtggttcacgtgtgtgcttaaggattccgtcaccgaaacacttcctcgggtcaatcggacagcggcgatctcggggtactcgttcaagcaatgctcacaccagatttccgcctgcaacaaagacatctacgtcgatctcgatatgaaaggcatcaactacaactcctcggtggcaaagagcgcacaagagtgtcaagagcgatgcacagacgacgtgcactgccacttcttcacatacgcgaccaggcagttcccatcgctggaacacagaaacatctgcctcctcaagcatactcagacgggaactcccaccaggattacgaagctggataaggtggtatcgggattttcccttaagtcatgcgcccttagcaacctggcgtgtatcagggacatctttcccaatacagtatttgccgattccaatattgactcagtgatggcccctgacgccttcgtgtgtggccgcatctgcacacatcaccccggatgtctcttcttcaccttctttagccaggagtggcccaaggagagccagaggaacctctgccttctcaaaacgtcggagtcaggattgccctcgacgcggatcaagaaatcaaaggcgctttcggggttctcgttgcagagctgtcgccatagcattccagtcttttgtcactcatcgttttatcacgacactgattttctcggggaagagttggacatcgtggcagcaaagtcgcatgaagcgtgccagaagttgtgtaccaacgccgtccgctgccagtttttcacatacactccggcccaggcttcgtgcaacgaggggaagggaaagtgctatttgaagctcagctccaatggctcgcctaccaaaattcttcacggacgaggcggaatctcagggtacaccttgagattgtgtaagatggacaacgaatgtactacaaagatcaaaccgcgaattgtaggcggaacggcgtcggtccggggagaatggccgtggcaggtaacattgcatacgacctcccccacccagagacacttgtgcggtgggtcaattatcgggaatcagtggatcttgaccgcagcccactgcttttatggagtggagtccccgaaaatcttgagggtgtactcagggatcttgaaccagtcggaaatcaaggaggacacatcattcttcggggtccaagagatcatcattcacgatcagtacaagatggcggagtcggggtacgatattgcgcttctgaaattggaaaccaccgtcaactacactgattcgcagcggccgatctgcctgcctagcaaaggggaccggaatgtcatctacacagattgttgggtaacgggttggggttatcgcaagctgcgagacaaaatccagaatacactgcaaaaagcgaaaattccgttggtgactaacgaggagtgtcagaagagatatagaggtcacaaaatcacccacaagatgatctgcgccggataccgggaagggggtaaagacgcatgtaaaggagatagcggtggcccgttgagctgcaagcataacgaggtatggcacctcgtgggtattacttcatggggagaaggctgtgcgcagcgcgagaggccgggtgtctatactaatgtagtagagtatgtggactggatcttggagaaaactcaagcagtctgaagcgctgccttctgcggggcttgccttctggccatgcccttcttctctcccttgcacctgtacctcttggtctttgaataaagcctgagtaggaag

SEQ ID NO: 1626 - RNA, 9003 nt, synthetic construct
  misc_feature 1..9003: note = source = /note="Description of Artificial Sequence: Synthetic coding sequence"
  source 1..9003: mol_type = other RNA
gggaaataagagagaaaagaagagtaagaagaaatataagagccaccatgacgcttcggttgttggtagcagccctctgcgcgggaattctcgctgaggcacctcgggtgagagcgcagcatagagagcgagtaacatgtactcgactgtacgcggcagatatcgtgtttttgttggacggttcgtcctcgattggtcggtcgaactttcgggaagtgaggtcgttcttggaaggactcgtacttcccttttccggggctgcctcggcgcagggggtgcgctttgcgaccgtccagtattcagacgatcccagaaccgagtttggtctggacgcgctgggatcaggtggtgacgtaatccgagccattcgcgagctgtcatacaaaggcggaaatacgagaaccggtgcggcgatccttcacgtcgctgaccacgtattcctgccgcagctcgcaagacccggagtaccgaaagtgtgtatcctgatcacggatgggaaatcccaggaccttgtggacacggctgcacagcggttgaaaggccagggtgtgaagctcttcgcggtcggtatcaaaaacgcagacccagaagagcttaagcgggtggcatcccaaccgacatcggacttcttctttttcgtcaacgacttctcgattcttcggactctgctcccgcttgtgagccgaagggtatgtacgacagccggtggtgtccctgtgacacgaccgcctgatgacagcacgagcgcccctagggacctggtgctttcggaaccctcatcacagtcactgagagtccaatggactgcggcatcgggtccggtaaccgggtataaggtacagtacactccgttgaccggtctggggcagccccttccgtcggaacgccaagaagtcaacgtgccagcaggcgaaacttcagtgaggctgcgagggctccgacctctcacggaatatcaggtgaccgtgatcgcgctgtatgcaaactccatcggagaggccgtatcagggacagctcggacgaccgctcttgaaggacccgaactcacgatccagaatacaacagcgcactcacttcttgtggcatggcgctcggtccccggagccacagggtacagagtgacatggagagtactgtcgggaggtccgacgcagcaacaggagctcggtccagggcagggatcagtattgcttcgcgatttggagcccggtacggactatgaggtaacggtatcaacacttttcggaagatccgtaggacccgccacgtcattgatggcgcgaacggacgccagcgtcgagcagactttgcgcccagtaatcttgggaccaacctcaatcctgctcagctggaatcttgtgccggaagctcgagggtatcggctcgaatggcgaagagagactggattggaaccgccacaaaaggtcgtattgccctcggacgtgacaaggtaccagttggatggacttcagcctgggactgagtaccggctgaccctctacacactgttggaagggcacgaagtagccactcccgcgacggtggtgcccaccggaccggagctgccggtgagcccagtcacagatctccaggcgacggaactccctggtcagagagtgcgagtctcatggtcaccggtgccgggagccacgcagtacagaatcattgtccgatcgacccaaggcgtcgagcgaacccttgtgcttcccggatcgcagactgccttcgatctggacgacgtgcaagcaggactgagctatacggtcagagtgtcagcgagagtcggaccccgcgagggatcagcgtccgtgctgactgtcagaagggagcccgaaacgccgctcgcggtgcctggccttagagtcgtagtgtcggatgcgacgagggtgcgagtcgcgtggggtccagtgcctggggcgtcgggttttcggatctcgtggtcgacggggagcggtcccgaatcctcgcagactctcccacccgatagcacagcgacagatatcacagggctccaacccggaacgacgtatcaagtcgcagtcagcgtgttgagaggtagagaggaaggccctgcagcggtcatcgtagcgcgcacggacccacttggaccagtcagaacagtacacgtaactcaagcatcgtcctcgtccgtaactatcacgtggacaagggtaccaggtgcgacaggatacagagtgtcgtggcactcggcacacggtccagagaaatcgcagctcgtgtccggagaagctacggtcgcggaactggacggccttgaacccgataccgagtacacagtgcatgtcagagctcacgtggccggagtcgatgggccaccggcgtcggtggtcgtgcgcacagcaccagagccggtgggacgcgtgtcccggctgcagattcttaatgccagctcggatgtcttgcgcatcacatgggtcggcgtaacgggtgcgacggcgtatcggttggcgtggggaaggtcagagggcggaccgatgcggcaccaaattctccctggaaacacagattcggccgaaatcagaggactcgagggaggcgtaagctactccgtccgcgtaacagctttggtgggggatagagaaggtactcccgtgtcaatcgtcgtgactacaccccctgaagctccgcctgcgttgggaactttgcatgtcgtacaacgcggggagcacagccttcggctgcgatgggagcccgtgccaagagcccaggggtttctcttgcattggcagccggagggaggacaagaacagtcaagagtcctcggcccagagctcagctcctatcatttggacggactcgagccggcgacgcaataccgcgtaaggttgtccgtcttggggcctgccggggaaggaccgtccgcggaggtcacagccagaacggaatcgccgagagtaccctcgattgagctgcgagtagtggacacgtccattgattcggtcactttggcctggacaccggtatcacgcgcctcaagctacatcctgtcatggcgaccgcttcgcggacccggacaggaagtgccaggatcacctcagacgctccccggaatcagctcgtcgcagcgcgtcacgggtctggagcctggagtctcatacatctttagcctcacacccgtacttgatggcgtcagaggacccgaggcatcggtgacccagacaccagtgtgccctagaggactggcggacgtggtgtttctgccacacgcgacacaagacaatgcgcaccgggctgaagctacgcgaagggtgctcgaaagactggtgcttgcgctcggacctcttggaccccaggcagtacaagtggggttgctctcatactcccacagaccttcgccgttgttcccgcttaatgggtcgcatgatctcggaatcatcttgcagagaatccgcgatatgccctatatggatccaagcggaaacaacctcgggacagcggtagtcacggcgcaccggtacatgttggcgcctgatgctccaggccgaaggcagcatgtgccgggtgtcatggtgctgctggtcgacgagccgctgaggggagacattttctcacccattagagaggcccaagccagcgggttgaatgtggtcatgctcggtatggctggagcagatcccgagcagctccgacgactggcacccggaatggattcggtgcagacgtttttcgccgtcgacgatggaccctcattggaccaggccgtgagcggactcgcaacggcattgtgtcaggcgtcgttcacgacgcaacctagaccggaaccgtgtccggtgtattgtcccaagggacagaagggggaacctggcgagatgggtctgagaggtcaggtgggtccgcctggcgacccgggtttgcctggccgcacgggagcgcctgggccacaaggaccgcctgggtccgcaacagccaaaggggaaagaggctttcccggagcggatggacggccagggtcgcccggaagggcgggtaaccccggtacacccggtgcacccgggctcaaaggctcgcccggacttcctggtcccagaggcgatccaggcgaacgcggtccgagaggaccgaagggtgagccaggagcgccaggacaggtcatcgggggtgaagggcctgggctgccaggacgcaagggcgacccgggtccgtcaggtccgcctgggcccagagggcctctcggtgatcccggtcctcggggaccaccggggttgcccggaacggcgatgaaaggcgacaagggagataggggcgaaagggggccgcccggaccaggagagggtggaatcgcgccaggggaacccggactgccgggactgcctggatcccccggaccgcagggaccagtcggaccgcctgggaagaaaggggagaaaggtgatagcgaggacggtgctcctggtttgcccggacagccgggttcaccgggagaacagggtcccagaggtccaccgggagccattgggcccaagggggacaggggttttcccggacccttgggcgaggcaggggagaagggcgagcgaggaccacccggccccgccggatcccgaggtctgccaggggtcgcgggaaggcctggtgcgaaggggcctgaaggaccaccgggacccacgggaaggcagggcgagaagggcgaaccaggtcgaccgggggacccagctgtcgtagggcctgcggtagcgggaccaaaaggcgagaaaggggacgtaggtccagcaggaccacgaggcgctacgggggtacagggagagcgaggccctcccggtctggtcttgccaggcgaccccggacccaagggagatccgggtgacaggggaccaattggacttacgggtagagcgggtccacccggcgactcaggccctccaggggaaaagggggatcccgggaggcctggtccccctgggccggtaggaccccgagggagagatggagaggtgggtgagaagggagatgaaggtccacctggtgatccggggctccccggtaaagctggggagagggggctgcgcggagcacctggcgtacgcggtcccgtgggggaaaagggggatcagggcgaccccggtgaggacgggagaaacgggtcacccggttcatcagggccgaagggcgacaggggtgagccgggaccgccaggtccaccggggaggttggtagatacaggccctggagcgagagagaaaggcgagccgggagaccgagggcaggaaggtccgagagggcctaaaggggatcctgggcttcctggtgcccctggagaaagagggattgagggtttccgcggaccgccgggaccccagggtgatccgggagtgcggggaccggctggagaaaaaggcgatagaggcccacccggtcttgatggtaggtcgggtttggatgggaagccgggagcggcaggaccgtcgggaccgaacggtgcggctgggaaggcgggagatcctggtcgcgacgggttgcctgggctcagaggcgagcagggactcccgggaccatccggaccacctggtctgcccggaaaacccggagaagatggaaaaccgggacttaatggaaagaatggtgaaccaggggaccctggtgaagacggtaggaaaggggagaaaggtgactccggtgcaagcggacgagagggacgcgatggtccgaaaggggaacgcggagcccccggtattctgggtcctcaaggtccccctgggttgccgggtccagtgggtccacctgggcagggtttccctggcgtcccgggtgggacagggcccaagggcgaccgcggtgaaactggaagcaagggagaacaagggctgccgggagagagaggacttcggggagagccgggatcggtacccaatgtagaccggctgctggaaacggcagggattaaggctagcgcccttagagagatcgtagaaacttgggacgagtcaagcggatcgtttttgccagtacccgagcgcagacggggtcccaagggtgactcaggcgaacagggaccaccaggaaaagaagggcccattgggtttccgggggagcgaggtctgaagggcgatcgaggtgaccccggtcctcagggaccgccaggacttgcgctgggtgagcgcggtccccctggaccgtcagggctggcaggtgaaccaggaaagcccggaatccctggcctgcccggtcgagcgggtggtgtcggtgaagcggggagacctggtgagcggggtgagaggggcgaaaaaggagagcgcggtgagcaaggacgggacggaccaccgggattgcccggcacgccagggccacccggacctccgggacctaaggtgtccgtggatgagcctggaccgggactctcgggagagcagggcccacctggcttgaagggggccaaaggtgaaccgggatcgaacggagaccaaggtcccaaaggcgaccggggtgtgcccggcattaagggagataggggcgaacctgggcctcgaggtcaggacggtaacccagggctgcccggagagagagggatggcagggccggaagggaagcctggcttgcaaggacccaggggtcctcccggaccggtcggaggtcatggagatcctggtcctccgggtgcgccaggcttggctggacctgccggaccccaagggccctcgggactgaaaggtgagcccggagaaacaggcccacccggtcggggattgacaggtccgactggcgcagtcggactgccagggccaccaggtccgtccggactggtgggaccacaggggagcccaggacttcctggccaggtcggggaaactggtaagcctggggctccaggacgcgacggcgcatcgggcaaagatggagatcgcggctcacccggtgtcccgggttcaccaggactgcccggacccgtgggaccgaagggtgagcctgggcctacgggggcgccgggacaggctgtggtgggtcttccgggagcgaagggggagaagggggcacccggtgggctcgcgggtgatcttgtgggtgagcccggagcaaagggagacagaggattgccgggaccacggggtgaaaagggagaagcaggtcgcgctggggagcctggtgaccccggagaggacggacagaaaggggcacctggtcctaagggcttcaagggagacccgggagtgggggtccctggatcacccggtccccctggaccaccaggggtcaaaggagatcttggactccctggactccctggagcaccgggagtagtaggattccccggacagaccggaccacgcggagaaatgggacagcctggtccgtcgggggaaaggggcttggccggaccgccaggcagagaaggcatccccggtccactgggaccccctggtccgccaggatcggtcggaccaccaggcgctagcggccttaagggtgataaaggagaccccggtgtaggattgccaggccctagaggcgaaagaggggagccgggaatcaggggcgaggatgggcgaccgggtcaagaaggccctagggggctgaccggtccgcctggttcgaggggagaacgcggagagaagggtgacgtggggtcggcaggacttaagggggataagggggactccgcggtgattctggggccacctggccccaggggagcaaaaggggatatgggcgagagaggtccccgaggtctggatggagacaagggacctcgcggagataacggagatcccggagataaggggtcgaaaggagaaccgggagataaagggtccgcgggactgcctggactcagggggcttctcgggcctcaggggcagccaggtgcggcaggtatcccaggggaccccggaagccctggtaaggatggggtacccggtatccgaggtgaaaaaggggacgtgggcttcatgggaccacgagggctgaagggtgaaaggggtgtcaaaggggcgtgcggattggacggggaaaagggggacaagggggaagcgggtccgccaggaaggccgggattggcgggacacaagggtgagatgggggagcccggagtcccgggtcagtcaggagcccctggaaaggaaggattgattggtccaaagggagacaggggcttcgatggacaaccaggacccaaaggcgaccaaggagagaaaggagagaggggaacgcctggtattggaggattcccgggtccctcgggaaacgatggaagcgcagggccacccggaccccctggtagcgtggggcctcggggacccgaaggccttcaaggtcaaaaaggtgaaagaggaccccctggtgagagagtggtgggagcgcctggggtgcccggagctcccggagaacggggagaacaaggacgccctggcccagcgggtcctcgaggggaaaaaggtgaagcggcactcacggaggatgacatcagggggtttgtgaggcaggagatgtcccaacactgcgcgtgtcaaggacagttcatcgctagcggttccaggccacttccctcgtacgccgcagacacggcagggtcacaactccatgccgtccctgtcttgcgggtcagccatgctgaagaagaagaaagagtaccacccgaagacgacgagtacagcgagtattccgagtattcggtcgaagagtatcaagatcccgaagcgccttgggactccgacgatccctgttcgctccccttggacgaaggatcgtgcacggcttatacacttaggtggtaccacagagcggtgaccggatcgacagaggcgtgccaccccttcgtctacggtggttgcggtggtaacgcgaacagatttggaacgcgcgaagcgtgtgagcgcagatgtccgcctcgagtggtgcagtcgcaggggacgggtaccgcccaggattgataagctgccttctgcggggcttgccttctggccatgcccttcttctctcccttgcacctgtacctcttggtctttgaataaagcctgagtaggaaggcggccgctcgagcatgcatctaga

SEQ ID NO: 1627 - RNA, 578 nt, synthetic construct
  misc_feature 1..578: note = source = /note="Description of Artificial Sequence: Synthetic coding sequence"
  source 1..578: mol_type = other RNA
gggaaataagagagaaaagaagagtaagaagaaatataagagccaccatgtggctccagtcacttttgttgcttggaacggtcgcatgctccatctcggcaccagcgcggtccccctcgccgagcacgcagccttgggaacatgtgaacgctatccaagaagcgaggagacttctgaatctgtcacgagatacagcggccgagatgaacgaaactgtagaggtcatctcagagatgtttgaccttcaagagcccacatgtctccagacccgcctggaactgtataagcaggggttgcggggatccctcaccaaattgaaaggtcccttgaccatgatggcctcgcactacaaacagcactgtccgccgacgcctgagacatcgtgcgcgacgcagattatcacttttgaaagcttcaaggaaaatctcaaggacttcctgctcgtgattccattcgattgctgggagcccgtgcaagagtgataagctgccttctgcggggcttgccttctggccatgcccttcttctctcccttgcacctgtacctcttggtctttgaataaagcctgagtaggaag

SEQ ID NO: 1628 - RNA, 758 nt, synthetic construct
  misc_feature 1..758: note = source = /note="Description of Artificial Sequence: Synthetic coding sequence"
  source 1..758: mol_type = other RNA
gggaaataagagagaaaagaagagtaagaagaaatataagagccaccatggccggtcccgcgacccaaagccccatgaaacttatggccctgcagttgctgctttggcactcggccctctggacagtccaagaagcgactcctctcggacctgcctcatcgttgccgcagtcattccttttgaagtgtctggagcaggtgcgaaagattcagggcgatggagccgcactccaagagaagctctgcgcgacatacaaactttgccatcccgaggagctcgtactgctcgggcacagcttggggattccctgggctcctctctcgtcctgtccgtcgcaggctttgcagttggcagggtgcctttcccagctccactccggtttgttcttgtatcagggactgctgcaagcccttgagggaatctcgccagaattgggcccgacgctggacacgttgcagctcgacgtggcggatttcgcaacaaccatctggcagcagatggaggaactggggatggcacccgcgctgcagcccacgcagggggcaatgccggcctttgcgtccgcgtttcagcgcagggcgggtggagtcctcgtagcgagccaccttcaatcatttttggaagtctcgtaccgggtgctgagacatcttgcgcagccgtgaagcgctgccttctgcggggcttgccttctggccatgcccttcttctctcccttgcacctgtacctcttggtctttgaataaagcctgagtaggaag

SEQ ID NO: 1629 - RNA, 4586 nt, synthetic construct
  misc_feature 1..4586: note = source = /note="Description of Artificial Sequence: Synthetic coding sequence"
  source 1..4586: mol_type = other RNA
gggaaataagagagaaaagaagagtaagaagaaatataagagccaccatgcagaggtcaccgctcgagaaagcgtcagtggtgtcgaaactcttcttctcatggacgcggcctatcttgcggaaagggtaccgacagcggcttgagctcagcgatatctaccaaatccctagcgtggactcggcggataatctgagcgagaagctcgagagagaatgggaccgggagttggcttccaaaaagaaccctaagctcattaacgcgctccgccggtgcttcttctggcggtttatgttctacgggatttttctctatctcggagaagtcactaaagccgtccagccgctccttttgggacggatcattgcgtcgtacgatcctgataacaaagaggaacgctcgatcgccatctacctcgggatcgggttgtgccttctgtttatcgtaagaacgcttttgttgcaccccgccattttcgggctgcatcacatcggaatgcagatgcgaatcgcgatgttctcccttatctacaagaagacccttaaactgtcgtccagagtgctcgataaaatctcaatcggccaactcgtgtcgctcttgtccaataaccttaacaagttcgatgagggccttgcgctggcacactttgtgtggatcgcaccactccaagtggcgttgctgatgggcctgatttgggaactgttgcaagcgtcagcgttctgtggtcttggattccttattgtccttgcattgtttcaagcggggctgggacgcatgatgatgaaataccgcgaccaacgggcagggaagatctccgaaagacttgtgatcacgtcggagatgatcgagaatattcagtccgtgaaggcatattgttgggaagaggccatggagaagatgattgaaaacctcaggcagacagaactcaaactcacaagaaaagcggcatatgtccgctacttcaactcgtccgcattctttttcagcggcttcttcgtagtgtttctttcagtacttccttatgcattgatcaaaggaattattctccggaagatcttcaccactatctcgttctgcatcgtgcttcgcatggccgtaacccgacagttcccctgggcagtacaaacgtggtacgatagcttgggggctatcaataagatccaggatttcttgcaaaagcaagagtataaaacgttggaatataacttgacaactacggaagtggtcatggagaatgtcacagcattttgggaagaaggttttggagagctgtttgagaaagccaaacagaacaacaacaaccgcaaaacctcgaatggtgatgactcgttgttcttctcgaacttctcgttgctcggaacacccgtattgaaagacatcaacttcaaaatcgagagaggacagctgctggcggtcgcggggagcacgggggcgggaaaaaccagcctgttgatggtgattatgggggagctcgagcccagcgaagggaagattaaacatagcggtcgcatctcgttttgctcgcagttcagctggattatgccgggaactatcaaggaaaacatcatttttggagtatcatacgacgagtaccggtatcgatcagtcattaaggcgtgtcagctcgaggaagatatttcgaaatttgcggagaaagataacattgtgttgggagaaggcgggattaccttgtcgggcggtcaacgagcgagaatcagcctggctagagcggtctataaggatgcagatttgtacttgcttgactcgccatttggttatctcgatgtgttgacggaaaaggagatctttgaaagctgcgtgtgtaagcttatggcgaacaagaccaggatcctcgtcacttccaagatggagcatttgaagaaggctgacaagatcctcattcttcacgaaggtagcagctacttttatggaacgttctcagagctgcagaatctccagcctgacttttcatccaaactcatggggtgcgattcgtttgatcagttctccgccgaaagaaggaacagcattctgacagaaacactgcatcgcttcagccttgagggtgacgctcccgtgtcgtggacggagacaaagaaacagtcgtttaagcagacgggggagttcggagagaagcggaagaattcaatcttgaatcccatcaattccattcggaagttcagcatcgtgcagaaaacgccgctgcagatgaatgggatcgaagaagattcagacgaacccctggagcgccgattgagcttggtgccagattcagagcagggtgaggccattttgcccagaatcagcgtcatctcaacgggtccgacgttgcaggcgagaaggcgccagtcggtgctcaatttgatgacccacagcgtaaaccaaggtcagaacatccatcgaaaaacaactgcgtcgaccaggaaggtgtcgttggcgcctcaggcaaatctcacggaattggacatctattccagacgcctgagccaggagacagggctcgaaatttccgaggagatcaacgaagaggatttgaaggagtgctttttcgacgatatggaatccatcccggcagtgacgacgtggaatacgtacttgcgctacattaccgtccacaaatccttgatctttgtcctcatctggtgtctcgtcatcttccttgcggaagtggcggcatcattggtggtgctctggttgttgggcaacacacctctccaagataagggtaactcgacgcactcccgcaacaactcgtatgccgtaatcatcacatcaacatcgtcgtactacgtcttttacatctacgtaggcgtggccgacactttgctggccatgggatttttccgcggactgccattggtgcatacgcttatcacggtatccaaaattctccaccacaaaatgctccactcggtcctccaagcgcccatgtcgacactgaacacacttaaggccgggggtatcctcaataggttctcgaaggacatcgcaattcttgatgacttgttgcccctcacgatcttcgatttcattcagcttctcttgatcgtgattggggccattgcggtggtagcggtgcttcagccgtacattttcgtcgccaccgtccccgtaattgtcgcgtttatcatgctcagagcgtactttctccagacgtcgcaacagcttaagcaattggagtcggaaggtagatcacccatcttcacacatctggtaacatcgctcaagggactctggacccttagagcgttcgggagacagccgtattttgagacactctttcacaaggccctgaaccttcatacggcgaattggttcttgtacttgtcgacgctcagatggtttcagatgcggatcgaaatgatcttcgtgattttcttcatcgccgtcacgttcatctccatcctcaccacaggggaaggcgagggacgcgtagggattatcttgacacttgcgatgaacatcatgtcgacacttcaatgggccgtgaattcgagcattgatgtagactcactgatgagatcggtgtcgcgcgtgttcaagttcatcgacatgcccaccgaggggaagcctacaaagagcaccaaaccgtacaagaatggacagttgtccaaagtcatgatcattgagaattcgcacgtcaagaaggatgatatctggccgagcggagggcaaatgactgtcaaagacctcacagcgaagtacaccgaagggggaaacgcgattttggagaatatctccttctcaatctcaccagggcaacgggtaggacttttgggccggacggggtcgggaaaatcaactctgctgtcggcttttctgaggttgctcaacaccgagggtgaaatccagattgacggcgtgtcatgggactccattacacttcagcagtggagaaaggcgtttggagtcatcccccagaaagtgtttatcttctcgggcactttccggaagaacctcgacccctatgagcagtggtcagatcaggaaatttggaaagtggcggatgaagtcgggctgcgctcagtgatcgaacagtttccggggaagctggactttgtccttgtcgatggcggatgtgtcctttcgcacggtcacaaacagctcatgtgcctggcgagatcggtcctctccaaagccaaaatcctgctgttggatgagccctcggcgcacttggatcccgtaacgtaccagattatcagaagaactctgaagcaggcgtttgccgactgcaccgtgatcctctgtgaacaccgaattgaggcaatgctggagtgccagcaattcctggtcattgaggagaacaaggtgcgacagtatgactccattcagaaacttttgaacgaacgatcccttttcagacaagccatctcaccatccgaccgcgtgaaactctttcctcatcggaattcgtcgaagtgcaagtcgaaacctcaaatcgcggcacttaaggaagaaacggaagaagaagtacaggacacccgactgtgaagcgctgccttctgcggggcttgccttctggccatgcccttcttctctcccttgcacctgtacctcttggtctttgaataaagcctgagtaggaag

SEQ ID NO: 1630 - RNA, 347 nt, synthetic construct
  misc_feature 1..347: note = source = /note="Description of Artificial Sequence: Synthetic coding sequence"
  source 1..347: mol_type = other RNA
gggaaataagagagaaaagaagagtaagaagaaatataagagccaccatgaggatccactacttgctcttcgcgttgctgtttctcttcctggtgcccgtccctggccatggtggaatcattaacacacttcagaagtattactgtcgggtgagagggggacgatgcgccgtactttcatgtctcccgaaagaagagcaaatcggaaagtgctcgacgagagggcggaaatgttgcaggcgcaaaaagtaatgagctgccttctgcggggcttgccttctggccatgcccttcttctctcccttgcacctgtacctcttggtctttgaataaagcctgagtaggaag

SEQ ID NO: 1631 - RNA, 347 nt, synthetic construct; identical to SEQ ID NO: 1630
  misc_feature 1..347: note = source = /note="Description of Artificial Sequence: Synthetic coding sequence"
  source 1..347: mol_type = other RNA

SEQ ID NO: 1632 - RNA, 338 nt, synthetic construct
  misc_feature 1..338: note = source = /note="Description of Artificial Sequence: Synthetic coding sequence"
  source 1..338: mol_type = other RNA
gggaaataagagagaaaagaagagtaagaagaaatataagagccaccatgcgggtcctctacttgctgttctcatttctcttcatctttcttatgccccttccgggagtgtttgggggaatcggtgaccccgtgacgtgcttgaaatcgggagcgatctgccacccggtattctgcccaaggcgctataagcagattgggacatgtggtctgcccggcaccaagtgttgtaaaaagccttaatgagctgccttctgcggggcttgccttctggccatgcccttcttctctcccttgcacctgtacctcttggtctttgaataaagcctgagtaggaag

SEQ ID NO: 1633 - RNA, 338 nt, synthetic construct; identical to SEQ ID NO: 1632
  misc_feature 1..338: note = source = /note="Description of Artificial Sequence: Synthetic coding sequence"
  source 1..338: mol_type = other RNA

SEQ ID NO: 1634 - RNA, 992 nt, synthetic construct
  misc_feature 1..992: note = source = /note="Description of Artificial Sequence: Synthetic coding sequence"
  source 1..992: mol_type = other RNA
gggaaataagagagaaaagaagagtaagaagaaatataagagccaccatgcgagggatgaagcttctcggtgcgttgttggcgctcgcagccttgctgcagggagcggtgagcctcaaaattgccgctttcaacatccagacatttggcgagactaaaatgagcaatgcgacacttgtatcgtacatcgtacagattctgtcgagatacgacattgcgctcgtgcaagaagtgagagacagccacctgacggcagtgggaaaattgctcgataatctcaaccaggacgctcccgacacctaccactacgtcgtaagcgaacccttggggcgaaactcgtataaggagcgctacctgttcgtatacaggccggatcaagtctccgcggtggactcatattactatgacgatgggtgtgagccgtgcgggaacgacacctttaaccgggaacctgctatcgtcaggttcttctcgcgctttacggaagtccgcgagtttgccatcgtacccttgcacgccgcaccaggagatgcggtggccgagatcgatgccctctatgacgtctatctcgatgtccaagagaagtggggtcttgaagatgtgatgcttatgggagacttcaatgccggatgttcatatgtccggccctcacagtggtcctcgatcaggctgtggacgtcacccacatttcagtggctgattccggactccgcagacactacggcgacgcccacccattgcgcgtacgatcggatcgtagtggcagggatgctccttagaggcgcggtggtcccggattccgctcttcctttcaatttccaagcggcatacggtctttcagaccagttggcccaggcgatctcggatcattatcctgtcgaggtgatgttgaagtgataagctgccttctgcggggcttgccttctggccatgcccttcttctctcccttgcacctgtacctcttggtctttgaataaagcctgagtaggaag

SEQ ID NO: 1635 - RNA, 6389 nt, synthetic construct
  misc_feature 1..6389: note = source = /note="Description of Artificial Sequence: Synthetic coding sequence"
  source 1..6389: mol_type = other RNA
gggaaataagagagaaaagaagagtaagaagaaatataagagccaccatgctgtgctgtctcttggtacgggcttcgaatcttccatcagccaagaaggacaggcggtccgaccctgtagcatcgcttacgttcaggggagtcaagaagagaacaaaggtcattaaaaactcagtaaaccccgtgtggaacgaggggttcgagtgggatttgaaggggatccctctcgatcagggttcagagttgcacgtagtagtgaaagaccatgaaacgatggggcgaaaccgcttcttgggggaagcgaaggtccccctcagagaggtcttggctacgccgtcgttgtcggccagctttaacgccccgttgctggatacgaagaaacagccgacgggagcctcactcgtgttgcaagtatcgtatactccgcttcccggggcggtccccctttttcctcccccgacaccgcttgagcctagccccactctgcccgatctggatgtggtcgcggacactggtggagaagaggacacagaggaccaggggttgactggggacgaggcagagcccttcctcgatcagtcgggcgggcctggtgctcccactacaccgcggaaactccctagccggcctcccccgcactatccagggattaagagaaaaaggagcgcaccgacaagccgcaaactcttgtccgacaaaccgcaggacttccaaatcagggtgcaggtcattgagggacgccagctccccggagtgaatatcaagcccgtagtaaaagtgaccgcggcaggtcaaacaaaaaggacacggattcataaaggaaattccccgctcttcaacgagacattgttctttaatctctttgattcaccgggagagctcttcgacgaacctatctttatcactgtggtcgattcccgctcacttcggaccgacgcgctccttggagagtttaggatggatgtagggacaatctatcgagaaccgaggcatgcttatcttagaaagtggctgctgttgtcggatcccgatgacttctccgccggagcacgggggtatctcaagacgagcctctgcgtcttgggaccgggggatgaagcgcccctcgagcgcaaggatccgtccgaggacaaagaggacatcgagagcaacttgttgcggccgactggcgtggccctgagaggagcccatttctgtctcaaggtctttagggccgaggatctcccacaaatggatgacgccgtaatggataacgtgaagcagattttcggttttgaatccaataagaagaatcttgtcgatccgtttgtcgaggtctcgtttgccggaaagatgctttgcagcaagatccttgaaaagacagcaaacccccagtggaatcaaaacatcacgctgccagctatgtttccgtccatgtgtgagaagatgagaattcgcatcatcgactgggatcggcttacgcacaacgacatcgtcgccaccacctatctgtcgatgtcgaagatctcagcaccagggggtgaaattgaggaagagcctgccggtgcagtgaaaccgtcaaaggcgtcggatttggatgactatctgggttttcttcccacatttggaccttgctacatcaacctttacggctcgcctcgggaattcaccggattccccgacccctatacggaactgaatacagggaagggtgagggggtggcatacagaggtaggcttctgttgtcgctcgagacaaagcttgtagagcactcggagcagaaggtcgaggacctgccggcagacgatattctgcgagtggagaaatatttgcggcggcggaagtattcgctctttgcggcattctacagcgctactatgctgcaagatgtcgacgacgcgatccagttcgaagtatcgatcggaaattatggtaataagttcgatatgacgtgtcttccactcgcttcaaccacgcagtattcgagagcggtgttcgatggatgccactactactatctgccttggggaaatgtcaaacccgtcgtggtcctctcgtcctattgggaagatatttcacaccgcatcgagacgcagaaccagctgctgggaatcgccgataggttggaagccgggttggagcaggtgcatctcgcgctcaaggcgcagtgcagcactgaggacgtcgactcgctggtagctcaacttacagacgagctgattgcggggtgtagccagcccctgggtgatatccacgagacaccctcggcgactcacctcgaccagtatttgtaccagctccgcacccaccacctgtcgcaaattacagaggctgccctggcgctgaagctgggacactccgaactgcccgcagcgttggagcaggcggaagattggctccttaggttgagggcgctcgccgaggagcctcagaatagcctccctgatattgtcatctggatgttgcagggggataaacgagtggcctaccagagggtcccggcgcatcaagtccttttttcaagacggggagccaactactgtgggaaaaactgcggaaagctgcaaaccatttttctcaagtaccccatggagaaggtgcccggtgcacgcatgcccgtccagatccgcgtcaaactgtggtttgggctctcggtcgacgagaaggagtttaatcaatttgcagagggcaaactctcggtgtttgcggagacttatgagaacgaaacgaagttggcattggtggggaattggggaactacgggacttacgtacccgaagtttagcgatgtgacagggaagattaaacttcccaaagactcctttagaccgtcagcagggtggacatgggcgggtgactggttcgtgtgccccgagaaaaccttgttgcatgacatggacgctggtcatctctcattcgtagaggaagtgttcgaaaaccaaaccagattgccgggtggacaatggatctatatgtcagataactacacagatgtcaatggggaaaaagtgcttcccaaagatgacattgagtgccctttggggtggaagtgggaggacgaagagtggagcacggacctcaatagggcggtagacgaacaggggtgggaatattcaattacgatcccacccgagaggaagccaaagcactgggtgcctgccgagaagatgtattacacgcaccgaaggagaaggtgggtcagattgcgacggcgcgacttgagccagatggaggcgcttaaaagacaccgacaggcggaagccgaaggagaaggttgggagtacgcctcactcttcggatggaaatttcatctggagtatagaaagacagatgcctttagacgcaggcggtggaggagaaggatggagcctttggagaaaactggtcccgctgccgtctttgcgctggaaggcgcacttggcggggtcatggacgataagtccgaggactccatgagcgtctccaccctgtccttcggcgtcaataggccaacgatctcgtgtatcttcgattatgggaatcggtaccatctccgatgctacatgtaccaggctcgcgatcttgcggcaatggacaaagacagcttttcggatccttacgcgatcgtctcgtttttgcatcagtcgcagaaaaccgtcgtagtgaagaatactctcaacccgacgtgggaccagacattgatcttttacgagatcgagatctttggggagcctgcgacggtggccgagcagccgccctcgatcgtagtcgaattgtatgaccatgatacatatggagcagatgagtttatggggcggtgcatctgtcagccctcactggagagaatgccgagactcgcatggtttccgttgaccagaggatcgcaacccagcggtgaactcctcgcctcgtttgaattgattcagagagagaagcctgcgatccatcatatccccggcttcgaggtccaagaaacgtcgcgcattttggacgaaagcgaagataccgatctcccgtacccacccccgcaacgagaggcaaacatctacatggtaccgcagaacatcaagccagcccttcaacgcacggccatcgaaatcctcgcatgggggttgcgaaatatgaagtcgtatcagttggccaacatttcctcgccttcgctcgtggtcgaatgtggcgggcaaacggtccaatcgtgcgtgatccgcaacctccgcaagaatcccaatttcgatatctgcacactcttcatggaagtcatgttgccgcgcgaggagctgtactgtccgccgattaccgtcaaagtgatcgacaaccgccagttcggccgccgcccggtggtaggacagtgcacaatccgctcgctggagagctttttgtgcgacccctatagcgcggagtccccctcgccgcagggcggtcctgatgacgtctcattgcttagccccggagaggacgtgctgatcgacattgacgataaggagccgctcatcccaatccaagaagaagagttcatcgattggtggtcaaaatttttcgcatccattggtgagagggagaagtgcgggtcctatcttgaaaaagacttcgacactctcaaagtatacgacactcagctggagaacgtcgaggcctttgaaggactctcggacttctgtaatacattcaaactctacagaggaaaaacgcaggaagagacagaggacccctcggtcattggcgagtttaagggtctcttcaagatctacccgcttccagaggatcctgccatcccgatgccacctcgccagttccaccagctcgccgcgcaagggccccaggagtgccttgtccgaatctacatcgtaagagcgttcggacttcagcccaaggatcccaatggaaaatgtgacccgtatatcaagatttcgatcggcaaaaagtcggtatcagatcaggacaactatattccgtgcacacttgagcccgtattcggaaagatgttcgagctcacgtgcacgctgccgctcgaaaaggacctcaagatcacactttatgattatgaccttctctcgaaggatgaaaagattggcgaaacggtcgtggaccttgaaaatagactccttagcaagttcggagcaaggtgcggactgccccagacgtattgcgtgtcggggcccaaccagtggcgggatcagcttcggccatcacagctgctgcacctcttttgccagcagcatagggtgaaagccccagtgtatcggacagatagagtcatgtttcaggataaagagtactcaatcgaggagattgaagcaggtagaatccccaacccgcacctcggacccgtggaagaacggctcgcgttgcacgtccttcagcagcagggtttggtacccgaacacgtagagtcgcgcccattgtactcgcccttgcaaccagatattgaacagggaaagttgcagatgtgggtagacctcttccccaaagcgctcggtagacccggaccaccttttaacattaccccacgcagggcgagacgattctttttgcggtgtattatctggaacacccgcgatgtcatcctcgatgacctctcgctcaccggagaaaagatgtcggatatctacgtaaagggatggatgatcggatttgaggaacacaagcagaaaacagacgtgcattaccgatcactcgggggagaaggaaactttaactggcgctttatctttcccttcgactatcttcccgccgaacaagtctgtacaattgcgaaaaaggacgcattctggcgattggataaaacggaatccaaaattcccgcacgcgtagtatttcagatctgggacaatgataagttctcatttgacgactttctggggtccctgcagttggatctgaacaggatgccgaagcctgccaagacggccaaaaagtgttcactcgatcaactggacgacgccttccacccggagtggtttgtatcgctttttgagcagaaaacagtcaaaggttggtggccttgtgtggcggaagagggggaaaagaaaattctcgcgggcaagctcgagatgacgcttgagatcgtcgccgagtccgagcacgaggagagaccagctggacaaggccgggatgagcccaacatgaatccgaagctggaggacccgcgacgccctgataccagcttcctctggtttacgtcgccctataagactatgaaattcatcctctggaggagattcagatgggcgatcatcttgttcatcatccttttcatcttgcttctgtttttggcgatctttatctacgccttcccgaactacgcagccatgaagcttgtcaagcccttttcatgaagcgctgccttctgcggggcttgccttctggccatgcccttcttctctcccttgcacctgtacctcttggtctttgaataaagcctgagtaggaag

SEQ ID NO: 1636 - RNA, 1313 nt, synthetic construct
  misc_feature 1..1313: note = source = /note="Description of Artificial Sequence: Synthetic coding sequence"
  source 1..1313: mol_type = other RNA
gggaaataagagagaaaagaagagtaagaagaaatataagagccaccatggggtaccctgaggtggagcgcagggaacttctgcctgcagccgcaccgcgggagcgcggaagccaggggtgcgggtgtggtggcgcaccagccagagccggggaagggaattcatgtttgctttttctcggtttcttcggtttgtccctggcgttgcaccttctcaccctgtgttgctacctcgaactgagatcagagttgcggcgagagcggggagctgagtcccggcttggcggtagcggaactcccggaacgtcggggacgctcagctcactgggtggactggatcccgacagccctattacctcacacttgggtcagccttcgccgaaacagcaacccctcgaacccggagaggcagcactccattcggattcgcaagacggacaccagatggcgctcttgaacttcttctttcccgacgaaaagccttatagcgaagaagagtcccgaagggtgcgccggaacaagcggtcgaagtcaaatgagggtgcggacggacccgtgaagaacaaaaagaagggaaagaaagctgggcccccgggaccgaatgggccaccaggaccgccaggtccccctggaccacaaggtccgcctggaatcccgggaattccgggtatccccggcacaacagtcatggggccacccggaccaccgggaccgcctgggccgcagggaccccctgggctccaggggccttcgggtgctgcggataaggcgggaacaagggagaatcagcccgcagtcgtccacttgcagggacagggatcggcgatccaagtgaaaaatgacttgtccggtggggtccttaacgactggtcaagaatcactatgaatccaaaggtctttaaacttcaccctagatcaggtgaactcgaagtgttggtcgatggaacgtatttcatctacagccaggtatactatatcaactttaccgactttgcctcgtatgaggtcgtagtagatgagaagccttttctgcagtgtactcggtcaattgagacagggaaaaccaattacaacacgtgctacactgctggagtgtgcctgttgaaggccagacagaagatcgcggtgaaaatggtacatgcggatatctcgattaacatgtcaaaacatacgacattcttcggggcgattagactgggcgaagctcccgcatcctgataagctgccttctgcggggcttgccttctggccatgcccttcttctctcccttgcacctgtacctcttggtctttgaataaagcctgagtaggaag

SEQ ID NO: 1637 - RNA, 3572 nt, synthetic construct
  misc_feature 1..3572: note = source = /note="Description of Artificial Sequence: Synthetic coding sequence"
  source 1..3572: mol_type = other RNA
gggaaataagagagaaaagaagagtaagaagaaatataagagccaccatgttggtacttagatgccgactcggaacgtcgtttccgaagcttgataacctggtccccaaagggaagatgaagattttgctcgtgtttctcggcttgcttggaaactccgtagccatgcccatgcacatgccgagaatgcccggattttcgtcaaaatcggaagagatgatgcggtacaaccagttcaactttatgaatgggccgcatatggcgcacttgggcccctttttcgggaatggactgcctcagcagttccctcagtatcaaatgcccatgtggccccagcccccacctaatacatggcacccgcggaagtcatccgcgcctaagagacacaataagacggaccagacccaagaaacgcagaagccgaatcagacccagagcaagaaaccaccgcagaagcgacccctcaagcagccatcccataatcagccgcaaccagaagaagaggctcagccaccacaggcatttccgccctttggcaatgggctctttccgtatcaacaaccgccgtggcagatccctcaacggcttccaccaccgggatatggtagaccacccatctcaaacgaagagggtggaaacccctatttcggctacttcgggtaccatgggtttggcggaaggccaccgtattactcggaagaaatgttcgagcaggactttgaaaagcccaaagaagaggacccacctaaggccgaatcccctggtactgagcccacagcgaactcaacggtgacggagacaaattcaactcaacctaacccgaaagggagccagggcggcaacgatacatcgccgacgggtaatagcacgccagggcttaacactggtaataacccaccggcgcaaaacggtatcggacctcttcccgcggtcaacgcgtcgggacaaggtggtccggggtcgcagattccatggaggcccagccagccaaatatcagggagaaccacccgtacccgaacattcgcaactttccctcgggacggcagtggtacttcaccggaacagtgatgggacatcgccaaaataggccattttaccgcaatcagcaggtgcagagaggaccacgctggaacttcttcgcgtgggagcgaaaacaggtcgcgaggccgggaaaccctgtataccacaaagcatacccacccacttcgcggggaaactaccccaactacgccgggaaccccgctaacttgcgccgaaagccccagggtcccaacaagcacccggtggggactaccgtagcgccgctcgggccgaagcctggtccggtggtgcggaacgagaaaatccagaatccgaaagagaagccccttggacccaaagagcagatcatcgtgcccactaagaaccccacatcgccctggcgcaactcccaacagtatgaggtgaataagtcaaactacaagctgccccattcagaaggctacatgccggtgccgaacttcaatagcgtagaccagcacgagaactcgtattaccctcggggagactcccggaaggtcccaaattcggacggacagacgcaaagccaaaatctgcccaagggaattgtcctcggttcgcgaaggatgccgtacgagtccgagacaaaccagtcggagcttaaacactcatcctatcaacccgccgtctaccccgaagagattccgtcaccagcgaaagaacacttcccagcagggagaaacacttgggaccaccaagaaatttcaccacccttcaaagaggatcccggacgccaggaagagcatcttccgcacccgagccatggatcgcgagggtcggtgttctaccctgagtacaacccgtatgaccctcgggagaacagcccctatcttaggggtaacacgtgggacgagcgggacgatagcccaaacacaatgggacagaaagagtcgccgttgtatcccatcaacacaccagaccagaaagagatcgtgccgtacaacgaagaagatcccgtcgacccgacgggggatgaagtatttcccgggcagaacaggtggggcgaagagttgtcgtttaaagggggacctaccgtgcggcactatgagggagagcagtacacatcgaatcagccaaaagagtatctcccctattcgctcgataatccgtcgaaaccgagggaagatttctattactcagagttctatccctggtcgcccgacgaaaactttccatcatataacacggcgagcaccatgccaccgcccattgagagcagggggtactatgtgaacaacgcagcgggtccggaagaaagcactctcttcccctcacgcaatagctgggatcatagaattcaggcccagggccagcgggaacggcgaccttactttaacagaaacatctgggaccaggcgacgcatttgcaaaaggctcccgctcggccacccgatcagaaggggaaccagccctactactcgaacacgccagcagggctccagaagaatcctatctggcacgagggggaaaacttgaattatggaatgcagatcacacggatgaattcgcccgaacgggaacactcgtccttccccaactttatcccaccttcgtatccgtcggggcagaaagaggcacacttgtttcatcttagccagcgcggatcgtgctgcgcgggatcgtccacgggaccgaaggacaatccgctcgcccttcaagactataccccttcgtacgggttggcaccgggagaaaaccaggacacatcacccctgtacactgatggttcccacactaaacagactcgcgacattatcagccccacatcaattctccctggccagagaaatagctcagaaaagagagagagccagaacccctttagggatgatgtgtcgacgcttcgccgaaataccccctgttcgatcaagaaccagcttggtcaaaaagagatcatgccgttccccgaggcctcaagcctgcagtcaaagaatacaccctgtctgaagaatgacctcgggggtgacgggaataacattctggaacaggtatttgaggataatcagctcaacgaaaggacggtggatctcactcccgagcaactggtcattggtacgccggacgaggggagcaatcccgaaggtatccaatcgcaggtacaggaaaatgagtcagagcggcagcagcagaggccgtcgaatatcttgcaccttccatgtttcggatcaaaactggcaaaacatcattcatcaacaactggtactccgtcgtcagacggtaggcagtcccccttcgatggagactccatcacgcctacggagaatcccaacacgctggtcgagctggcgactgaagagcagttcaagtccatcaatgtggatccgcttgatgcggatgagcactccccgttcgaatttctccagcggggtactaatgtacaagatcaggtccaagattgccttctcttgcaagcctgataagctgccttctgcggggcttgccttctggccatgcccttcttctctcccttgcacctgtacctcttggtctttgaataaagcctgagtaggaag

SEQ ID NO: 1638 - RNA, 725 nt, synthetic construct
  misc_feature 1..725: note = source = /note="Description of Artificial Sequence: Synthetic coding sequence"
  source 1..725: mol_type = other RNA
gggaaataagagagaaaagaagagtaagaagaaatataagagccaccatgggagtgcacgagtgtcccgcgtggttgtggttgctgctgtcgctcttgagcctcccactgggactgcctgtgctgggggcaccacccagattgatctgcgactcacgggtacttgagaggtaccttcttgaagccaaagaagccgaaaacatcacaaccggatgcgccgagcactgctccctcaatgagaacattactgtaccggatacaaaggtcaatttctatgcatggaagagaatggaagtaggacagcaggccgtcgaagtgtggcaggggctcgcgcttttgtcggaggcggtgttgcggggtcaggccctcctcgtcaactcatcacagccgtgggagcccctccaacttcatgtcgataaagcggtgtcggggctccgcagcttgacgacgttgcttcgggctctgggcgcacaaaaggaggctatttcgccgcctgacgcggcctccgcggcacccctccgaacgatcaccgcggacacgtttaggaagctttttagagtgtacagcaatttcctccgcggaaagctgaaattgtatactggtgaagcgtgtaggacaggggatcgctgataagctgccttctgcggggcttgccttctggccatgcccttcttctctcccttgcacctgtacctcttggtctttgaataaagcctgagtaggaag

SEQ ID NO: 1639 - RNA, 1712 nt, synthetic construct
  misc_feature 1..1712: note = source = /note="Description of Artificial Sequence: Synthetic coding sequence"
  source 1..1712: mol_type = other RNA
gggaaataagagagaaaagaagagtaagaagaaatataagagccaccatggctgccgtggtggcggcaacccgctggtggcagctgctccttgtgctctcagcagcaggaatgggggcgtcgggggctccccagccgcccaacatcctgctcttgctcatggacgatatgggttggggtgaccttggggtatacggagagccgtcgagggaaactcccaacttggacaggatggcggcagaaggtctgctctttccgaacttttactcagctaaccctctttgctcaccgtcgcgagcggcgcttctgactgggagactccccatcagaaatgggttctatacaacgaacgcccacgctcgcaatgcatacacaccgcaagagatcgtgggtggcattcctgattcggagcagttgttgccagaactccttaagaaggcgggatatgtctcgaaaatcgtcggaaagtggcatctcggccaccgaccccagttccatcctcttaaacatggctttgatgagtggtttgggtcgcccaattgccacttcggcccgtatgacaataaggccaggccaaacatcccggtctacagagattgggaaatggtagggcggtattatgaagagttcccgatcaatcttaaaacaggggaggcgaatctcacgcagatctaccttcaagaggcgctggacttcatcaaaagacaagcacggcaccatccctttttcttgtactgggccgtagatgctacacatgcgcccgtgtacgcctccaagccgtttttggggacgagccagcggggacgctacggggacgcggtgcgcgagatcgacgattcaattggaaagattcttgaacttttgcaagatctccacgtcgcagataatactttcgtattctttacctccgacaacggagcagcgctgatttcagcaccggagcagggagggtcgaatggtcccttcttgtgtgggaaacagacgacctttgagggaggaatgcgggagcctgcgttggcctggtggcctgggcacgtaacggcgggtcaggtatcacatcagcttggaagcattatggatctctttaccacatcgctggcactcgccggactcactcccccgtccgatagggcaatcgatgggttgaaccttttgccaacgctccttcaaggtcgactgatggatcgccccatcttctattacaggggtgacacgttgatggcggcgacattggggcagcacaaggcacatttttggacatggacaaactcgtgggaaaacttccggcagggcatcgacttttgtcccggacaaaatgtgagcggagtaacgacacacaaccttgaggaccatacgaagctccctcttatctttcatcttggtcgggacccgggtgaaaggtttcccctgtcgttcgcttcagcggagtatcaggaggcactgagccggattacttccgtcgtccagcaacaccaggaagccctcgtgccagctcagccccagttgaacgtatgtaactgggcggtgatgaattgggcaccgcctggttgtgagaagttggggaaatgcctgacgccccctgaatccattccgaaaaagtgcttgtggagccactaatgagctgccttctgcggggcttgccttctggccatgcccttcttctctcccttgcacctgtacctcttggtctttgaataaagcctgagtaggaag

SEQ ID NO: 1640 - RNA, 1433 nt, synthetic construct
  misc_feature 1..1433: note = source = /note="Description of Artificial Sequence: Synthetic coding sequence"
  source 1..1433: mol_type = other RNA
gggaaataagagagaaaagaagagtaagaagaaatataagagccaccatgcagcttcggaatccagaactccatttggggtgcgcgctcgcactgcggtttctcgcgctggtgtcatgggacattccgggagcgcgagccctggacaacgggttggcgagaactccgacaatgggttggctccattgggagcggtttatgtgcaaccttgattgtcaggaggagcccgattcgtgtatctccgaaaaactcttcatggaaatggcggagcttatggtgagcgagggttggaaggacgcagggtacgagtatttgtgcatcgacgattgctggatggccccacagagggactccgaaggacgcctccaagcggacccgcagcggttcccgcacggtatccggcagctcgctaactacgtacacagcaaagggcttaagctgggtatctacgcggacgtagggaacaagacgtgtgcagggttccccggctcattcggatattacgatattgacgcccagacgtttgcggactggggcgtcgatcttctgaagtttgacggatgctactgcgacagcctcgaaaatcttgctgatggatacaaacacatgtccctggcactgaacaggacgggtcgctccatcgtgtattcgtgtgaatggcccttgtatatgtggccatttcagaagcccaactacacggaaatcagacagtattgtaaccactggaggaatttcgcggacattgatgatagctggaagtcgatcaaatcaattttggattggacatcgttcaaccaggagcgcatcgtggacgtcgcgggtcccggagggtggaatgacccggatatgttggtaattggaaactttggcctttcgtggaatcagcaagtgacccagatggccttgtgggcgattatggcagcgcccttgttcatgtcgaatgatttgagacatatttcgccgcaggccaaggcgttgcttcaagataaggacgtgatcgccatcaatcaggaccccttgggaaaacagggataccaactccgccaaggagataacttcgaggtctgggaaaggcccctttcgggacttgcttgggccgtggcgatgatcaacagacaagagattgggggtcctcggtcctatactatcgccgtggcatcacttggtaaaggagtcgcatgtaatcccgcgtgcttcatcactcagctccttcctgtcaagcgaaaattggggttttatgagtggaccagccgcctgcggtcgcacatcaatccaacagggactgtgctcttgcagctcgaaaacacaatgcagatgtccctcaaagatttgctgtaatgagctgccttctgcggggcttgccttctggccatgcccttcttctctcccttgcacctgtacctcttggtctttgaataaagcctgagtaggaag

SEQ ID NO: 1641 - RNA, 272 nt, synthetic construct
  misc_feature 1..272: note = source = /note="Description of Artificial Sequence: Synthetic coding sequence"
  source 1..272: mol_type = other RNA
gggaaataagagagaaaagaagagtaagaagaaatataagagccaccatgggggtccggcatcccccatgctcccacagactgctggctgtatgtgcactcgtgtcgctcgcgacagccgcgcttttgccgcagaactcaaagatccccggacctacgttcttggacccgcactgataagctgccttctgcggggcttgccttctggccatgcccttcttctctcccttgcacctgtacctcttggtctttgaataaagcctgagtaggaag

SEQ ID NO: 1642 - RNA, 275 nt, synthetic construct
  misc_feature 1..275: note = source = /note="Description of Artificial Sequence: Synthetic coding sequence"
  source 1..275: mol_type = other RNA
gggaaataagagagaaaagaagagtaagaagaaatataagagccaccatgggagtacggcatccaccttgctcgcacagattgctcgcggtctgtgccttggtgtcactggctaccgcggcacttctcgccaacacgccgtgtgggccctacacacacgactgccccgtgaagaggtgataagctgccttctgcggggcttgccttctggccatgcccttcttctctcccttgcacctgtacctcttggtctttgaataaagcctgagtaggaag

SEQ ID NO: 1643 - RNA, 779 nt, synthetic construct
  misc_feature 1..779: note = source = /note="Description of Artificial Sequence: Synthetic coding sequence"
  source 1..779: mol_type = other RNA
gggaaataagagagaaaagaagagtaagaagaaatataagagccaccatgaagctgtgggacgtggtcgccgtgtgcctcgtcttgttgcataccgcgtcggcattccccctcccagcggggaagaggccaccggaggcaccggctgaagatcggtccctgggccgacgaagagcccccttcgccctctcgtcggactccaacatgcccgaggattaccctgaccagttcgacgacgtgatggactttatccaggcgacgatcaaaagactcaagagaagcccggataaacaaatggcggtgcttcctcgccgggagcggaataggcaggccgcagccgctaacccggagaactcacgcggaaaagggaggaggggacagcgcggaaagaaccgcgggtgcgtcttgactgcgatccacttgaacgtgacagatctgggacttgggtacgaaacgaaagaggaactgatcttccggtattgttccggtagctgcgacgcagccgaaacaacgtacgacaagatccttaagaatctcagccgcaataggcggcttgtatcagacaaagtaggacaggcgtgttgcagacccattgcgtttgatgatgacttgtcgtttctggatgataatcttgtatatcacattttgcgaaagcattcagcgaaaagatgtggttgcatttaatgagctgccttctgcggggcttgccttctggccatgcccttcttctctcccttgcacctgtacctcttggtctttgaataaagcctgagtaggaag

SEQ ID NO: 1644 - RNA, 311 nt, synthetic construct
  misc_feature 1..311: note = source = /note="Description of Artificial Sequence: Synthetic coding sequence"
  source 1..311: mol_type = other RNA
gggaaataagagagaaaagaagagtaagaagaaatataagagccaccatgccgtcatcagtgtcgtgggggattcttctgttggctggactttgttgcctcgtccccgtaagcctggcgcacgccgagggtacgtttacatccgacgtgtcgtcgtacctcgaaggccaggcggcaaaggagttcatcgcctggttggtcaggggacgggggtgataagctgccttctgcggggcttgccttctggccatgcccttcttctctcccttgcacctgtacctcttggtctttgaataaagcctgagtaggaag

SEQ ID NO: 1645 - RNA, 3002 nt, synthetic construct
  misc_feature 1..3002: note = source = /note="Description of Artificial Sequence: Synthetic coding sequence"
  source 1..3002: mol_type = other RNA
gggaaataagagagaaaagaagagtaagaagaaatataagagccaccatgggggtgcggcacccgccttgttcgcatcggctcctcgctgtgtgtgcattggtgtcgctggcgacagcggcgctccttggtcacattttgttgcacgactttctcctggtgcccagagagttgtccggatcgtcccccgtgttggaggaaactcatcccgcacaccagcagggggcctcgcgccctgggccacgcgacgcccaagcccaccccggtagaccaagggcagtacccacacagtgtgatgtgccaccaaactcgagattcgattgtgcgccggacaaagctattacccaagaacagtgcgaagcgagagggtgctgttacatccccgcaaaacaaggactccagggtgctcagatgggacagccctggtgcttctttcctccctcgtatccaagctataagttggaaaatctgtcctcatcggaaatgggatatacagcaacactgacaaggacgactccgacattcttcccgaaggacattcttacattgaggttggacgtcatgatggaaacggaaaaccggctccacttcacgatcaaggacccggcgaaccgcagatacgaggtcccactcgagacaccccatgtgcacagcagggctccctcgccgttgtattcggtcgaattttcggaagagcccttcggagtgatcgtccggaggcagctggatggtagggtgctcttgaatacgaccgtcgcaccgttgttctttgcggatcagtttctccaactttcaacttcgttgccgtcgcagtacatcacgggactcgcagagcatctctcaccgctcatgctgagcacttcgtggacgaggatcacgctgtggaacagagacttggcgccaacgcctggggcgaacctttacgggagccaccctttctatcttgcgctcgaggatgggggatcggcacacggggtctttctgctcaactcaaacgctatggacgtcgtcttgcagccgtcgccggctctgtcatggcggagcacgggtggtattctggacgtgtacatcttcctcggccctgaaccaaagtcggtggtgcagcagtaccttgacgtcgtcgggtacccattcatgcccccgtattggggactgggttttcatctctgccgctgggggtactcctcgaccgctatcacccgccaagtggtggagaacatgacgcgggcacatttccccttggatgtgcaatggaatgaccttgactacatggattcaaggagggatttcaccttcaacaaagacgggtttcgggacttccccgcgatggtgcaagaactgcaccagggaggaagaagatacatgatgatcgtagatcccgcgatcagctcctccggaccggcaggatcgtacagaccctatgacgaaggcttgcgacgcggagtgttcatcaccaacgaaacagggcagcctctcattgggaaggtgtggcccggtagcactgcctttcctgacttcaccaatccgactgccttggcgtggtgggaagatatggtggcggagttccatgaccaggtgccctttgatggtatgtggatcgatatgaacgagccctcaaatttcatccggggatcggaagatggctgcccaaacaacgaactcgaaaacccgccttacgtaccaggggtcgtaggaggaacgctccaggccgcgacaatctgcgcgtcgtcgcaccaattcctgtcaacccactacaatttgcataatctctatggactgacggaggccattgcatcacatcgagctttggtgaaggcgagaggaacacggccgtttgtgatctcgcgctccacgttcgcgggacacgggaggtacgcagggcactggacgggagatgtctggagcagctgggaacaattggcgtcgtcggtaccggaaattctgcagttcaacctcttgggagtccctctggtaggtgccgacgtctgtggatttctcgggaacacctccgaggaactgtgcgtccgatggacgcagttgggagcgttttacccgttcatgcgaaaccacaactcactgttgtcactccctcaagagccatattcgttctcggagccggcacaacaagcgatgcgcaaagcgctcacacttcgctacgcccttttgccgcatctgtacaccctttttcaccaggcgcacgtagccggggaaactgtggcgaggcccttgttcctcgaatttccgaaggactcatcgacttggacagtcgatcaccaacttttgtggggagaggcgttgttgattacaccggtgctgcaggccggaaaagccgaggtaacagggtattttcctttgggtacgtggtacgacctccagacggtccccgtggaggcgcttgggtcgcttcctccacccccagcagcccctcgcgagcccgcgatccattcggagggacaatgggtgactcttcccgctccgcttgacacaattaacgtgcatcttagagccggatatatcattccgttgcagggaccgggcctcacaacaacggagtcgcgccagcagccgatggcactcgctgtagcgttgactaaagggggagaagctcggggagagctcttttgggatgacggcgagagcctcgaagtacttgagcgcggtgcctatacacaagtcatttttctcgcacgcaataacacaatcgtgaacgagctcgtaagagtcacaagcgaaggagccgggcttcaactccagaaggtaacagtcttgggcgtagccaccgctccccagcaggtcctgtcaaacggagtaccggtcagcaatttcacgtactcgccggacacgaaggtgttggatatttgcgtcagcctgcttatgggagaacagtttcttgtaagctggtgctgaagcgctgccttctgcggggcttgccttctggccatgcccttcttctctcccttgcacctgtacctcttggtctttgaataaagcctgagtaggaag

SEQ ID NO: 1646 - RNA, 1754 nt, synthetic construct
  misc_feature 1..1754: note = source = /note="Description of Artificial Sequence: Synthetic coding sequence"
  source 1..1754: mol_type = other RNA
gggaaataagagagaaaagaagagtaagaagaaatataagagccaccatggagttctcatccccctcgcgggaggaatgtcctaagccgttgtcccgggtgtcgattatggcagggagcctgaccggattgttgttgctgcaagcggtgtcgtgggcctcgggcgcacgaccctgcatccccaagtcctttgggtacagctcagtggtctgtgtgtgcaacgcgacctattgtgactcctttgatcccccgacttttccggccctgggtacattctcaagatatgagtcaaccagaagcggtcgccgcatggaactttcaatggggcccattcaggccaatcacactgggactggtctgctcttgactcttcagcctgagcagaagttccagaaggtcaagggtttcggcggtgcgatgacagacgcggctgcattgaatattctcgcgctgagcccgcctgcgcagaacctgcttctcaagtcgtacttctcggaggaaggtatcgggtataacattatccgagtaccaatggcgtcatgcgatttttcgattcgcacctacacgtacgctgacacgcctgacgatttccagttgcacaacttctcgctgccagaggaggacacgaaactgaaaattcccctcatccatagagcactgcagctcgcacaacggcccgtctcccttcttgcgagcccgtggacatcacccacctggttgaaaacgaacggcgcagtgaacgggaaaggaagccttaaggggcagcctggtgatatctaccaccagacatgggcacgatactttgtaaagttcttggacgcgtacgcagagcacaaacttcagttctgggcggtcactgccgaaaatgagccctcggcgggacttctgtcgggatatccgtttcagtgcttgggattcacgccggagcaccagagggatttcatcgctcgggatttgggtcccacactggcgaatagcacacaccataacgtacggcttttgatgctcgacgatcagcgactgctgctccctcactgggccaaagtggtactgaccgaccccgaggccgccaaatatgtgcatggaattgccgtgcactggtatctcgactttttggcaccggcgaaagcgactttgggcgaaacgcatcgcctcttcccgaatacgatgttgttcgcctcggaagcgtgtgtgggatcgaagttttgggaacaatccgtcaggttggggagctgggatcgggggatgcaatactcgcattcaatcatcaccaatcttttgtatcatgtggtaggatggacggactggaatctggcgcttaacccggaaggaggacctaattgggtgaggaatttcgtagactcgccgatcatcgtcgacatcacgaaggacacgttttacaaacagccgatgttttaccatcttggacacttttccaagtttatcccggaagggagccagagggtcggactcgtggcctcccaaaagaacgacctcgatgccgtcgcgctgatgcacccagatgggtccgctgtcgtggtcgtgcttaacagatcgtcaaaagatgtgcccctcactatcaaagatcccgcggtaggcttcttggaaacaatctcgccaggatactcaattcatacatatctgtggcgcaggcagtgataagctgccttctgcggggcttgccttctggccatgcccttcttctctcccttgcacctgtacctcttggtctttgaataaagcctgagtaggaag

SEQ ID NO: 1647 - RNA, 494 nt, synthetic construct
  misc_feature 1..494: note = source = /note="Description of Artificial Sequence: Synthetic coding sequence"
  source 1..494: mol_type = other RNA
gggaaataagagagaaaagaagagtaagaagaaatataagagccaccatggactactataggaagtacgctgcaatctttctcgtaacactttcagtctttctccatgtgctgcattcggcccctgatgtgcaagactgtccagaatgcacgctgcaagagaacccgttcttcagccagcccggagcgcccattttgcagtgtatggggtgttgcttttcacgggcctatccgacgccccttagatcgaagaaaaccatgttggtgcagaagaacgtaacctcggagtccacttgttgcgtggcgaaatcgtacaatcgcgtaacagtcatgggcggtttcaaggtcgaaaatcacacagcgtgccactgcagcacgtgttactatcacaaatcctgataagctgccttctgcggggcttgccttctggccatgcccttcttctctcccttgcacctgtacctcttggtctttgaataaagcctgagtaggaag

SEQ ID NO: 1648 - RNA, 797 nt, synthetic construct
  misc_feature 1..797: note = source = /note="Description of Artificial Sequence: Synthetic coding sequence"
  source 1..797: mol_type = other RNA
gggaaataagagagaaaagaagagtaagaagaaatataagagccaccatggccactgggtcgaggaccagcctgttgttggcctttgggctgctttgtctgccatggctccaagagggatccgcattcccgacaattcccctctcaagactgtttgataacgctatgctccgagcccaccggctgcaccagctggcgttcgatacataccaagaattcgaggaagcatacatccccaaagagcagaagtattcgttccttcaaaatcctcagacatcgctttgtttctcggagtcaattccgacgcccagcaatagggaagaaacgcagcagaagtcgaaccttgagttgttgcggattagcttgctcctgatccagtcatggctcgaaccggtgcagttcttgcgctcggtgtttgcgaactccctggtatatggtgcgtccgattcaaatgtctacgacttgctcaaggatcttgaagaggggatccaaactctcatgggtaggcttgaggacggctcgcctcgcacgggacagatctttaagcagacgtattcgaaatttgacaccaattcacataacgacgacgcgttgctcaaaaactatggattgctctactgctttcggaaggacatggataaagtggagacattcttgagaatcgtccagtgcagatccgtagagggatcatgcggtttttgataagctgccttctgcggggcttgccttctggccatgcccttcttctctcccttgcacctgtacctcttggtctttgaataaagcctgagtaggaag

SEQ ID NO: 1649 - RNA, 896 nt, synthetic construct
  misc_feature 1..896: note = source = /note="Description of Artificial Sequence: Synthetic coding sequence"
  source 1..896: mol_type = other RNA
gggaaataagagagaaaagaagagtaagaagaaatataagagccaccatggaaaaagggcccgtccgagcacccgcggagaagccgagaggtgcacggtgcagcaatggcttcccggagcgggacccacctcggccaggacccagcagaccggcggagaaaccgcctaggcccgaggccaagtcagcgcaacccgcggacggatggaagggagagcgccctcgatccgaagaagataatgagctgaaccttcctaatcttgctgcagcgtattcctcaatcctctcgtcgctgggtgaaaacccccagcgccagggactgttgaaaacgccgtggagagccgcgtcagcaatgcagtttttcacgaaagggtaccaggaaaccatttcggacgtgctcaacgatgccatctttgacgaagatcacgatgagatggtaattgtgaaagacattgacatgttttccatgtgtgaacaccatctggtcccgttcgtcggtaaagtgcatatcgggtatttgccgaacaagcaagtgttgggattgtcgaagcttgcgaggatcgtagagatctactcacggcgactgcaggtgcaggagagactcactaaacagattgcggtcgccatcacggaagccttgcggccagcgggggtgggggtggtagtcgaggctacacacatgtgcatggtcatgcgcggagtgcaaaagatgaattccaagacagtcacctcgacgatgttgggcgtattcagggaagatcccaagactcgcgaggagtttcttacactcatcagatcatgataagctgccttctgcggggcttgccttctggccatgcccttcttctctcccttgcacctgtacctcttggtctttgaataaagcctgagtaggaag

SEQ ID NO: 1650 - RNA, 800 nt, synthetic construct
  misc_feature 1..800: note = source = /note="Description of Artificial Sequence: Synthetic coding sequence"
  source 1..800: mol_type = other RNA
gggaaataagagagaaaagaagagtaagaagaaatataagagccaccatggcaacacggtcaccaggcgtggtcatcagcgacgacgagcccggttatgatcttgatcttttctgtatccccaatcactatgcggaagatttggagagagtgtttatccctcacggattgatcatggatagaaccgaaagacttgctcgcgatgtcatgaaggaaatgggtggacatcacatcgtggcgctctgcgtactcaagggcgggtataagttctttgcagacttgcttgattacatcaaagccctgaaccgcaactcggataggtccattccgatgactgtagactttatccgcctcaagtcgtactgtaacgaccaaagcacaggggacattaaagtcatcgggggtgacgacctgtcaacgctgactggaaagaatgtactcatcgtggaggacatcattgatacgggaaagacgatgcagaccctgctctcattggtccggcagtacaatcctaaaatggtgaaagtagcctccctgcttgtcaagaggacgccgcgatcggtggggtacaaacccgattttgtcgggttcgagattcccgacaagttcgtagtgggatatgcgctcgactacaatgagtatttccgagatttgaaccatgtgtgcgtcatttcggaaacaggaaaagccaagtacaaagcgtaatgagctgccttctgcggggcttgccttctggccatgcccttcttctctcccttgcacctgtacctcttggtctttgaataaagcctgagtaggaag

SEQ ID NO: 1651 - RNA, 1796 nt, synthetic construct
  misc_feature 1..1796: note = source = /note="Description of Artificial Sequence: Synthetic coding sequence"
  source 1..1796: mol_type = other RNA
gggaaataagagagaaaagaagagtaagaagaaatataagagccaccatgccgcctccacgaacggggagaggattgctgtggctgggactggtattgtcatccgtatgcgtggcccttggatcagaaacccaggccaacagcacgaccgatgccctcaatgtattgttgattatcgtcgatgacctcaggccctcccttgggtgttacggggacaagttggtcagatcgcccaatattgaccaactcgcgtcgcattcgctcttgtttcagaatgcctttgctcagcaggcagtgtgcgccccaagccgggtgtcctttttgaccggacgcaggccagatacaacgcgcctgtatgacttcaattcctactggagggtacatgcgggtaatttctcgacaatcccacagtatttcaaggaaaacggttatgtaacgatgtcagtggggaaggtgtttcaccctggtatctcgagcaaccacaccgacgattcaccctactcgtggtcctttcctccctatcatccctcctcggagaaatacgagaacactaagacttgtagaggccccgatggggagctgcacgctaacttgctgtgccccgtggacgtactggatgtcccagaaggaacattgccggacaaacagtcaacagagcaggcgattcagttgcttgaaaagatgaaaacgtcagcgtcgcctttcttcctcgcggtcggatatcataagcctcacatcccttttcggtatccaaaagagttccagaaattgtacccgctcgaaaacattactcttgcgcccgaccccgaggtgccagacggacttccccctgtagcatacaatccctggatggacatccggcagcgggaggacgtccaggcacttaacatctccgtcccgtatggtccgatcccggtggatttccagcgaaagattagacagagctatttcgccagcgtgtcgtacttggatacccaagtgggtaggctgctttccgccctcgatgatctgcagctcgcaaattcaacaattatcgcgttcacgtcagaccatgggtgggcgctcggagaacatggcgagtgggccaagtattccaacttcgacgtagctacacacgtccctctgattttctacgtgcccggacgcacggcgtcgctccccgaggcaggggagaaactgttcccttacttggacccgttcgactcagcctcacagcttatggaacccgggagacagagcatggatcttgtggagctcgtctcgctctttccgacacttgcgggccttgcggggctccaagtgccaccgcgctgtcccgtgccgtcgtttcacgtcgaactgtgcagagagggtaaaaacttgctgaagcattttcggttccgggatctcgaagaagatccctatctccccggaaatccgcgagagctgatcgcatactcccagtacccacgcccctccgacatccctcaatggaactcggacaagcccagccttaaagacatcaagattatgggctattcgatcaggactattgattacagatacacggtctgggtcggctttaacccggatgaatttctcgctaacttctcagacatccacgctggtgagctgtattttgtggattcagacccgctccaagatcacaatatgtacaacgatagccaaggaggggatctttttcagttgttgatgccgtgataagctgccttctgcggggcttgccttctggccatgcccttcttctctcccttgcacctgtacctcttggtctttgaataaagcctgagtaggaag

SEQ ID NO: 1652 - RNA, 2105 nt, synthetic construct
  misc_feature 1..2105: note = source = /note="Description of Artificial Sequence: Synthetic coding sequence"
  source 1..2105: mol_type = other RNA
gggaaataagagagaaaagaagagtaagaagaaatataagagccaccatgcggccactcaggcccagggcagcccttctcgctctgctcgcgtcacttctcgcggcaccacccgtggcgccagctgaagcgccacacctggtacacgtcgatgccgcgagggcactctggccccttagacggttctggcggtcgactgggttctgtccaccccttccccattcccaagcagatcagtatgtcttgtcatgggaccagcagctgaacctggcatacgtgggagccgtcccgcacaggggcatcaagcaggtcagaactcactggctcttggagttggtaacgacacggggaagcacgggaagggggctctcatacaacttcacgcatctcgacgggtacttggatttgcttcgcgagaatcaactgctgccagggttcgagcttatggggtcggcctcgggacatttcacggacttcgaggacaagcagcaagtctttgagtggaaagatctcgtatcatcacttgcgcgcagatacatcggacggtatggattggcgcacgtatcgaaatggaatttcgaaacgtggaacgagcccgaccaccacgattttgacaacgtgtcgatgacaatgcaggggttcttgaactactatgatgcgtgcagcgaaggtcttagagccgcgtcccctgcgttgcgcctgggtggaccaggggacagcttccacacacccccgagatcaccgctgtcgtgggggcttttgcgacattgtcacgacggaaccaacttctttactggagaggctggtgtgagactggactacatctccctgcatcgcaagggagcgcggagctcgatctcgattcttgaacaggagaaggtagtggcacagcagattcggcagctcttccccaaattcgccgacacgcctatctacaacgatgaagcggatcccctcgtcggttggtcactcccccaaccttggcgagcggacgtgacgtatgccgccatggtggtaaaggtgatcgcgcaacaccagaatttgctgttggcgaatacaacatcagcgttcccatatgcgttgttgtccaacgacaatgccttcctgtcgtatcacccccatccctttgcgcagaggacactgacagcacggtttcaagtcaacaatacgaggccaccccatgtgcagctcttgagaaagccggtgttgaccgccatggggctcttggcactgctggatgaagaacagctttgggccgaggtgtcacaggcgggtactgtgttggattcaaaccacacagtgggggtactcgcgtccgcgcacagaccgcagggacccgcagacgcgtggagagctgcagtacttatctacgcgtcggacgacacgagagcccatccgaatcgctccgtggccgtaaccctgcggttgcgcggagtcccgcctggtcccggacttgtctacgtcaccagatatctcgataatggactgtgcagccccgacggggagtggcgacggctggggcgacccgtctttccgactgctgaacagtttagaagaatgcgagcagccgaagatcccgtcgccgctgcacctcgacctcttcccgctggtggacgattgacgctccgccctgcccttcgccttccctcgttgcttctggtgcatgtgtgtgccaggcccgagaaaccaccgggacaggtgacaaggcttagagcgctcccgctgacgcaagggcaactggtgttggtgtggtcggacgagcacgtagggtccaagtgcctctggacatatgagattcagtttagccaggatgggaaggcatatactcctgtctcacgaaaaccttcgaccttcaatctttttgtctttagccccgacactggggctgtatccggatcgtaccgggtgagggcgttggattactgggctaggcctggcccgtttagcgatccagtgccgtacttggaagtccctgtccccagaggaccgcctagccctggtaacccgtgataagctgccttctgcggggcttgccttctggccatgcccttcttctctcccttgcacctgtacctcttggtctttgaataaagcctgagtaggaag

SEQ ID NO: 1653 - RNA, 476 nt, synthetic construct
  misc_feature 1..476: note = source = /note="Description of Artificial Sequence: Synthetic coding sequence"
  source 1..476: mol_type = other RNA
gggaaataagagagaaaagaagagtaagaagaaatataagagccaccatggctctctggatgcggcttcttccactgctcgccctcttggcgttgtggggacccgaccctgcagcagcgtttgtgaatcagcacctctgcgggtcccatctggtcgaagccctttaccttgtgtgtggcgagcgcgggttcttctacacgcccaagacaaggcgcgaggcggaggatctccaagtagggcaggtggaattgggagggggaccgggagccggttcactccagcccctggcgttggaggggtcgctgcagaaaagaggtattgtcgaacagtgttgcactagcatctgctcgctgtatcaacttgagaactattgtaactgaagcgctgccttctgcggggcttgccttctggccatgcccttcttctctcccttgcacctgtacctcttggtctttgaataaagcctgagtaggaag

SEQ ID NO: 1654 - RNA, 710 nt, synthetic construct
  misc_feature 1..710: note = source = /note="Description of Artificial Sequence: Synthetic coding sequence"
  source 1..710: mol_type = other RNA
gggaaataagagagaaaagaagagtaagaagaaatataagagccaccatggccttgacgttcgcccttctcgtagccctgttggtgctctcatgcaaatcgtcctgttccgtcggatgcgatcttccccagacgcattcgctggggtcgcgcagaactctcatgttgttggcgcagatgaggcgaattagccttttctcgtgtcttaaggaccggcacgattttggtttccctcaagaggagtttggcaaccagttccagaaggcggaaacaatccccgtactccacgagatgatccagcagatcttcaacctgttttccacgaaggactcctcagcggcttgggacgaaaccctgctggataagttttacacggagctctatcagcagctgaatgacctcgaagcatgtgtgattcaaggagtgggggtcaccgagacaccgcttatgaaggaagattcaatccttgcagtgcggaaatactttcagaggatcactttgtatcttaaagagaaaaagtacagcccgtgcgcgtgggaagtcgtgagagcggagattatgcgaagcttctcgctgagcacaaatttgcaagagtcgctccgctcaaaagaatgataagctgccttctgcggggcttgccttctggccatgcccttcttctctcccttgcacctgtacctcttggtctttgaataaagcctgagtaggaag

SEQ ID NO: 1655 - RNA, 707 nt, synthetic construct
  misc_feature 1..707: note = source = /note="Description of Artificial Sequence: Synthetic coding sequence"
  source 1..707: mol_type = other RNA
gggaaataagagagaaaagaagagtaagaagaaatataagagccaccatgaccaacaagtgtctgctccagatcgcactcttgttgtgcttctcgacgactgccctttcgatgtcatacaatctgctgggattccttcagaggagctcgaattttcagtgtcagaagttgttgtggcaactcaatgggcgactcgagtactgcttgaaagatcggatgaactttgacattcccgaagaaatcaagcaactgcagcaattccagaaagaggacgcggctctgacaatctacgagatgcttcagaacattttcgcgatcttcagacaggacagctcatccacgggctggaacgagacaatcgtagaaaacctgctcgcaaacgtctatcaccagattaatcacctcaagacagtgcttgaggagaagcttgaaaaagaagatttcactcgcgggaaactgatgtcctcgctccatttgaaaaggtactatggaaggattttgcactatctcaaggccaaggagtattcccattgcgcgtggaccatcgtgcgcgtcgagatccttcggaacttttactttatcaatcggttgacgggttacctcagaaattgataagctgccttctgcggggcttgccttctggccatgcccttcttctctcccttgcacctgtacctcttggtctttgaataaagcctgagtaggaag

SEQ ID NO: 1656 - RNA, 677 nt, synthetic construct
  misc_feature 1..677: note = source = /note="Description of Artificial Sequence: Synthetic coding sequence"
  source 1..677: mol_type = other RNA
gggaaataagagagaaaagaagagtaagaagaaatataagagccaccatgtttcacgtgtcatttcggtatatctttgggctgcctccgcttatcctcgtactcctccccgtggcctcctcagactgcgacattgaggggaaagacgggaagcagtacgaatcggtacttatggtcagcatcgaccagctcttggactcgatgaaggaaatcgggtcgaattgtctgaacaatgagttcaacttcttcaagcgacatatctgtgatgctaacaaagagggaatgttcctgtttagagcggcgagaaaactgcgccagtttttgaagatgaattcaaccggtgatttcgatcttcacctgcttaaagtgtccgagggtacaactatcctccttaactgcacgggacaggtcaagggacggaaaccggcagcgctcggagaagcccaacccacaaagtcgctggaggaaaacaagagcttgaaggaacagaagaaattgaatgatctctgcttcttgaaaaggttgcttcaagagattaagacgtgttggaataagattttgatgggcacgaaagagcattgataagctgccttctgcggggcttgccttctggccatgcccttcttctctcccttgcacctgtacctcttggtctttgaataaagcctgagtaggaag

SEQ ID NO: 1657 - RNA, 1343 nt, synthetic construct
  misc_feature 1..1343: note = source = /note="Description of Artificial Sequence: Synthetic coding sequence"
  source 1..1343: mol_type = other RNA
gggaaataagagagaaaagaagagtaagaagaaatataagagccaccatgaagatgcgctttctcgggctcgtagtatgcctggtcctctggacgctgcactcggagggatccaggggaaagctgacggccgtagaccccgaaacgaatatgaatgtctcggagattatctcctattggggctttccgtcagaggagtatctggtagagacagaggatggttacatcttgtgtctcaaccggatcccccacggacggaaaaaccactcggataaaggaccgaagccggtcgtgtttcttcagcacggacttctggccgactcctcgaattgggtgacgaatttggcgaactcctcgttggggtttatcctcgcggacgccggatttgatgtgtggatgggcaactcgcgaggtaacacgtggtcaaggaaacataaaaccctgtcagtctcgcaagacgagttctgggcattctcgtacgatgaaatggcgaagtatgacctgcccgcgtcaattaacttcatcctcaataagaccggacaagaacaggtatactatgtgggccatagccagggaacaacgatcgggtttatcgctttcagccagatcccggagctcgctaagcgcatcaagatgttcttcgcgctcgggcctgtggcgtcagtggcgttctgcacgtcgcccatggcaaaattgggtagattgcccgaccatcttatcaaagatctgtttggggataaggaatttctgccgcagtcggccttcctcaaatggttggggacacacgtctgtactcacgtgattttgaaagaactttgcgggaacttgtgcttcttgctttgtggattcaatgagcggaatttgaatatgtcaagagtcgatgtctacaccacccattcaccagcaggaacatcagtccagaatatgctgcattggtcccaagcggtcaaattccagaagttccaagcatttgactggggctcgagcgccaaaaactatttccactataaccagtcgtacccgcctacttacaatgtaaaggacatgcttgtccccactgcggtgtggagcggtgggcacgattggcttgcggacgtgtatgatgtgaacattcttctcacacagatcacaaacctggtgtttcatgagtccattcccgaatgggaacacctcgacttcatctggggtttggacgccccttggaggctctacaacaagattatcaacttgatgcgaaagtaccagtgataagctgccttctgcggggcttgccttctggccatgcccttcttctctcccttgcacctgtacctcttggtctttgaataaagcctgagtaggaag

SEQ ID NO: 1658 - RNA, 2396 nt, synthetic construct
  misc_feature 1..2396: note = source = /note="Description of Artificial Sequence: Synthetic coding sequence"
  source 1..2396: mol_type = other RNA
gggaaataagagagaaaagaagagtaagaagaaatataagagccaccatgttgcgcgccaaaaaccagctttttcttctgtcacctcactaccttcgccaggtgaaggaatcatccggcagcagactgatccagcagcgcctgctgcaccagcaacaaccccttcaccccgagtgggccgcactcgctaagaagcaacttaaagggaaaaacccggaggaccttatctggcacaccccagagggaatctcaatcaaaccactctactcaaaaagagataccatggatctgccggaggagttgcccggagtaaagccgttcacgagaggaccctatcccaccatgtacacctttagaccctggactatccgccagtacgccgggttcagcacagtagaagagtcaaacaagttttacaaagacaacatcaaggctgggcagcaggggttgtcggtagccttcgacctcgcgacgcatcgcggctacgactccgacaatccgagggtcagaggggacgtgggtatggcgggagtagcaatcgataccgtcgaggacactaagattttgttcgatgggattcctctggagaaaatgagcgtgagcatgacgatgaatggggccgtaattccggtcttggcgaactttatcgtcactggagaagaacagggagtcccgaaggaaaagctcaccgggactatccagaacgacattttgaaagagttcatggtccgcaacacttacatctttccgcctgagccttcgatgaaaatcatcgccgacatcttcgagtatacggctaaacacatgccgaagtttaactcgatttcaatttcagggtatcatatgcaagaagcaggagcggatgcaatccttgagttggcgtatacgttggcggacggccttgaatatagcaggaccgggctgcaagcgggactcacaattgacgagttcgcacccagactgtcgtttttctggggtattgggatgaatttctatatggagattgccaaaatgcgggcaggacgcagactctgggcccatctcatcgagaaaatgtttcaacccaaaaactcaaagtcgctcttgcttcgggcgcactgccagacgtcgggatggagcttgacagagcaggacccctacaataacatcgtacggacagcaatcgaggcgatggcagcggtgtttgggggaacgcagagcctccatacaaattcctttgatgaggcgctgggattgcccacggtcaaatcagcccgaatcgcgaggaatactcagatcatcatccaagaagaatcgggaatcccgaaggtggcagacccctggggtggatcgtacatgatggagtgtctgacaaatgacgtgtacgatgcggcgctgaaactcatcaacgagatcgaggagatgggagggatggccaaggcggtggcagaagggattcctaagctgcgaattgaggaatgcgcagcgcggaggcaggcgcggatcgactcgggctccgaggtgattgtgggggtcaacaaatatcagcttgagaaggaggacgccgtagaagtgctggctatcgacaatacgtcagtgcggaatagacagatcgaaaagttgaagaaaatcaagtcgagccgcgaccaggcactggcagaaaggtgcttggcagccctgacggaatgtgcggcgtcaggtgatgggaacatccttgcgttggccgtcgatgcctcaagagcacgctgtacagtgggggagatcactgacgctttgaagaaggtatttggagagcataaggcaaatgatcggatggtatcgggtgcctatcggcaggagtttggtgaaagcaaggagatcacgtcagcgatcaagagggtacacaagttcatggagagagagggaaggcgaccccgcttgcttgtagccaagatgggacaagatggacacgatagaggcgcgaaggtgatcgcgacggggtttgcggatctcggtttcgacgtagatattggaccccttttccagacacctcgcgaagtcgcgcagcaggcagtcgatgctgatgtccacgcagtgggaatttcgacattggcggcagggcataaaacccttgtcccagagctcatcaaggagcttaattccctcggtagacctgacattctggtgatgtgcgggggagtgattccgccccaagattacgagttcttgttcgaggtcggagtcagcaacgtgtttgggccaggtacaagaatccccaaagccgcagtgcaagtgctcgatgacattgagaagtgtctcgaaaagaaacaacagtccgtctaatgagctgccttctgcggggcttgccttctggccatgcccttcttctctcccttgcacctgtacctcttggtctttgaataaagcctgagtaggaag

SEQ ID NO: 1659 - RNA, 1208 nt, synthetic construct
  misc_feature 1..1208: note = source = /note="Description of Artificial Sequence: Synthetic coding sequence"
  source 1..1208: mol_type = other RNA
gggaaataagagagaaaagaagagtaagaagaaatataagagccaccatgctctttaacctccgcatcctgttgaataacgctgcgttccgaaatgggcataacttcatggtacgcaacttcagatgcggccagccactccagaacaaggtgcagcttaaaggtcgggacctccttactctgaagaactttaccggagaagagatcaagtacatgctgtggctttcagcggatttgaagtttcgcattaaacagaagggagagtatcttcccctcttgcaagggaagtcgctcgggatgatcttcgagaagcgctcgacaaggacccggctcagcaccgaaaccggatttgcgctgttgggagggcacccgtgttttctcacgacgcaagacattcacttgggagtgaatgagtcgttgacagacactgccagagtcctttcatcgatggccgatgcggtgcttgcgagggtctacaaacagtcggatcttgacacactggccaaggaagcctcgatcccgatcattaacgggctctcggatttgtaccacccaatccagatcttggcggattatcttacattgcaagagcattattcctccctcaaggggctgactctcagctggattggtgacggaaataacatcctccattcaatcatgatgagcgcagcgaaattcggaatgcacctccaagcggccacgcccaaaggttatgaacctgatgcgagcgtaactaaactcgcggagcagtatgcaaaggaaaatggcacgaaactcttgctcacaaatgaccccttggaggcagcacacggtggtaatgtcctgattacagacacatggatctccatggggcaggaggaggagaaaaagaaaagacttcaggcatttcagggataccaggtaacgatgaaaacggcgaaggtcgccgcctcagactggactttcctccattgcctgccgaggaagccggaagaagtcgatgatgaggtgttttacagcccccgatccctggtgttccctgaagccgaaaatcggaagtggacaattatggcagtgatggtgtcccttcttacggactactcgccccagctgcaaaaaccgaaattctaatgagctgccttctgcggggcttgccttctggccatgcccttcttctctcccttgcacctgtacctcttggtctttgaataaagcctgagtaggaag

SEQ ID NO: 1660 - RNA, 1502 nt, synthetic construct
  misc_feature 1..1502: note = source = /note="Description of Artificial Sequence: Synthetic coding sequence"
  source 1..1502: mol_type = other RNA
gggaaataagagagaaaagaagagtaagaagaaatataagagccaccatgtccaccgcagtgcttgaaaatccggggttgggccggaagctctccgacttcggacaggaaacgtcgtatatcgaggataattgcaaccagaatggggccatctcgctcatcttctcactgaaagaagaggtgggagccttggctaaagtcttgagactgttcgaagagaacgatgtgaatctcacgcacatcgaaagccgcccaagcagattgaaaaaggacgagtacgagttctttacacatttggacaaaaggtcgctgcctgcgctcacaaatatcattaagattctccgccatgatatcggagcaacagtccacgaactttcgagggacaagaagaaagatacggtgccctggttcccgagaaccatccaagagctcgaccgatttgcgaaccagattctttcgtatggagcggaactcgacgccgatcatccagggtttaaggacccggtgtacagggcacgacgcaagcagttcgccgatattgcctataactatcgccatggtcaaccgattccacgggtagaatacatggaagaggagaaaaagacttgggggactgtgttcaagacgttgaagtcgctctataagacgcacgcatgctatgaatacaaccatatcttccctctgctcgagaagtattgtggattccacgaggataacattccccagctcgaggacgtaagccagttccttcagacatgcacggggtttagacttaggcccgtcgcgggacttctttcctcgagagatttcctcgggggtttggcatttcgagtctttcactgtacccagtatattcggcacggttccaaacctatgtacacccccgagccggatatctgccatgaattgctgggacacgtaccactgtttagcgaccggagctttgctcagtttagccaggagatcggattggcatcattgggtgcgcccgacgagtacattgagaaactggcgactatctactggtttacggtggaatttggcctgtgcaagcaaggcgattcaatcaaggcgtacggtgcggggttgctctcgtcgttcggggaactgcaatactgtctttcggagaaaccgaaactccttcccctcgagttggaaaagacggctatccagaattacactgtaacggagttccagcccttgtattacgtcgccgagtcctttaatgacgccaaagagaaagtgagaaacttcgcggcgacaatcccccgaccattttcggtccggtacgatccttatacacagcgcattgaggtccttgacaatactcaacagctgaagatcctcgccgattcaattaactcagagatcggaattctctgttcagcgctccagaagatcaagtgataagctgccttctgcggggcttgccttctggccatgcccttcttctctcccttgcacctgtacctcttggtctttgaataaagcctgagtaggaag

SEQ ID NO: 1661 - RNA, 1832 nt, synthetic construct
  misc_feature 1..1832: note = source = /note="Description of Artificial Sequence: Synthetic coding sequence"
  source 1..1832: mol_type = other RNA
gggaaataagagagaaaagaagagtaagaagaaatataagagccaccatggatgccatgaaacgggggttgtgttgcgtacttcttttgtgcggagcggtgttcgtgtccccgtcgcaagagatccacgcgcgattcagaaggggtgcgcggagctaccaggtcatctgccgagatgagaaaactcagatgatctaccaacagcatcagtcctggctgcggcctgtactgcgctccaaccgagtggaatactgctggtgtaatagcggcagggcccagtgccattcagtaccggtaaagtcgtgctcggaaccgcgctgctttaatggcgggacatgtcagcaggcgctttacttctccgatttcgtgtgtcagtgcccagaagggttcgcgggcaaatgctgcgaaatcgacacacgggcgacgtgttatgaagatcagggaattagctaccggggtacgtggtcgacggccgagtcgggggcagagtgtaccaactggaacagctcggcgctggcgcagaagccctattcgggacgaaggccggacgccatcagattgggacttggaaatcacaactactgtcgcaaccctgacagagactcaaaaccctggtgttatgtctttaaggcggggaaatactcatcggagttctgctcgacccccgcatgctcagagggtaactcggattgctattttggaaatggttccgcctaccgcggaacgcactccttgactgaatcgggtgccagctgtctgccctggaactcaatgatcctgatcggaaaagtgtacaccgcgcagaacccaagcgcacaggcacttggactcggtaaacacaattactgccgcaatcccgacggggatgcgaagccctggtgtcacgtcttgaagaatagaaggctcacgtgggagtattgtgacgtccccagctgctcaacgtgtgggctcaggcagtattcacagccgcagttccggatcaagggtggactttttgcagacatcgcatcgcacccctggcaggctgccatctttgcgaagcatcgacggagcccgggagagcgcttcttgtgtggcgggattctcatttcatcatgctggattctctcggcggctcactgctttcaagaacgatttcccccgcaccatttgacggtcattctcgggagaacgtaccgcgtagtgccgggagaggaagaacaaaagttcgaggtggagaagtatatcgtgcataaagagttcgacgacgacacgtatgacaacgatatcgctctgctccagttgaagagcgattcatcgcggtgtgcacaagagtcatccgtagtcagaacggtatgcctgccccctgctgacttgcagctgccagattggacagaatgcgagctttcgggatatggaaagcatgaagccttgagcccgttctattcggagcggttgaaagaggcccatgtgcgcctgtacccatcgtcacgctgtacatcccagcaccttctcaaccggaccgtgaccgacaacatgctttgtgcaggggatacaaggagcgggggaccccaggcgaatttgcacgatgcctgtcaaggtgattcgggtggcccgcttgtctgcctgaacgatgggagaatgacactggtgggaatcatttcgtgggggttggggtgtgggcaaaaggatgtcccgggtgtctacactaaagtgacaaattaccttgactggattagagacaatatgaggccatgataagctgccttctgcggggcttgccttctggccatgcccttcttctctcccttgcacctgtacctcttggtctttgaataaagcctgagtaggaag

SEQ ID NO: 1662 - RNA, 1400 nt, synthetic construct
  misc_feature 1..1400: note = source = /note="Description of Artificial Sequence: Synthetic coding sequence"
  source 1..1400: mol_type = other RNA
gggaaataagagagaaaagaagagtaagaagaaatataagagccaccatgccgtcatcagtgtcgtggggaatccttcttttggcgggactttgctgccttgtgcccgtatcattggccgaagatccccaaggtgacgcggctcaaaagaccgatacatcccaccacgaccaggaccatccgacgttcaataagattacgcccaatttggcggaatttgccttctccctttatagacagcttgcacatcagagcaattcaactaacatcttcttctcgccggtgtcaatcgcaactgcctttgcgatgttgtccctcgggactaaggccgacactcacgatgagatcctcgaagggctcaatttcaaccttactgaaattcccgaggcccagattcacgaggggttccaagagcttctccgcacactcaaccagccggacagccagttgcagctgaccacagggaacggtttgtttttgagcgaaggactgaaacttgtagacaaattcctcgaagatgtgaagaaactttatcactccgaggcgttcacagtgaacttcggagacaccgaggaagcgaaaaagcaaatcaatgactatgtcgagaaagggacacagggcaaaatcgtagacctcgtgaaagagctggacagggatacggtatttgcgttggtgaactacatctttttcaagggaaaatgggagcgaccctttgaggtgaaagatactgaggaagaagattttcacgtagatcaagtgacgacggtcaaagtacctatgatgaagagattggggatgttcaatatccagcattgtaagaaactgtcgtcgtgggtcctgctcatgaaatacctcggaaatgcgactgctatctttttccttcccgacgaaggaaagttgcagcacctcgaaaacgagctgacacatgacattatcacgaagttccttgagaacgaggaccggcgctcggcatccttgcatctgccgaaattgtcgatcaccggtacgtacgatctcaagagcgtccttgggcagcttggaatcaccaaggtattttcgaacggagccgatctttccggtgtgacggaagaggcgccattgaagttgtccaaggctgtgcataaggccgtcctcacaattgatgagaagggaacggaagcggcaggggcaatgtttctcgaggcgatcccaatgtcgattccgcctgaggtcaagttcaacaagccttttgtctttcttatgattgagcagaataccaagtcgcccttgtttatgggcaaagtcgtgaatcctacccagaagtgataagctgccttctgcggggcttgccttctggccatgcccttcttctctcccttgcacctgtacctcttggtctttgaataaagcctgagtaggaag

SEQ ID NO: 1663 - RNA, 1502 nt, synthetic construct
  misc_feature 1..1502: note = source = /note="Description of Artificial Sequence: Synthetic coding sequence"
  source 1..1502: mol_type = other RNA
gggaaataagagagaaaagaagagtaagaagaaatataagagccaccatgtttgacattgagtattttcggaaagaccctaggccgttctttaagtttgccaaagaaatctaccctgggcagttccagcccagcctttgccacaagtttatcgccttgtcggataaagagggaaaattgcttaggaactacacccagaacatcgatacgttggaacaggtcgcagggatccagaggatcatccagtgccacgggtcatttgctactgcatcctgtctcatttgtaagtacaaagtggattgtgaggcggtgcggggagatatctttaatcaagtcgtaccccgatgccctcgctgcccagcggacgaaccattggcgatcatgaagcccgaaatcgtctttttcggcgaaaatctcccagagcagttccatcgcgccatgaagtatgacaaggatgaagtggacttgctgatcgtcatcggctcgtcactgaaagtaagacccgtagcgttgattccctcgtcaattccccatgaggtgcctcaaattctgattaacagggagccccttccccatctccacttcgatgtcgagcttttgggggactgtgacgtcatcattaacgaactgtgtcaccgacttggaggggaatatgcgaaattgtgctgcaacccggtgaaattgtcggagattacagaaaaaccgcccagaacgcagaaagagctggcgtacctctccgagctgcccccgacccctctgcatgtgtcggaggacagctcctcgcccgaacggacctccccaccggactcatcggtcattgtgacgctccttgaccaggcagcgaagtcgaatgatgatctggatgtaagcgagtcaaagggctgtatggaagagaagccccaagaagtgcaaacgtcgcgcaatgtggagtcaatcgccgaacaaatggagaaccctgacctcaaaaacgtaggatcgtcaacaggggaaaagaacgaacggacgtcggtggccggaacagtcagaaagtgctggcctaatagagtagccaaggagcagatctcgcggcgactggatgggaatcaataccttttccttcccccaaacaggtatatcttccacggagcggaggtatattcagattcggaggacgatgtattgtcatcatcgagctgtggatcaaactcggattcgggtacatgccagagcccctcgctcgaggagcctatggaggacgaaagcgagatcgaggagttctacaatggactcgaggacgagcctgacgtcccagaaagggcgggtggagcggggttcggtactgatggagatgaccaagaagcaattaacgaagccatctccgtgaagcaggaagtgacggatatgaactatccgtccaataagtcctgataagctgccttctgcggggcttgccttctggccatgcccttcttctctcccttgcacctgtacctcttggtctttgaataaagcctgagtaggaag

SEQ ID NO: 1664 - RNA, 1502 nt, synthetic construct; identical to SEQ ID NO: 1663
  misc_feature 1..1502: note = source = /note="Description of Artificial Sequence: Synthetic coding sequence"
  source 1..1502: mol_type = other RNA

SEQ ID NO: 1665 - RNA, 1211 nt, synthetic construct
  misc_feature 1..1211: note = source = /note="Description of Artificial Sequence: Synthetic coding sequence"
  source 1..1211: mol_type = other RNA
gggaaataagagagaaaagaagagtaagaagaaatataagagccaccatgtccgtgaattatgccgctggtctttccccgtacgccgataaaggaaagtgtggcctccctgagatttttgacccgccagaggagttggaacgcaaagtctgggagttggccaggttggtatggcagtcgtcatcggtggtatttcatacgggagctggaatttcaacggcatcgggaatcccggattttcggggtccccacggagtctggaccatggaggaaagggggctcgcccctaagttcgatacgacatttgagagcgcacgcccaactcaaacccatatggccctggtgcagctggaaagggtcggacttctccgcttcctcgtgtcgcagaatgtagacggattgcacgtgagatccggattcccaagggataagctggcggagctgcacggtaacatgttcgtcgaggaatgcgcgaagtgtaaaactcagtacgtgcgggatacagtagtcggaacaatgggactgaaggcgaccgggcgactttgtaccgtagcaaaggcgagaggattgagagcgtgccggggtgaattgcgggacacaatcttggactgggaggactcgcttccggatcgagatctggccctcgcggacgaagcgtcgcgaaacgcggacctgtcgattactctgggcacatcactgcaaatccgccccagcgggaacctccctcttgcaacaaaacggcgaggcggtagactggtcattgtcaacctccagccgaccaaacacgaccggcacgccgacttgagaatccatgggtatgtagatgaggtgatgacgcgcttgatgaaacatctcgggttggagatcccggcttgggacgggccaagggtccttgagagggcgctcccgcctttgccaagacccccgacgcccaagctggaaccaaaggaagaatccccgacgagaatcaatggctcaatccccgctgggcctaaacaggaaccgtgcgcgcagcataatgggtccgagcccgcatcacccaaacgagaaaggcccacatcgcctgcaccgcacagacccccaaagagggtaaaagcgaaagccgtgccctcgtaatgagctgccttctgcggggcttgccttctggccatgcccttcttctctcccttgcacctgtacctcttggtctttgaataaagcctgagtaggaag

SEQ ID NO: 1666 - RNA, 2039 nt, synthetic construct
  misc_feature 1..2039: note = source = /note="Description of Artificial Sequence: Synthetic coding sequence"
  source 1..2039: mol_type = other RNA
gggaaataagagagaaaagaagagtaagaagaaatataagagccaccatgccgcgatacggcgcatcacttcggcagtcgtgtccgagatcgggaagggagcaagggcaggatgggaccgccggagcgcctggactcttgtggatggggctcgtcctggctctggcgctcgctctggcccttgcattggctttgtccgacagccgagtcttgtgggcaccggcagaggcccacccactgtcgccccaagggcaccccgcgagactccatcgaatcgtgcccagattgcgggatgtgttcggttggggtaacttgacatgccccatttgcaaagggctctttacagcgatcaacttgggtttgaagaaggagcccaacgtcgccagagtcgggtcggtggcgatcaagttgtgcaatctcctcaagatcgcacctcccgcagtctgccagtcaattgtgcacttatttgaggatgacatggtagaggtgtggcgccgaagcgtgctgtcgccaagcgaggcgtgtgggctgctgctcggatcaacgtgtggccactgggacatcttctcatcgtggaatatctcattgccgacggtcccaaaaccacctccaaagcctccttccccgcctgcccctggagcgccggtgtcgcggattctgttcttgacagaccttcactgggatcacgactatcttgagggtacagatcccgactgcgcggacccgctttgctgccgcaggggatcggggttgccccctgcatcgcgacccggtgctggttattggggcgaatactcaaagtgtgaccttcccctgcgcaccctcgaatcgcttttgagcggccttggacccgcggggcccttcgatatggtgtattggactggcgacattccggcgcatgatgtgtggcaccagactcgacaggaccagcttcgagcgctcacaacggtgacagcactggtgcggaaatttctcggaccagtgccagtataccctgcggtaggtaaccatgaatcgacgcctgtcaatagcttccctccgccttttatcgagggcaatcatagctcgcggtggctctacgaggcgatggcgaaggcgtgggaaccgtggcttccggcggaggcgttgagaactcttagaatcggtggtttttacgcgcttagcccataccctggtctgaggctcatctcactgaacatgaatttctgttcacgggaaaacttctggcttctgatcaattcgacagacccggcagggcagctccagtggctggtcggagaattgcaggccgcagaggatcgcggagacaaagtacacatcattgggcacattcctcccggacactgtctcaaaagctggtcgtggaattactatcgcatcgtcgctagatacgagaacacgcttgcggcgcagtttttcgggcacacccacgtcgatgagtttgaggtattctatgatgaagaaacgttgtcccgacccctggcggtcgcattcttggcgccctcggccacgacgtacattgggctcaaccctggataccgcgtatatcagattgatggaaactatagcggaagcagccacgtcgtacttgaccacgaaacgtacattctgaatctgacccaggccaatatccctggggccattccccattggcaacttctgtacagggctagggaaacatatggtctgcctaacactttgcccacggcgtggcataacctcgtgtatcgcatgcgcggtgatatgcaattgttccagacgttctggtttttgtaccataaggggcacccaccgtccgagccgtgcggaaccccctgccgcctcgcgacactgtgcgcccagttgtcggctagagcagactcccccgctctctgtcggcatcttatgcccgacgggtccctccccgaagcgcagtcgctttggcccaggccgctgttttgttaatgagctgccttctgcggggcttgccttctggccatgcccttcttctctcccttgcacctgtacctcttggtctttgaataaagcctgagtaggaag

SEQ ID NO: 1667 - RNA, 1205 nt, synthetic construct
  misc_feature 1..1205: note = source = /note="Description of Artificial Sequence: Synthetic coding sequence"
  source 1..1205: mol_type = other RNA
gggaaataagagagaaaagaagagtaagaagaaatataagagccaccatggagcttacggagctgctccttgtcgtcatgttgctgctgacggcgcgattgacactctcatcccctgcacctcccgcgtgcgacttgcgggtcctgtcgaagttgttgcgagactcgcatgtgctccactcacggttgtcgcagtgtccagaggtgcacccattgcccaccccggtgttgctcccggctgtggatttctcgcttggagagtggaaaacgcaaatggaagaaactaaggcccaagacatcttgggagcggtgacacttctcctcgaaggggtgatggctgcaaggggtcaattgggtcccacatgcctctccagcctcttggggcagctttccggtcaggtgcggcttctgcttggtgcgctgcagagcctgcttggaactcagttgccaccgcaggggcgcactaccgcgcacaaagaccccaacgccatctttctttcctttcagcacttgttgcgcggtaaagtacgatttctcatgctcgtcggtggctcgacactttgtgtcagaagagcacctcccacaaccgcagtgccctcccggacaagccttgtactgacgctcaacgagcttccgaataggacaagcgggctcctcgaaactaactttacggcgtcggccaggacgacgggatcaggccttctcaagtggcagcagggattccgcgccaagatccctggtttgttgaaccagacatcgaggtcattggatcagattcccgggtatcttaataggattcacgagcttctgaatggaacgagagggctgttcccgggaccatccagacggacgctcggagcccccgatatctcgtcggggacgagcgacacagggtcactgcctcccaatctgcagccaggttactcgccttcccccacgcatcccccgacgggacaatacacgctcttcccccttccgcctacactgcctaccccggtagtacagctccatccgttgctgcccgatccatcagcgccgacccccacacccaccagcccgcttctcaacacttcatatacgcatagccagaacctctcgcaagaaggataatgagctgccttctgcggggcttgccttctggccatgcccttcttctctcccttgcacctgtacctcttggtctttgaataaagcctgagtaggaag

SEQ ID NO: 1668 - RNA, 1316 nt, synthetic construct
  misc_feature 1..1316: note = source = /note="Description of Artificial Sequence: Synthetic coding sequence"
  source 1..1316: mol_type = other RNA
gggaaataagagagaaaagaagagtaagaagaaatataagagccaccatgcccccatcgggattgagattgttgccccttctgcttccgctgctttggttgctcgtcctgacccctggcaggcccgcagcggggttgtcgacgtgtaagacgattgacatggagctcgtgaaacgcaagagaattgaagcaatcaggggtcaaattctgagcaaactcagactcgcatccccaccgtcccagggtgaggtcccaccgggacctctgcccgaggcggtcctggccttgtacaactcgacacgcgaccgagtcgcaggggagtcagcggaacccgagcccgaacccgaggccgactactacgccaaagaggtcactcgggtcttgatggtggaaactcacaacgaaatctacgacaagtttaagcagtcgacccattcgatctacatgttcttcaataccagcgagcttagagaagcggtccccgagccggtacttttgtccagagcggagctgcggttgctcaggctcaagctgaaagtggaacagcacgtagagctttatcagaagtacagcaacaattcatggcggtatctctcgaaccggctgttggcgccgtcggattcacccgaatggctcagctttgatgtcacgggggtggtgcgccagtggttgtccaggggcggagagatcgaaggatttcggctctcagcccactgttcgtgtgatagcagggacaacacgctccaagtagatatcaacggattcactactggtcgcagaggggatcttgcgacaatccacggtatgaatcgcccttttctcctgctgatggccacaccccttgaacgggcgcaacatcttcagtcatcccgccataggagagcactggacacgaactactgtttttcgtcgacagagaagaattgctgcgtgcggcagctttacatcgacttccgaaaagatctcgggtggaaatggattcatgaaccgaaggggtatcacgccaacttctgcctgggtccgtgtccttatatctggtcgttggatacacagtattcaaaggtgttggctctttacaatcagcacaacccgggagcctcggctgcgccttgttgcgtaccccaggcattggagccattgccgattgtgtattatgtgggaagaaagccgaaagtggagcagttgtcgaatatgatcgtacggagctgcaaatgctcctgataagctgccttctgcggggcttgccttctggccatgcccttcttctctcccttgcacctgtacctcttggtctttgaataaagcctgagtaggaag

SEQ ID NO: 1669 - RNA, 1316 nt, synthetic construct
  misc_feature 1..1316: note = source = /note="Description of Artificial Sequence: Synthetic coding sequence"
  source 1..1316: mol_type = other RNA
gggaaataagagagaaaagaagagtaagaagaaatataagagccaccatgaatggtacgcgcaactggtgcactctcgtggatgtgcacccggaagatcaggcagctgggtccgtcgacattctccggctgacacttcagggggaactgaccggggacgagctggagcacatcgcgcagaaagcgggtcgaaaaacatacgcgatggtgagctcgcactcggctgggcactccctcgcctcagaactggtggaatcacacgatggacatgaagagatcatcaaagtatatctcaagggacgctccggagacaagatgattcatgagaagaatatcaaccaattgaagtcagaagtccagtatatccaagaggcgcggaactgtttgcaaaagctgagagaggacatttcgtcaaagctcgataggaacttgggcgatagcttgcaccgacaggagattcaagtagtactcgaaaagcccaatggcttttcccagtcgccaaccgccttgtattcgtcaccccctgaggtcgacacatgcatcaatgaggacgtcgaatcacttagaaagacagtgcaagaccttttggcgaaactccaagaagcgaagcgccagcatcagtcggattgtgtagccttcgaagtaacgttgtcaaggtaccagagagaggcggagcagtcgaacgtggcgcttcaacgcgaagaggatcgcgtagagcaaaaagaggctgaggtcggtgagcttcagagaaggttgctcgggatggaaacggagcaccaggcactcttggccaaagtcagagagggagaggtggcattggaagaacttaggtccaacaatgcggattgccaggccgaacgggaaaaggcggccactctcgagaaagaggtcgcgggattgcgagagaagatccatcatttggacgacatgcttaagtcgcagcagcggaaagtgaggcagatgatcgagcagctgcagaactcgaaagccgtgatccagtccaaagatgcaacgattcaagagctcaaagagaaaattgcgtacttggaagccgagaatctcgaaatgcatgaccgcatggaacaccttatcgaaaagcagatttcacacggaaatttcagcacgcaggcgagagcaaagaccgaaaacccggggtcgattcggatcagcaaaccgccttcgccgaagcccatgcccgtcatcagagtcgtggaaacgtaatgagctgccttctgcggggcttgccttctggccatgcccttcttctctcccttgcacctgtacctcttggtctttgaataaagcctgagtaggaag

SEQ ID NO: 1670 - RNA, 1316 nt, synthetic construct; identical to SEQ ID NO: 1669
  misc_feature 1..1316: note = source = /note="Description of Artificial Sequence: Synthetic coding sequence"
  source 1..1316: mol_type = other RNA

SEQ ID NO: 1671 - RNA, 1715 nt, synthetic construct
  misc_feature 1..1715: note = source = /note="Description of Artificial Sequence: Synthetic coding sequence"
  source 1..1715: mol_type = other RNA
gggaaataagagagaaaagaagagtaagaagaaatataagagccaccatggctggtcagcgagtactgttgcttgtgggattccttttgcctggggtattgttgtccgaggcggcgaaaatcctgactatctccaccgtcgggggatcacactaccttttgatggacagagtctcgcaaattctccaagaccacggacataatgtgacaatgcttaaccacaagaggggtccctttatgcccgacttcaagaaagaggagaagtcctaccaggtgatcagctggctggccccagaggaccaccagagggagtttaagaaatcgtttgatttcttccttgaggaaacgctgggcggaagggggaaatttgaaaacttgttgaatgtactggagtacttggcgctgcagtgtagccacttccttaaccggaaagacatcatggactcgctgaaaaatgagaattttgatatggtgattgtagaaacgttcgattattgcccctttttgatcgcggagaagttgggaaagcccttcgtcgccattctctcgacgtcattcgggtcgctggaattcgggctccccattcctctgagctatgtccctgtattccggtcattgctgacagaccacatggatttttgggggagagtaaagaattttctcatgttcttttccttttgtcggagacagcaacacatgcagtcgacctttgacaacactatcaaggaacattttacggaaggctcacggcccgtgctgtcgcatctcctgttgaaagccgagctctggtttatcaattcggattttgcattcgacttcgcaagacctcttcttccaaacacagtgtatgtcggtggactgatggagaaaccgatcaaaccggtaccccaagatctcgagaatttcatcgccaaattcggagatagcgggtttgtccttgtgacgcttggttccatggtgaacacatgtcagaatcccgaaatcttcaaggagatgaacaacgccttcgcacatctgcctcagggagtcatttggaagtgccagtgcagccactggcccaaagacgtgcacttggctgcgaacgtcaaaatcgtggattggttgccgcagtcggacctgttggcgcatccgtcaatccgcctcttcgtcactcatggcggtcagaattcgattatggaagcaatccagcatggagtccccatggtagggattccgctttttggagatcagccagaaaacatggtcagggtagaggccaagaaattcggtgtgagcatccagctcaaaaagcttaaggcggaaacattggcgctcaagatgaaacaaatcatggaagataaaaggtacaagagcgcagcggtcgcggcatcggtcatcttgcgcagccatccgttgtccccgactcagcgcctcgtggggtggattgaccacgtacttcagaccggtggagctacccacttgaagccctatgtgttccaacagccctggcatgagcagtacctgtttgacgtgtttgtgttcctgttgggactcactcttggtacgctctggctctgcgggaagttgcttggaatggctgtgtggtggctcagaggggcacggaaagtcaaggagacatgataagctgccttctgcggggcttgccttctggccatgcccttcttctctcccttgcacctgtacctcttggtctttgaataaagcctgagtaggaag

SEQ ID NO: 1672 - RNA, 716 nt, synthetic construct
  misc_feature 1..716: note = source = /note="Description of Artificial Sequence: Synthetic coding sequence"
  source 1..716: mol_type = other RNA
gggaaataagagagaaaagaagagtaagaagaaatataagagccaccatgaactttctcttgtcatgggtgcactggagccttgcgctgctgctgtatcttcatcacgctaagtggagccaggccgcacccatggcggagggtggcggacagaatcaccacgaagtagtcaaattcatggacgtgtaccagaggtcgtattgccatccgattgaaactcttgtggatatctttcaagaataccccgatgaaatcgagtacattttcaaaccgtcgtgtgtccctctcatgaggtgcgggggatgctgcaatgatgaagggttggagtgtgtccccacggaggagtcgaatatcacaatgcaaatcatgcgcatcaaaccacatcagggtcagcatattggagagatgtcctttctccagcacaacaaatgtgagtgtagaccgaagaaggaccgagcccgacaggaaaacccatgcggaccgtgctccgagcggcgcaaacacttgttcgtacaagacccccagacatgcaagtgctcatgtaagaataccgattcgcggtgtaaggcgagacagctggaattgaacgagcgcacgtgtaggtgcgacaagcctagacggtgagctgccttctgcggggcttgccttctggccatgcccttcttctctcccttgcacctgtacctcttggtctttgaataaagcctgagtaggaag

SEQ ID NO: 1673 - DNA, 1182 bp, synthetic construct
  misc_feature 1..1182: note = source = /note="Description of Artificial Sequence: Synthetic coding sequence"
  source 1..1182: mol_type = other DNA
atgaccacctacagcgacaagggcgccaagcccgagagaggcagattcctgcacttccacagcgtgaccttctgggtgggcaacgccaagcaggccaccagcttctactgcagcaagatgggcttcgagcccctggcctacagaggcctggagaccggcagcagagaggtggtgagccacgtgatcaagcagggcaagatcgtgttcgtgctgagcagcgccctgaacccctggaacaaggagatgggcgaccacctggtgaagcacggcgacggcgtgaaggacatcgccttcgaggtggaggactgcgactacatcgtgcagaaggccagagagagaggcgccaagatcatgagagagccctgggtggagcaggacaagttcggcaaggtgaagttcgccgtgctgcagacctacggcgacaccacccacaccctggtggagaagatgaactacatcggccagttcctgcccggctacgaggcccccgccttcatggaccccctgctgcccaagctgcccaagtgcagcctggagatgatcgaccacatcgtgggcaaccagcccgaccaggagatggtgagcgccagcgagtggtacctgaagaacctgcagttccacagattctggagcgtggacgacacccaggtgcacaccgagtacagcagcctgagaagcatcgtggtggccaactacgaggagagcatcaagatgcccatcaacgagcccgcccccggcaagaagaagagccagatccaggagtacgtggactacaacggcggcgccggcgtgcagcacatcgccctgaagaccgaggacatcatcaccgccatcagacacctgagagagagaggcctggagttcctgagcgtgcccagcacctactacaagcagctgagagagaagctgaagaccgccaagatcaaggtgaaggagaacatcgacgccctggaggagctgaagatcctggtggactacgacgagaagggctacctgctgcagatcttcaccaagcccgtgcaggacagacccaccctgttcctggaggtgatccagagacacaaccaccagggcttcggcgccggcaacttcaacagcctgttcaaggccttcgaggaggagcagaacctgagaggcaacctgaccaacatggagaccaacggcgtggtgcccggcatgtag

SEQ ID NO: 1674 - DNA, 1065 bp, synthetic construct
  misc_feature 1..1065: note = source = /note="Description of Artificial Sequence: Synthetic coding sequence"
  source 1..1065: mol_type = other DNA
atgggcttcgagcccctggcctacagaggcctggagaccggcagcagagaggtggtgagccacgtgatcaagcagggcaagatcgtgttcgtgctgagcagcgccctgaacccctggaacaaggagatgggcgaccacctggtgaagcacggcgacggcgtgaaggacatcgccttcgaggtggaggactgcgactacatcgtgcagaaggccagagagagaggcgccaagatcatgagagagccctgggtggagcaggacaagttcggcaaggtgaagttcgccgtgctgcagacctacggcgacaccacccacaccctggtggagaagatgaactacatcggccagttcctgcccggctacgaggcccccgccttcatggaccccctgctgcccaagctgcccaagtgcagcctggagatgatcgaccacatcgtgggcaaccagcccgaccaggagatggtgagcgccagcgagtggtacctgaagaacctgcagttccacagattctggagcgtggacgacacccaggtgcacaccgagtacagcagcctgagaagcatcgtggtggccaactacgaggagagcatcaagatgcccatcaacgagcccgcccccggcaagaagaagagccagatccaggagtacgtggactacaacggcggcgccggcgtgcagcacatcgccctgaagaccgaggacatcatcaccgccatcagacacctgagagagagaggcctggagttcctgagcgtgcccagcacctactacaagcagctgagagagaagctgaagaccgccaagatcaaggtgaaggagaacatcgacgccctggaggagctgaagatcctggtggactacgacgagaagggctacctgctgcagatcttcaccaagcccgtgcaggacagacccaccctgttcctggaggtgatccagagacacaaccaccagggcttcggcgccggcaacttcaacagcctgttcaaggccttcgaggaggagcagaacctgagaggcaacctgaccaacatggagaccaacggcgtggtgcccggcatgtag

SEQ ID NO: 1675 - DNA, 1173 bp, synthetic construct
  misc_feature 1..1173: note = source = /note="Description of Artificial Sequence: Synthetic coding sequence"
  source 1..1173: mol_type = other DNA
tacagcgacaagggcgccaagcccgagagaggcagattcctgcacttccacagcgtgaccttctgggtgggcaacgccaagcaggccaccagcttctactgcagcaagatgggcttcgagcccctggcctacagaggcctggagaccggcagcagagaggtggtgagccacgtgatcaagcagggcaagatcgtgttcgtgctgagcagcgccctgaacccctggaacaaggagatgggcgaccacctggtgaagcacggcgacggcgtgaaggacatcgccttcgaggtggaggactgcgactacatcgtgcagaaggccagagagagaggcgccaagatcatgagagagccctgggtggagcaggacaagttcggcaaggtgaagttcgccgtgctgcagacctacggcgacaccacccacaccctggtggagaagatgaactacatcggccagttcctgcccggctacgaggcccccgccttcatggaccccctgctgcccaagctgcccaagtgcagcctggagatgatcgaccacatcgtgggcaaccagcccgaccaggagatggtgagcgccagcgagtggtacctgaagaacctgcagttccacagattctggagcgtggacgacacccaggtgcacaccgagtacagcagcctgagaagcatcgtggtggccaactacgaggagagcatcaagatgcccatcaacgagcccgcccccggcaagaagaagagccagatccaggagtacgtggactacaacggcggcgccggcgtgcagcacatcgccctgaagaccgaggacatcatcaccgccatcagacacctgagagagagaggcctggagttcctgagcgtgcccagcacctactacaagcagctgagagagaagctgaagaccgccaagatcaaggtgaaggagaacatcgacgccctggaggagctgaagatcctggtggactacgacgagaagggctacctgctgcagatcttcaccaagcccgtgcaggacagacccaccctgttcctggaggtgatccagagacacaaccaccagggcttcggcgccggcaacttcaacagcctgttcaaggccttcgaggaggagcagaacctgagaggcaacctgaccaacatggagaccaacggcgtggtgcccggcatgtag

SEQ ID NO: 1676 - DNA, 438 bp, synthetic construct
  misc_feature 1..438: note = source = /note="Description of Artificial Sequence: Synthetic coding sequence"
  source 1..438: mol_type = other DNA
atgagcaccgagggcggcggcagaagatgccaggcccaggtgagcagaagaatcagcttcagcgccagccacagactgtacagcaagttcctgagcgacgaggagaacctgaagctgttcggcaagtgcaacaaccccaacggccacggccacaactacaaggtggtggtgaccgtgcacggcgagatcgaccccgccaccggcatggtgatgaacctggccgacctgaagaagtacatggaggaggccatcatgcagcccctggaccacaagaacctggacatggacgtgccctacttcgccgacgtggtgagcaccaccgagaacgtggccgtgtacatctgggacaacctgcagaaggtgctgcccgtgggcgtgctgtacaaggtgaaggtgtacgagaccgacaacaacatcgtggtgtacaagggcgagtag

SEQ ID NO: 1677 - DNA, 4284 bp, synthetic construct
  misc_feature 1..4284: note = source = /note="Description of Artificial Sequence: Synthetic coding sequence"
  source 1..4284: mol_type = other DNA
atgcaccagagacaccccagagccagatgcccccccctgtgcgtggccggcatcctggcctgcggcttcctgctgggctgctggggccccagccacttccagcagagctgcctgcaggccctggagccccaggccgtgagcagctacctgagccccggcgcccccctgaagggcagaccccccagccccggcttccagagacagagacagagacagagaagagccgccggcggcatcctgcacctggagctgctggtggccgtgggccccgacgtgttccaggcccaccaggaggacaccgagagatacgtgctgaccaacctgaacatcggcgccgagctgctgagagaccccagcctgggcgcccagttcagagtgcacctggtgaagatggtgatcctgaccgagcccgagggcgcccccaacatcaccgccaacctgaccagcagcctgctgagcgtgtgcggctggagccagaccatcaaccccgaggacgacaccgaccccggccacgccgacctggtgctgtacatcaccagattcgacctggagctgcccgacggcaacagacaggtgagaggcgtgacccagctgggcggcgcctgcagccccacctggagctgcctgatcaccgaggacaccggcttcgacctgggcgtgaccatcgcccacgagatcggccacagcttcggcctggagcacgacggcgcccccggcagcggctgcggccccagcggccacgtgatggccagcgacggcgccgcccccagagccggcctggcctggagcccctgcagcagaagacagctgctgagcctgctgagcgccggcagagccagatgcgtgtgggacccccccagaccccagcccggcagcgccggccacccccccgacgcccagcccggcctgtactacagcgccaacgagcagtgcagagtggccttcggccccaaggccgtggcctgcaccttcgccagagagcacctggacatgtgccaggccctgagctgccacaccgaccccctggaccagagcagctgcagcagactgctggtgcccctgctggacggcaccgagtgcggcgtggagaagtggtgcagcaagggcagatgcagaagcctggtggagctgacccccatcgccgccgtgcacggcagatggagcagctggggccccagaagcccctgcagcagaagctgcggcggcggcgtggtgaccagaagaagacagtgcaacaaccccagacccgccttcggcggcagagcctgcgtgggcgccgacctgcaggccgagatgtgcaacacccaggcctgcgagaagacccagctggagttcatgagccagcagtgcgccagaaccgacggccagcccctgagaagcagccccggcggcgccagcttctaccactggggcgccgccgtgccccacagccagggcgacgccctgtgcagacacatgtgcagagccatcggcgagagcttcatcatgaagagaggcgacagcttcctggacggcaccagatgcatgcccagcggccccagagaggacggcaccctgagcctgtgcgtgagcggcagctgcagaaccttcggctgcgacggcagaatggacagccagcaggtgtgggacagatgccaggtgtgcggcggcgacaacagcacctgcagccccagaaagggcagcttcaccgccggcagagccagagagtacgtgaccttcctgaccgtgacccccaacctgaccagcgtgtacatcgccaaccacagacccctgttcacccacctggccgtgagaatcggcggcagatacgtggtggccggcaagatgagcatcagccccaacaccacctaccccagcctgctggaggacggcagagtggagtacagagtggccctgaccgaggacagactgcccagactggaggagatcagaatctggggccccctgcaggaggacgccgacatccaggtgtacagaagatacggcgaggagtacggcaacctgaccagacccgacatcaccttcacctacttccagcccaagcccagacaggcctgggtgtgggccgccgtgagaggcccctgcagcgtgagctgcggcgccggcctgagatgggtgaactacagctgcctggaccaggccagaaaggagctggtggagaccgtgcagtgccagggcagccagcagccccccgcctggcccgaggcctgcgtgctggagccctgccccccctactgggccgtgggcgacttcggcccctgcagcgccagctgcggcggcggcctgagagagagacccgtgagatgcgtggaggcccagggcagcctgctgaagaccctgccccccgccagatgcagagccggcgcccagcagcccgccgtggccctggagacctgcaacccccagccctgccccgccagatgggaggtgagcgagcccagcagctgcaccagcgccggcggcgccggcctggccctggagaacgagacctgcgtgcccggcgccgacggcctggaggcccccgtgaccgagggccccggcagcgtggacgagaagctgcccgcccccgagccctgcgtgggcatgagctgcccccccggctggggccacctggacgccaccagcgccggcgagaaggcccccagcccctggggcagcatcagaaccggcgcccaggccgcccacgtgtggacccccgccgccggcagctgcagcgtgagctgcggcagaggcctgatggagctgagattcctgtgcatggacagcgccctgagagtgcccgtgcaggaggagctgtgcggcctggccagcaagcccggcagcagaagagaggtgtgccaggccgtgccctgccccgccagatggcagtacaagctggccgcctgcagcgtgagctgcggcagaggcgtggtgagaagaatcctgtactgcgccagagcccacggcgaggacgacggcgaggagatcctgctggacacccagtgccagggcctgcccagacccgagccccaggaggcctgcagcctggagccctgcccccccagatggaaggtgatgagcctgggcccctgcagcgccagctgcggcctgggcaccgccagaagaagcgtggcctgcgtgcagctggaccagggccaggacgtggaggtggacgaggccgcctgcgccgccctggtgagacccgaggccagcgtgccctgcctgatcgccgactgcacctacagatggcacgtgggcacctggatggagtgcagcgtgagctgcggcgacggcatccagagaagaagagacacctgcctgggcccccaggcccaggcccccgtgcccgccgacttctgccagcacctgcccaagcccgtgaccgtgagaggctgctgggccggcccctgcgtgggccagggcacccccagcctggtgccccacgaggaggccgccgcccccggcagaaccaccgccacccccgccggcgccagcctggagtggagccaggccagaggcctgctgttcagccccgccccccagcccagaagactgctgcccggcccccaggagaacagcgtgcagagcagcgcctgcggcagacagcacctggagcccaccggcaccatcgacatgagaggccccggccaggccgactgcgccgtggccatcggcagacccctgggcgaggtggtgaccctgagagtgctggagagcagcctgaactgcagcgccggcgacatgctgctgctgtggggcagactgacctggagaaagatgtgcagaaagctgctggacatgaccttcagcagcaagaccaacaccctggtggtgagacagagatgcggcagacccggcggcggcgtgctgctgagatacggcagccagctggcccccgagaccttctacagagagtgcgacatgcagctgttcggcccctggggcgagatcgtgagccccagcctgagccccgccaccagcaacgccggcggctgcagactgttcatcaacgtggccccccacgccagaatcgccatccacgccctggccaccaacatgggcgccggcaccgagggcgccaacgccagctacatcctgatcagagacacccacagcctgagaaccaccgccttccacggccagcaggtgctgtactgggagagcgagagcagccaggccgagatggagttcagcgagggcttcctgaaggcccaggccagcctgagaggccagtactggaccctgcagagctgggtgcccgagatgcaggacccccagagctggaagggcaaggagggcacctag

SEQ ID NO: 1678 - DNA, 3309 bp, synthetic construct
  misc_feature 1..3309: note = source = /note="Description of Artificial Sequence: Synthetic coding sequence"
  source 1..3309: mol_type = other DNA
atgttccagctgcccgtgaacaacctgggcagcctgagaaaggccagaaagaccgtgaagaagatcctgagcgacatcggcctggagtactgcaaggagcacatcgaggacttcaagcagttcgagcccaacgacttctacctgaagaacaccacctgggaggacgtgggcctgtgggaccccagcctgaccaagaaccaggactacagaaccaagcccttctgctgcagcgcctgccccttcagcagcaagttcttcagcgcctacaagagccacttcagaaacgtgcacagcgaggacttcgagaacagaatcctgctgaactgcccctactgcaccttcaacgccgacaagaagaccctggagacccacatcaagatcttccacgcccccaacgccagcgcccccagcagcagcctgagcaccttcaaggacaagaacaagaacgacggcctgaagcccaagcaggccgacagcgtggagcaggccgtgtactactgcaagaagtgcacctacagagaccccctgtacgagatcgtgagaaagcacatctacagagagcacttccagcacgtggccgccccctacatcgccaaggccggcgagaagagcctgaacggcgccgtgcccctgggcagcaacgccagagaggagagcagcatccactgcaagagatgcctgttcatgcccaagagctacgaggccctggtgcagcacgtgatcgaggaccacgagagaatcggctaccaggtgaccgccatgatcggccacaccaacgtggtggtgcccagaagcaagcccctgatgctgatcgcccccaagccccaggacaagaagagcatgggcctgccccccagaatcggcagcctggccagcggcaacgtgagaagcctgcccagccagcagatggtgaacagactgagcatccccaagcccaacctgaacagcaccggcgtgaacatgatgagcagcgtgcacctgcagcagaacaactacggcgtgaagagcgtgggccagggctacagcgtgggccagagcatgagactgggcctgggcggcaacgcccccgtgagcatcccccagcagagccagagcgtgaagcagctgctgcccagcggcaacggcagaagctacggcctgggcagcgagcagagaagccaggcccccgccagatacagcctgcagagcgccaacgccagcagcctgagcagcggccagctgaagagccccagcctgagccagagccaggccagcagagtgctgggccagagcagcagcaagcccgccgccgccgccaccggccccccccccggcaacaccagcagcacccagaagtggaagatctgcaccatctgcaacgagctgttccccgagaacgtgtacagcgtgcacttcgagaaggagcacaaggccgagaaggtgcccgccgtggccaactacatcatgaagatccacaacttcaccagcaagtgcctgtactgcaacagatacctgcccaccgacaccctgctgaaccacatgctgatccacggcctgagctgcccctactgcagaagcaccttcaacgacgtggagaagatggccgcccacatgagaatggtgcacatcgacgaggagatgggccccaagaccgacagcaccctgagcttcgacctgaccctgcagcagggcagccacaccaacatccacctgctggtgaccacctacaacctgagagacgcccccgccgagagcgtggcctaccacgcccagaacaacccccccgtgccccccaagccccagcccaaggtgcaggagaaggccgacatccccgtgaagagcagcccccaggccgccgtgccctacaagaaggacgtgggcaagaccctgtgccccctgtgcttcagcatcctgaagggccccatcagcgacgccctggcccaccacctgagagagagacaccaggtgatccagaccgtgcaccccgtggagaagaagctgacctacaagtgcatccactgcctgggcgtgtacaccagcaacatgaccgccagcaccatcaccctgcacctggtgcactgcagaggcgtgggcaagacccagaacggccaggacaagaccaacgcccccagcagactgaaccagagccccagcctggcccccgtgaagagaacctacgagcagatggagttccccctgctgaagaagagaaagctggacgacgacagcgacagccccagcttcttcgaggagaagcccgaggagcccgtggtgctggccctggaccccaagggccacgaggacgacagctacgaggccagaaagagcttcctgaccaagtacttcaacaagcagccctaccccaccagaagagagatcgagaagctggccgccagcctgtggctgtggaagagcgacatcgccagccacttcagcaacaagagaaagaagtgcgtgagagactgcgagaagtacaagcccggcgtgctgctgggcttcaacatgaaggagctgaacaaggtgaagcacgagatggacttcgacgccgagtggctgttcgagaaccacgacgagaaggacagcagagtgaacgccagcaagaccgccgacaagaagctgaacctgggcaaggaggacgacagcagcagcgacagcttcgagaacctggaggaggagagcaacgagagcggcagccccttcgaccccgtgttcgaggtggagcccaagatcagcaacgacaaccccgaggagcacgtgctgaaggtgatccccgaggacgccagcgagagcgaggagaagctggaccagaaggaggacggcagcaagtacgagaccatccacctgaccgaggagcccaccaagctgatgcacaacgccagcgacagcgaggtggaccaggacgacgtggtggagtggaaggacggcgccagccccagcgagagcggccccggcagccagcaggtgagcgacttcgaggacaacacctgcgagatgaagcccggcacctggagcgacgagagcagccagagcgaggacgccagaagcagcaagcccgccgccaagaagaaggccaccatgcagggcgacagagagcagctgaagtggaagaacagcagctacggcaaggtggagggcttctggagcaaggaccagagccagtggaagaacgccagcgagaacgacgagagactgagcaacccccagatcgagtggcagaacagcaccatcgacagcgaggacggcgagcagttcgacaacatgaccgacggcgtggccgagcccatgcacggcagcctggccggcgtgaagctgagcagccagcaggcctag

SEQ ID NO: 1679 - DNA, 3309 bp, synthetic construct; identical to SEQ ID NO: 1678
  misc_feature 1..3309: note = source = /note="Description of Artificial Sequence: Synthetic coding sequence"
  source 1..3309: mol_type = other DNA

SEQ ID NO: 1680 - DNA, 3309 bp, synthetic construct; identical to SEQ ID NO: 1678
  misc_feature 1..3309: note = source = /note="Description of Artificial Sequence: Synthetic coding sequence"
  source 1..3309: mol_type = other DNA

SEQ ID NO: 1681 - DNA, 3309 bp, synthetic construct; identical to SEQ ID NO: 1678
  misc_feature 1..3309: note = source = /note="Description of Artificial Sequence: Synthetic coding sequence"
  source 1..3309: mol_type = other DNA

SEQ ID NO: 1682 - DNA, 522 bp, synthetic construct
  misc_feature 1..522: note = source = /note="Description of Artificial Sequence: Synthetic coding sequence"
  source 1..522: mol_type = other DNA
atgttccagctgcccgtgaacaacctgggcagcctgagaaaggccagaaagaccgtgaagaagatcctgagcgacatcggcctggagtactgcaaggagcacatcgaggacttcaagcagttcgagcccaacgacttctacctgaagaacaccacctgggaggacgtgggcctgtgggaccccagcctgaccaagaaccaggactacagaaccaagcccttctgctgcagcgcctgccccttcagcagcaagttcttcagcgcctacaagagccacttcagaaacgtgcacagcgaggacttcgagaacagaatcctgctgaactgcccctactgcaccttcaacgccgacaagaagaccctggagacccacatcaagatcttccacgcccccaacgccagcgcccccagcagcagcctgagcaccttcaaggacaagaacaagaacgacggcctgaagcccaagcaggccgacagcgtggagcaggccgtgtactactgcaagaagtgcacctacagatag

SEQ ID NO: 1683 - DNA, 441 bp, synthetic construct
  misc_feature 1..441: note = source = /note="Description of Artificial Sequence: Synthetic coding sequence"
  source 1..441: mol_type = other DNA
atggtgatcctgaccgagcccgagggcgcccccaacatcaccgccaacctgaccagcagcctgctgagcgtgtgcggctggagccagaccatcaaccccgaggacgacaccgaccccggccacgccgacctggtgctgtacatcaccagattcgacctggagctgcccgacggcaacagacaggtgagaggcgtgacccagctgggcggcgcctgcagccccacctggagctgcctgatcaccgaggacaccggcttcgacctgggcgtgaccatcgcccacgagatcggccacagaatctgcgccagacccagccccgccacccagaccagatggaccaaggccgccgccgccgccagcagcttcctgagctggatgggccagaacgtggcctggagaagcggcgcccccagagtggccgccgccccctggtggagctag

SEQ ID NO: 1684 - DNA, 4116 bp, synthetic construct
  misc_feature 1..4116: note = source = /note="Description of Artificial Sequence: Synthetic coding sequence"
  source 1..4116: mol_type = other DNA
atgcaccagagacaccccagagccagatgcccccccctgtgcgtggccggcatcctggcctgcggcttcctgctgggctgctggggccccagccacttccagcagagctgcctgcaggccctggagccccaggccgtgagcagctacctgagccccggcgcccccctgaagggcagaccccccagccccggcttccagagacagagacagagacagagaagagccgccggcggcatcctgcacctggagctgctggtggccgtgggccccgacgtgttccaggcccaccaggaggacaccgagagatacgtgctgaccaacctgaacatcggcgccgagctgctgagagaccccagcctgggcgcccagttcagagtgcacctggtgaagatggtgatcctgaccgagcccgagggcgcccccaacatcaccgccaacctgaccagcagcctgctgagcgtgtgcggctggagccagaccatcaaccccgaggacgacaccgaccccggccacgccgacctggtgctgtacatcaccagattcgacctggagctgcccgacggcaacagacaggtgagaggcgtgacccagctgggcggcgcctgcagccccacctggagctgcctgatcaccgaggacaccggcttcgacctgggcgtgaccatcgcccacgagatcggccacagcttcggcctggagcacgacggcgcccccggcagcggctgcggccccagcggccacgtgatggccagcgacggcgccgcccccagagccggcctggcctggagcccctgcagcagaagacagctgctgagcctgctgagcgccggcagagccagatgcgtgtgggacccccccagaccccagcccggcagcgccggccacccccccgacgcccagcccggcctgtactacagcgccaacgagcagtgcagagtggccttcggccccaaggccgtggcctgcaccttcgccagagagcacctggacatgtgccaggccctgagctgccacaccgaccccctggaccagagcagctgcagcagactgctggtgcccctgctggacggcaccgagtgcggcgtggagaagtggtgcagcaagggcagatgcagaagcctggtggagctgacccccatcgccgccgtgcacggcagatggagcagctggggccccagaagcccctgcagcagaagctgcggcggcggcgtggtgaccagaagaagacagtgcaacaaccccagacccgccttcggcggcagagcctgcgtgggcgccgacctgcaggccgagatgtgcaacacccaggcctgcgagaagacccagctggagttcatgagccagcagtgcgccagaaccgacggccagcccctgagaagcagccccggcggcgccagcttctaccactggggcgccgccgtgccccacagccagggcgacgccctgtgcagacacatgtgcagagccatcggcgagagcttcatcatgaagagaggcgacagcttcctggacggcaccagatgcatgcccagcggccccagagaggacggcaccctgagcctgtgcgtgagcggcagctgcagaaccttcggctgcgacggcagaatggacagccagcaggtgtgggacagatgccaggtgtgcggcggcgacaacagcacctgcagccccagaaagggcagcttcaccgccggcagagccagagagtacgtgaccttcctgaccgtgacccccaacctgaccagcgtgtacatcgccaaccacagacccctgttcacccacctggccgtgagaatcggcggcagatacgtggtggccggcaagatgagcatcagccccaacaccacctaccccagcctgctggaggacggcagagtggagtacagagtggccctgaccgaggacagactgcccagactggaggagatcagaatctggggccccctgcaggaggacgccgacatccaggtgtacagaagatacggcgaggagtacggcaacctgaccagacccgacatcaccttcacctacttccagcccaagcccagacaggcctgggtgtgggccgccgtgagaggcccctgcagcgtgagctgcggcgccggcctgagatgggtgaactacagctgcctggaccaggccagaaaggagctggtggagaccgtgcagtgccagggcagccagcagccccccgcctggcccgaggcctgcgtgctggagccctgccccccctactgggccgtgggcgacttcggcccctgcagcgccagctgcggcggcggcctgagagagagacccgtgagatgcgtggaggcccagggcagcctgctgaagaccctgccccccgccagatgcagagccggcgcccagcagcccgccgtggccctggagacctgcaacccccagccctgccccgccagatgggaggtgagcgagcccagcagctgcaccagcgccggcggcgccggcctggccctggagaacgagacctgcgtgcccggcgccgacggcctggaggcccccgtgaccgagggccccggcagcgtggacgagaagctgcccgcccccgagccctgcgtgggcatgagctgcccccccggctggggccacctggacgccaccagcgccggcgagaaggcccccagcccctggggcagcatcagaaccggcgcccaggccgcccacgtgtggacccccgccgccggcagctgcagcgtgagctgcggcagaggcctgatggagctgagattcctgtgcatggacagcgccctgagagtgcccgtgcaggaggagctgtgcggcctggccagcaagcccggcagcagaagagaggtgtgccaggccgtgccctgccccgccagatggcagtacaagctggccgcctgcagcgtgagctgcggcagaggcgtggtgagaagaatcctgtactgcgccagagcccacggcgaggacgacggcgaggagatcctgctggacacccagtgccagggcctgcccagacccgagccccaggaggcctgcagcctggagccctgcccccccagatggaaggtgatgagcctgggcccctgcagcgccagctgcggcctgggcaccgccagaagaagcgtggcctgcgtgcagctggaccagggccaggacgtggaggtggacgaggccgcctgcgccgccctggtgagacccgaggccagcgtgccctgcctgatcgccgactgcacctacagatggcacgtgggcacctggatggagtgcagcgtgagctgcggcgacggcatccagagaagaagagacacctgcctgggcccccaggcccaggcccccgtgcccgccgacttctgccagcacctgcccaagcccgtgaccgtgagaggctgctgggccggcccctgcgtgggccagggcgcctgcggcagacagcacctggagcccaccggcaccatcgacatgagaggccccggccaggccgactgcgccgtggccatcggcagacccctgggcgaggtggtgaccctgagagtgctggagagcagcctgaactgcagcgccggcgacatgctgctgctgtggggcagactgacctggagaaagatgtgcagaaagctgctggacatgaccttcagcagcaagaccaacaccctggtggtgagacagagatgcggcagacccggcggcggcgtgctgctgagatacggcagccagctggcccccgagaccttctacagagagtgcgacatgcagctgttcggcccctggggcgagatcgtgagccccagcctgagccccgccaccagcaacgccggcggctgcagactgttcatcaacgtggccccccacgccagaatcgccatccacgccctggccaccaacatgggcgccggcaccgagggcgccaacgccagctacatcctgatcagagacacccacagcctgagaaccaccgccttccacggccagcaggtgctgtactgggagagcgagagcagccaggccgagatggagttcagcgagggcttcctgaaggcccaggccagcctgagaggccagtactggaccctgcagagctgggtgcccgagatgcaggacccccagagctggaagggcaaggagggcacctag

SEQ ID NO: 1685 - DNA, 4023 bp, synthetic construct
  misc_feature 1..4023: note = source = /note="Description of Artificial Sequence: Synthetic coding sequence"
  source 1..4023: mol_type = other DNA
atgcaccagagacaccccagagccagatgcccccccctgtgcgtggccggcatcctggcctgcggcttcctgctgggctgctggggccccagccacttccagcagagctgcctgcaggccctggagccccaggccgtgagcagctacctgagccccggcgcccccctgaagggcagaccccccagccccggcttccagagacagagacagagacagagaagagccgccggcggcatcctgcacctggagctgctggtggccgtgggccccgacgtgttccaggcccaccaggaggacaccgagagatacgtgctgaccaacctgaacatcggcgccgagctgctgagagaccccagcctgggcgcccagttcagagtgcacctggtgaagatggtgatcctgaccgagcccgagggcgcccccaacatcaccgccaacctgaccagcagcctgctgagcgtgtgcggctggagccagaccatcaaccccgaggacgacaccgaccccggccacgccgacctggtgctgtacatcaccagattcgacctggagctgcccgacggcaacagacaggtgagaggcgtgacccagctgggcggcgcctgcagccccacctggagctgcctgatcaccgaggacaccggcttcgacctgggcgtgaccatcgcccacgagatcggccacagcttcggcctggagcacgacggcgcccccggcagcggctgcggccccagcggccacgtgatggccagcgacggcgccgcccccagagccggcctggcctggagcccctgcagcagaagacagctgctgagcctgctgagcgccaacgagcagtgcagagtggccttcggccccaaggccgtggcctgcaccttcgccagagagcacctggacatgtgccaggccctgagctgccacaccgaccccctggaccagagcagctgcagcagactgctggtgcccctgctggacggcaccgagtgcggcgtggagaagtggtgcagcaagggcagatgcagaagcctggtggagctgacccccatcgccgccgtgcacggcagatggagcagctggggccccagaagcccctgcagcagaagctgcggcggcggcgtggtgaccagaagaagacagtgcaacaaccccagacccgccttcggcggcagagcctgcgtgggcgccgacctgcaggccgagatgtgcaacacccaggcctgcgagaagacccagctggagttcatgagccagcagtgcgccagaaccgacggccagcccctgagaagcagccccggcggcgccagcttctaccactggggcgccgccgtgccccacagccagggcgacgccctgtgcagacacatgtgcagagccatcggcgagagcttcatcatgaagagaggcgacagcttcctggacggcaccagatgcatgcccagcggccccagagaggacggcaccctgagcctgtgcgtgagcggcagctgcagaaccttcggctgcgacggcagaatggacagccagcaggtgtgggacagatgccaggtgtgcggcggcgacaacagcacctgcagccccagaaagggcagcttcaccgccggcagagccagagagtacgtgaccttcctgaccgtgacccccaacctgaccagcgtgtacatcgccaaccacagacccctgttcacccacctggccgtgagaatcggcggcagatacgtggtggccggcaagatgagcatcagccccaacaccacctaccccagcctgctggaggacggcagagtggagtacagagtggccctgaccgaggacagactgcccagactggaggagatcagaatctggggccccctgcaggaggacgccgacatccaggtgtacagaagatacggcgaggagtacggcaacctgaccagacccgacatcaccttcacctacttccagcccaagcccagacaggcctgggtgtgggccgccgtgagaggcccctgcagcgtgagctgcggcgccggcctgagatgggtgaactacagctgcctggaccaggccagaaaggagctggtggagaccgtgcagtgccagggcagccagcagccccccgcctggcccgaggcctgcgtgctggagccctgccccccctactgggccgtgggcgacttcggcccctgcagcgccagctgcggcggcggcctgagagagagacccgtgagatgcgtggaggcccagggcagcctgctgaagaccctgccccccgccagatgcagagccggcgcccagcagcccgccgtggccctggagacctgcaacccccagccctgccccgccagatgggaggtgagcgagcccagcagctgcaccagcgccggcggcgccggcctggccctggagaacgagacctgcgtgcccggcgccgacggcctggaggcccccgtgaccgagggccccggcagcgtggacgagaagctgcccgcccccgagccctgcgtgggcatgagctgcccccccggctggggccacctggacgccaccagcgccggcgagaaggcccccagcccctggggcagcatcagaaccggcgcccaggccgcccacgtgtggacccccgccgccggcagctgcagcgtgagctgcggcagaggcctgatggagctgagattcctgtgcatggacagcgccctgagagtgcccgtgcaggaggagctgtgcggcctggccagcaagcccggcagcagaagagaggtgtgccaggccgtgccctgccccgccagatggcagtacaagctggccgcctgcagcgtgagctgcggcagaggcgtggtgagaagaatcctgtactgcgccagagcccacggcgaggacgacggcgaggagatcctgctggacacccagtgccagggcctgcccagacccgagccccaggaggcctgcagcctggagccctgcccccccagatggaaggtgatgagcctgggcccctgcagcgccagctgcggcctgggcaccgccagaagaagcgtggcctgcgtgcagctggaccagggccaggacgtggaggtggacgaggccgcctgcgccgccctggtgagacccgaggccagcgtgccctgcctgatcgccgactgcacctacagatggcacgtgggcacctggatggagtgcagcgtgagctgcggcgacggcatccagagaagaagagacacctgcctgggcccccaggcccaggcccccgtgcccgccgacttctgccagcacctgcccaagcccgtgaccgtgagaggctgctgggccggcccctgcgtgggccagggcgcctgcggcagacagcacctggagcccaccggcaccatcgacatgagaggccccggccaggccgactgcgccgtggccatcggcagacccctgggcgaggtggtgaccctgagagtgctggagagcagcctgaactgcagcgccggcgacatgctgctgctgtggggcagactgacctggagaaagatgtgcagaaagctgctggacatgaccttcagcagcaagaccaacaccctggtggtgagacagagatgcggcagacccggcggcggcgtgctgctgagatacggcagccagctggcccccgagaccttctacagagagtgcgacatgcagctgttcggcccctggggcgagatcgtgagccccagcctgagccccgccaccagcaacgccggcggctgcagactgttcatcaacgtggccccccacgccagaatcgccatccacgccctggccaccaacatgggcgccggcaccgagggcgccaacgccagctacatcctgatcagagacacccacagcctgagaaccaccgccttccacggccagcaggtgctgtactgggagagcgagagcagccaggccgagatggagttcagcgagggcttcctgaaggcccaggccagcctgagaggccagtactggaccctgcagagctgggtgcccgagatgcaggacccccagagctggaagggcaaggagggcacctag

SEQ ID NO: 1686 - DNA, 672 bp, synthetic construct
  misc_feature 1..672: note = source = /note="Description of Artificial Sequence: Synthetic coding sequence"
  source 1..672: mol_type = other DNA
atgagaggccccggccaggccgactgcgccgtggccatcggcagacccctgggcgaggtggtgaccctgagagtgctggagagcagcctgaactgcagcgccggcgacatgctgctgctgtggggcagactgacctggagaaagatgtgcagaaagctgctggacatgaccttcagcagcaagaccaacaccctggtggtgagacagagatgcggcagacccggcggcggcgtgctgctgagatacggcagccagctggcccccgagaccttctacagagagtgcgacatgcagctgttcggcccctggggcgagatcgtgagccccagcctgagccccgccaccagcaacgccggcggctgcagactgttcatcaacgtggccccccacgccagaatcgccatccacgccctggccaccaacatgggcgccggcaccgagggcgccaacgccagctacatcctgatcagagacacccacagcctgagaaccaccgccttccacggccagcaggtgctgtactgggagagcgagagcagccaggccgagatggagttcagcgagggcttcctgaaggcccaggccagcctgagaggccagtactggaccctgcagagctgggtgcccgagatgcaggacccccagagctggaagggcaaggagggcacctag

SEQ ID NO: 1687 - DNA, 1035 bp, synthetic construct
  misc_feature 1..1035: note = source = /note="Description of Artificial Sequence: Synthetic coding sequence"
  source 1..1035: mol_type = other DNA
atgcaccagagacaccccagagccagatgcccccccctgtgcgtggccggcatcctggcctgcggcttcctgctgggctgctggggccccagccacttccagcagagctgcctgcaggccctggagccccaggccgtgagcagctacctgagccccggcgcccccctgaagggcagaccccccagccccggcttccagagacagagacagagacagagaagagccgccggcggcatcctgcacctggagctgctggtggccgtgggccccgacgtgttccaggcccaccaggaggacaccgagagatacgtgctgaccaacctgaacatcggcgccgagctgctgagagaccccagcctgggcgcccagttcagagtgcacctggtgaagatggtgatcctgaccgagcccgagggcgcccccaacatcaccgccaacctgaccagcagcctgctgagcgtgtgcggctggagccagaccatcaaccccgaggacgacaccgaccccggccacgccgacctggtgctgtacatcaccagattcgacctggagctgcccgacggcaacagacaggtgagaggcgtgacccagctgggcggcgcctgcagccccacctggagctgcctgatcaccgaggacaccggcttcgacctgggcgtgaccatcgcccacgagatcggccacagcttcggcctggagcacgacggcgcccccggcagcggctgcggccccagcggccacgtgatggccagcgacggcgccgcccccagagccggcctggcctggagcccctgcagcagaagacagctgctgagcctgctgagacccgtgccccccagccccctgcccctgctggccacccacctgtgcgccggcagaagcctgagcctgggccccagccaggagcccgcccccggcggcggcagaggccccagaacccccgtgcccacccacaagagacccagattccagaccctgcccagcagctgccccctgctgagacccgccagcagcagatgcacccccagagactag

SEQ ID NO: 1688 - DNA, 831 bp, synthetic construct
  misc_feature 1..831: note = source = /note="Description of Artificial Sequence: Synthetic coding sequence"
  source 1..831: mol_type = other DNA
atgcaccagagacaccccagagccagatgcccccccctgtgcgtggccggcatcctggcctgcggcttcctgctgggctgctggggccccagccacttccagcagagctgcctgcaggccctggagccccaggccgtgagcagctacctgagccccggcgcccccctgaagggcagaccccccagccccggcttccagagacagagacagagacagagaagagccgccggcggcatcctgcacctggagctgctggtggccgtgggccccgacgtgttccaggcccaccaggaggacaccgagagatacgtgctgaccaacctgaacatcggcgccgagctgctgagagaccccagcctgggcgcccagttcagagtgcacctggtgaagatggtgatcctgaccgagcccgagggcgcccccaacatcaccgccaacctgaccagcagcctgctgagcgtgtgcggctggagccagaccatcaaccccgaggacgacaccgaccccggccacgccgacctggtgctgtacatcaccagattcgacctggagctgcccgacggcaacagacaggtgagaggcgtgacccagctgggcggcgcctgcagccccacctggagctgcctgatcaccgaggacaccggcttcgacctgggcgtgaccatcgcccacgagatcggccacagaatctgcgccagacccagccccgccacccagaccagatggaccaaggccgccgccgccgccagcagcttcctgagctggatgggccagaacgtggcctggagaagcggcgcccccagagtggccgccgccccctggtggagctag

SEQ ID NO: 1689 - DNA, 4284 bp, synthetic construct; identical to SEQ ID NO: 1677
  misc_feature 1..4284: note = source = /note="Description of Artificial Sequence: Synthetic coding sequence"
  source 1..4284: mol_type = other DNA

SEQ ID NO: 1690 - DNA, 1095 bp, synthetic construct
  misc_feature 1..1095: note = source = /note="Description of Artificial Sequence: Synthetic coding sequence"
  source 1..1095: mol_type = other DNA
atggacatgtgccaggccctgagctgccacaccgaccccctggaccagagcagctgcagcagactgctggtgcccctgctggacggcaccgagtgcggcgtggagaagtggtgcagcaagggcagatgcagaagcctggtggagctgacccccatcgccgccgtgcacggcagatggagcagctggggccccagaagcccctgcagcagaagctgcggcggcggcgtggtgaccagaagaagacagtgcaacaaccccagacccgccttcggcggcagagcctgcgtgggcgccgacctgcaggccgagatgtgcaacacccaggcctgcgagaagacccagctggagttcatgagccagcagtgcgccagaaccgacggccagcccctgagaagcagccccggcggcgccagcttctaccactggggcgccgccgtgccccacagccagggcgacgccctgtgcagacacatgtgcagagccatcggcgagagcttcatcatgaagagaggcgacagcttcctggacggcaccagatgcatgcccagcggccccagagaggacggcaccctgagcctgtgcgtgagcggcagctgcagaaccttcggctgcgacggcagaatggacagccagcaggtgtgggacagatgccaggtgtgcggcggcgacaacagcacctgcagccccagaaagggcagcttcaccgccggcagagccagagagtacgtgaccttcctgaccgtgacccccaacctgaccagcgtgtacatcgccaaccacagacccctgttcacccacctggccgtgagaatcggcggcagatacgtggtggccggcaagatgagcatcagccccaacaccacctaccccagcctgctggaggacggcagagtggagtacagagtggccctgaccgaggacagactgcccagactggaggagatcagaatctggggccccctgcaggaggacgccgacatccaggtgggcggcgtgagagcccagctgatgcacatcagctggtggagcagacccggcctgggcgagagagacctgtgcgccagaggcagatggcccggcggcagcagcgactag

SEQ ID NO: 1691 - DNA, 1095 bp, synthetic construct
  misc_feature 1..1095: note = source = /note="Description of Artificial Sequence: Synthetic coding sequence"
  source 1..1095: mol_type = other DNA
atgccctaccagtaccccgccctgacccccgagcagaagaaggagctgagcgacatcgcccacagaatcgtggcccccggcaagggcatcctggccgccgacgagagcaccggcagcatcgccaagagactgcagagcatcggcaccgagaacaccgaggagaacagaagattctacagacagctgctgctgaccgccgacgacagagtgaacccctgcatcggcggcgtgatcctgttccacgagaccctgtaccagaaggccgacgacggcagacccttcccccaggtgatcaagagcaagggcggcgtggtgggcatcaaggtggacaagggcgtggtgcccctggccggcaccaacggcgagaccaccacccagggcctggacggcctgagcgagagatgcgcccagtacaagaaggacggcgccgacttcgccaagtggagatgcgtgctgaagatcggcgagcacacccccagcgccctggccatcatggagaacgccaacgtgctggccagatacgccagcatctgccagcagaacggcatcgtgcccatcgtggagcccgagatcctgcccgacggcgaccacgacctgaagagatgccagtacgtgaccgagaaggtgctggccgccgtgtacaaggccctgagcgaccaccacatctacctggagggcaccctgctgaagcccaacatggtgacccccggccacgcctgcacccagaagttcagccacgaggagatcgccatggccaccgtgaccgccctgagaagaaccgtgccccccgccgtgaccggcatcaccttcctgagcggcggccagagcgaggaggaggccagcatcaacctgaacgccatcaacaagtgccccctgctgaagccctgggccctgaccttcagctacggcagagccctgcaggccagcgccctgaaggcctggggcggcaagaaggagaacctgaaggccgcccaggaggagtacgtgaagagagccctggccaacagcctggcctgccagggcaagtacacccccagcggccaggccggcgccgccgccagcgagagcctgttcgtgagcaaccacgcctactag

SEQ ID NO: 1692 - DNA, 1095 bp, synthetic construct; identical to SEQ ID NO: 1691
  misc_feature 1..1095: note = source = /note="Description of Artificial Sequence: Synthetic coding sequence"
  source 1..1095: mol_type = other DNA

SEQ ID NO: 1693 - DNA, 1257 bp, synthetic construct
  misc_feature 1..1257: note = source = /note="Description of Artificial Sequence: Synthetic coding sequence"
  source 1..1257: mol_type = other DNA
atggccagaagaaagcccgagggcagcagcttcaacatgacccacctgagcatggccatggccttcagcttcccccccgtggccagcggccagctgcacccccagctgggcaacacccagcaccagaccgagctgggcaaggagctggccaccaccagcaccatgccctaccagtaccccgccctgacccccgagcagaagaaggagctgagcgacatcgcccacagaatcgtggcccccggcaagggcatcctggccgccgacgagagcaccggcagcatcgccaagagactgcagagcatcggcaccgagaacaccgaggagaacagaagattctacagacagctgctgctgaccgccgacgacagagtgaacccctgcatcggcggcgtgatcctgttccacgagaccctgtaccagaaggccgacgacggcagacccttcccccaggtgatcaagagcaagggcggcgtggtgggcatcaaggtggacaagggcgtggtgcccctggccggcaccaacggcgagaccaccacccagggcctggacggcctgagcgagagatgcgcccagtacaagaaggacggcgccgacttcgccaagtggagatgcgtgctgaagatcggcgagcacacccccagcgccctggccatcatggagaacgccaacgtgctggccagatacgccagcatctgccagcagaacggcatcgtgcccatcgtggagcccgagatcctgcccgacggcgaccacgacctgaagagatgccagtacgtgaccgagaaggtgctggccgccgtgtacaaggccctgagcgaccaccacatctacctggagggcaccctgctgaagcccaacatggtgacccccggccacgcctgcacccagaagttcagccacgaggagatcgccatggccaccgtgaccgccctgagaagaaccgtgccccccgccgtgaccggcatcaccttcctgagcggcggccagagcgaggaggaggccagcatcaacctgaacgccatcaacaagtgccccctgctgaagccctgggccctgaccttcagctacggcagagccctgcaggccagcgccctgaaggcctggggcggcaagaaggagaacctgaaggccgcccaggaggagtacgtgaagagagccctggccaacagcctggcctgccagggcaagtacacccccagcggccaggccggcgccgccgccagcgagagcctgttcgtgagcaaccacgcctactag

SEQ ID NO: 1694 - DNA, 1095 bp, synthetic construct; identical to SEQ ID NO: 1691
  misc_feature 1..1095: note = source = /note="Description of Artificial Sequence: Synthetic coding sequence"
  source 1..1095: mol_type = other DNA

SEQ ID NO: 1695 - DNA, 1095 bp, synthetic construct; identical to SEQ ID NO: 1691
  misc_feature 1..1095: note = source = /note="Description of Artificial Sequence: Synthetic coding sequence"
  source 1..1095: mol_type = other DNA

SEQ ID NO: 1696 - DNA, 1257 bp, synthetic construct; identical to SEQ ID NO: 1693
  misc_feature 1..1257: note = source = /note="Description of Artificial Sequence: Synthetic coding sequence"
  source 1..1257: mol_type = other DNA

SEQ ID NO: 1697 - DNA, 1095 bp, synthetic construct; identical to SEQ ID NO: 1691
  misc_feature 1..1095: note = source = /note="Description of Artificial Sequence: Synthetic coding sequence"
  source 1..1095: mol_type = other DNA

SEQ ID NO: 1698 - DNA, 1344 bp, synthetic construct
  misc_feature 1..1344: note = source = /note="Description of Artificial Sequence: Synthetic coding sequence"
  source 1..1344: mol_type = other DNA
atgagcgccagcaagatccccctgttcaagatgaaggacctgatcctgatcctgtgcctgctggagatgagcttcgccgtgcccttcttcccccagcagagcggcacccccggcatggccagcctgagcctggagaccatgagacagctgggcagcctgcagagactgaacaccctgagccagtacagcagatacggcttcggcaagagcttcaacagcctgtggatgcacggcctgctgcccccccacagcagcctgccctggatgagacccagagagcacgagacccagcagtacgagtacagcctgcccgtgcaccccccccccctgcccagccagcccagcctgaagccccagcagcccggcctgaagcccttcctgcagagcgccgccgccaccaccaaccaggccaccgccctgaaggaggccctgcagccccccatccacctgggccacctgcccctgcaggagggcgagctgcccctggtgcagcagcaggtggcccccagcgacaagccccccaagcccgagctgcccggcgtggacttcgccgacccccagggccccagcctgcccggcatggacttccccgacccccagggccccagcctgcccggcctggacttcgccgacccccagggcagcaccatcttccagatcgccagactgatcagccacggccccatgccccagaacaagcagagccccctgtaccccggcatgctgtacgtgcccttcggcgccaaccagctgaacgcccccgccagactgggcatcatgagcagcgaggaggtggccggcggcagagaggaccccatggcctacggcgccatgttccccggcttcggcggcatgagacccggcttcgagggcatgccccacaaccccgccatgggcggcgacttcaccctggagttcgacagccccgtggccgccaccaagggccccgagaacgaggagggcggcgcccagggcagccccatgcccgaggccaaccccgacaacctggagaaccccgccttcctgaccgagctggagcccgccccccacgccggcctgctggccctgcccaaggacgacatccccggcctgcccagaagccccagcggcaagatgaagggcctgcccagcgtgacccccgccgccgccgaccccctgatgacccccgagctggccgacgtgtacagaacctacgacgccgacatgaccaccagcgtggacttccaggaggaggccaccatggacaccaccatggcccccaacagcctgcagaccagcatgcccggcaacaaggcccaggagcccgagatgatgcacgacgcctggcacttccaggagccctag

SEQ ID NO: 1699 - DNA, 1299 bp, synthetic construct
  misc_feature 1..1299: note = source = /note="Description of Artificial Sequence: Synthetic coding sequence"
  source 1..1299: mol_type = other DNA
atgagcgccagcaagatccccctgttcaagatgaaggacctgatcctgatcctgtgcctgctggagatgagcttcgccgtgcccttcttcccccagcagagcggcacccccggcatggccagcctgagcctggagaccatgagacagctgggcagcctgcagagactgaacaccctgagccagtacagcagatacggcttcggcaagagcttcaacagcctgtggatgcacggcctgctgcccccccacagcagcctgccctggatgagacccagagagcacgagacccagcagcccagcctgaagccccagcagcccggcctgaagcccttcctgcagagcgccgccgccaccaccaaccaggccaccgccctgaaggaggccctgcagccccccatccacctgggccacctgcccctgcaggagggcgagctgcccctggtgcagcagcaggtggcccccagcgacaagccccccaagcccgagctgcccggcgtggacttcgccgacccccagggccccagcctgcccggcatggacttccccgacccccagggccccagcctgcccggcctggacttcgccgacccccagggcagcaccatcttccagatcgccagactgatcagccacggccccatgccccagaacaagcagagccccctgtaccccggcatgctgtacgtgcccttcggcgccaaccagctgaacgcccccgccagactgggcatcatgagcagcgaggaggtggccggcggcagagaggaccccatggcctacggcgccatgttccccggcttcggcggcatgagacccggcttcgagggcatgccccacaaccccgccatgggcggcgacttcaccctggagttcgacagccccgtggccgccaccaagggccccgagaacgaggagggcggcgcccagggcagccccatgcccgaggccaaccccgacaacctggagaaccccgccttcctgaccgagctggagcccgccccccacgccggcctgctggccctgcccaaggacgacatccccggcctgcccagaagccccagcggcaagatgaagggcctgcccagcgtgacccccgccgccgccgaccccctgatgacccccgagctggccgacgtgtacagaacctacgacgccgacatgaccaccagcgtggacttccaggaggaggccaccatggacaccaccatggcccccaacagcctgcagaccagcatgcccggcaacaaggcccaggagcccgagatgatgcacgacgcctggcacttccaggagccctag

SEQ ID NO: 1700 - DNA, 1341 bp, synthetic construct
  misc_feature 1..1341: note = source = /note="Description of Artificial Sequence: Synthetic coding sequence"
  source 1..1341: mol_type = other DNA
atgagcgccagcaagatccccctgttcaagatgaaggacctgatcctgatcctgtgcctgctggagatgagcttcgccgtgcccttcttcccccagcagagcggcacccccggcatggccagcctgagcctggagaccatgagacagctgggcagcctgcagagactgaacaccctgagccagtacagcagatacggcttcggcaagagcttcaacagcctgtggatgcacggcctgctgcccccccacagcagcctgccctggatgagacccagagagcacgagacccagcagtacgagtacagcctgcccgtgcaccccccccccctgcccagccagcccagcctgaagccccagcagcccggcctgaagcccttcctgcagagcgccgccgccaccaccaaccaggccaccgccctgaaggaggccctgcagccccccatccacctgggccacctgcccctgcaggagggcgagctgcccctggtgcagcagcaggtggcccccagcgacaagccccccaagcccgagctgagagtggacttcgccgacccccagggccccagcctgcccggcatggacttccccgacccccagggccccagcctgcccggcctggacttcgccgacccccagggcagcaccatcttccagatcgccagactgatcagccacggccccatgccccagaacaagcagagccccctgtaccccggcatgctgtacgtgcccttcggcgccaaccagctgaacgcccccgccagactgggcatcatgagcagcgaggaggtggccggcggcagagaggaccccatggcctacggcgccatgttccccggcttcggcggcatgagacccggcttcgagggcatgccccacaaccccgccatgggcggcgacttcaccctggagttcgacagccccgtggccgccaccaagggccccgagaacgaggagggcggcgcccagggcagccccatgcccgaggccaaccccgacaacctggagaaccccgccttcctgaccgagctggagcccgccccccacgccggcctgctggccctgcccaaggacgacatccccggcctgcccagaagccccagcggcaagatgaagggcctgcccagcgtgacccccgccgccgccgaccccctgatgacccccgagctggccgacgtgtacagaacctacgacgccgacatgaccaccagcgtggacttccaggaggaggccaccatggacaccaccatggcccccaacagcctgcagaccagcatgcccggcaacaaggcccaggagcccgagatgatgcacgacgcctggcacttccaggagccctag

SEQ ID NO: 1701 - DNA, 528 bp, synthetic construct
  misc_feature 1..528: note = source = /note="Description of Artificial Sequence: Synthetic coding sequence"
  source 1..528: mol_type = other DNA
atgggcacctggatcctgttcgcctgcctgctgggcgccgccttcgccatgcccgtgctgacccccctgaagtggtaccagagcatcagacccccctaccccagctacggctacgagcccatgggcggctggctgcaccaccagatcatccccgtgctgagccagcagcacccccccacccacaccctgcagccccaccaccacatccccgtggtgcccgcccagcagcccgtgatcccccagcagcccatgatgcccgtgcccggccagcacagcatgacccccatccagcaccaccagcccaacctgcccccccccgcccagcagccctaccagccccagcccgtgcagccccagccccaccagcccatgcagccccagccccccgtgcaccccatgcagcccctgcccccccagccccccctgccccccatgttccccatgcagcccctgccccccatgctgcccgacctgaccctggaggcctggcccagcaccgacaagaccaagagagaggaggtggactag

SEQ ID NO: 1702 - DNA, 618 bp, synthetic construct
  misc_feature 1..618: note = source = /note="Description of Artificial Sequence: Synthetic coding sequence"
  source 1..618: mol_type = other DNA
atgggcacctggatcctgttcgcctgcctgctgggcgccgccttcgccatgcccctgcccccccaccccggccaccccggctacatcaacttcagctacgagaacagccacagccaggccatcaacgtggacagaaccgccctggtgctgacccccctgaagtggtaccagagcatcagacccccctaccccagctacggctacgagcccatgggcggctggctgcaccaccagatcatccccgtgctgagccagcagcacccccccacccacaccctgcagccccaccaccacatccccgtggtgcccgcccagcagcccgtgatcccccagcagcccatgatgcccgtgcccggccagcacagcatgacccccatccagcaccaccagcccaacctgcccccccccgcccagcagccctaccagccccagcccgtgcagccccagccccaccagcccatgcagccccagccccccgtgcaccccatgcagcccctgcccccccagccccccctgccccccatgttccccatgcagcccctgccccccatgctgcccgacctgaccctggaggcctggcccagcaccgacaagaccaagagagaggaggtggactag

SEQ ID NO: 1703 - DNA, 576 bp, synthetic construct
  misc_feature 1..576: note = source = /note="Description of Artificial Sequence: Synthetic coding sequence"
  source 1..576: mol_type = other DNA
atgggcacctggatcctgttcgcctgcctgctgggcgccgccttcgccatgcccctgcccccccaccccggccaccccggctacatcaacttcagctacgaggtgctgacccccctgaagtggtaccagagcatcagacccccctaccccagctacggctacgagcccatgggcggctggctgcaccaccagatcatccccgtgctgagccagcagcacccccccacccacaccctgcagccccaccaccacatccccgtggtgcccgcccagcagcccgtgatcccccagcagcccatgatgcccgtgcccggccagcacagcatgacccccatccagcaccaccagcccaacctgcccccccccgcccagcagccctaccagccccagcccgtgcagccccagccccaccagcccatgcagccccagccccccgtgcaccccatgcagcccctgcccccccagccccccctgccccccatgttccccatgcagcccctgccccccatgctgcccgacctgaccctggaggcctggcccagcaccgacaagaccaagagagaggaggtggactag

SEQ ID NO: 1704 - DNA, 4023 bp, synthetic construct
  misc_feature 1..4023: note = source = /note="Description of Artificial Sequence: Synthetic coding sequence"
  source 1..4023: mol_type = other DNA
atgttcagagtgggcttcctgatcatcagcagcagcagcagcctgagccccctgctgctggtgagcgtggtgagagtgaacaccaccaactgccacaagtgcctgctgagcggcacctacatcttcgccgtgctgctggtgtgcgtggtgttccacagcggcgcccaggagaagaactacaccatcagagaggagatccccgagaacgtgctgatcggcaacctgctgaaggacctgaacctgagcctgatccccaacaagagcctgaccaccaccatgcagttcaagctggtgtacaagaccggcgacgtgcccctgatcagaatcgaggaggacaccggcgagatcttcaccaccggcgccagaatcgacagagagaagctgtgcgccggcatccccagagacgagcactgcttctacgaggtggaggtggccatcctgcccgacgagatcttcagactggtgaagatcagattcctgatcgaggacatcaacgacaacgcccccctgttccccgccaccgtgatcaacatcagcatccccgagaacagcgccatcaacagcaagtacaccctgcccgccgccgtggaccccgacgtgggcatcaacggcgtgcagaactacgagctgatcaagagccagaacatcttcggcctggacgtgatcgagacccccgagggcgacaagatgccccagctgatcgtgcagaaggagctggacagagaggagaaggacacctacgtgatgaaggtgaaggtggaggacggcggcttcccccagagaagcagcaccgccatcctgcaggtgagcgtgaccgacaccaacgacaaccaccccgtgttcaaggagaccgagatcgaggtgagcatccccgagaacgcccccgtgggcaccagcgtgacccagctgcacgccaccgacgccgacatcggcgagaacgccaagatccacttcagcttcagcaacctggtgagcaacatcgccagaagactgttccacctgaacgccaccaccggcctgatcaccatcaaggagcccctggacagagaggagacccccaaccacaagctgctggtgctggccagcgacggcggcctgatgcccgccagagccatggtgctggtgaacgtgaccgacgtgaacgacaacgtgcccagcatcgacatcagatacatcgtgaaccccgtgaacgacaccgtggtgctgagcgagaacatccccctgaacaccaagatcgccctgatcaccgtgaccgacaaggacgccgaccacaacggcagagtgacctgcttcaccgaccacgagatccccttcagactgagacccgtgttcagcaaccagttcctgctggagaacgccgcctacctggactacgagagcaccaaggagtacgccatcaagctgctggccgccgacgccggcaagccccccctgaaccagagcgccatgctgttcatcaaggtgaaggacgagaacgacaacgcccccgtgttcacccagagcttcgtgaccgtgagcatccccgagaacaacagccccggcatccagctgatgaaggtgagcgccaccgacgccgacagcggccccaacgccgagatcaactacctgctgggccccgacgccccccccgagttcagcctggacagaagaaccggcatgctgaccgtggtgaagaagctggacagagagaaggaggacaagtacctgttcaccatcctggccaaggacaacggcgtgccccccctgaccagcaacgtgaccgtgttcgtgagcatcatcgaccagaacgacaacagccccgtgttcacccacaacgagtacaagttctacgtgcccgagaacctgcccagacacggcaccgtgggcctgatcaccgtgaccgaccccgactacggcgacaacagcgccgtgaccctgagcatcctggacgagaacgacgacttcaccatcgacagccagaccggcgtgatcagacccaacatcagcttcgacagagagaagcaggagagctacaccttctacgtgaaggccgaggacggcggcagagtgagcagaagcagcagcgccaaggtgaccatcaacgtggtggacgtgaacgacaacaagcccgtgttcatcgtgcccccctacaactacagctacgagctggtgctgcccagcaccaaccccggcaccgtggtgttccaggtgatcgccgtggacaacgacaccggcatgaacgccgaggtgagatacagcatcgtgggcggcaacaccagagacctgttcgccatcgaccaggagaccggcaacatcaccctgatggagaagtgcgacgtgaccgacctgggcctgcacagagtgctggtgaaggccaacgacctgggccagcccgacagcctgttcagcgtggtgatcgtgaacctgttcgtgaacgagagcgtgaccaacgccaccctgatcaacgagctggtgagaaagagcatcgaggcccccgtgacccccaacaccgagatcgccgacgtgagcagccccaccagcgactacgtgaagatcctggtggccgccgtggccggcaccatcaccgtggtggtggtgatcttcatcaccgccgtggtgagatgcagacaggccccccacctgaaggccgcccagaagaacatgcagaacagcgagtgggccacccccaaccccgagaacagacagatgatcatgatgaagaagaagaagaagaagaagaagcacagccccaagaacctgctgctgaacgtggtgaccatcgaggagaccaaggccgacgacgtggacagcgacggcaacagagtgaccctggacctgcccatcgacctggaggagcagaccatgggcaagtacaactgggtgaccacccccaccaccttcaagcccgacagccccgacctggccagacactacaagagcgccagcccccagcccgccttccagatccagcccgagacccccctgaacctgaagcaccacatcatccaggagctgcccctggacaacaccttcgtggcctgcgacagcatcagcaactgcagcagcagcagcagcgacccctacagcgtgagcgactgcggctaccccgtgaccaccttcgaggtgcccgtgagcgtgcacaccagacccagccagagaagagtgaccttccacctgcccgagggcagccaggagagcagcagcgacggcggcctgggcgaccacgacgccggcagcctgaccagcaccagccacggcctgcccctgggctacccccaggaggagtacttcgacagagccacccccagcaacagaaccgagggcgacggcaacagcgaccccgagagcaacttcatcagcggcatgagagagaagatcaccgtgcagcccaccgtggaggaggccagcgacaactgcacccaggagtgcctgatctacggccacagcgacgcctgctggatgcccgccagcctggaccacagcagcagcagccaggcccaggccagcgccctgtgccacagcccccccctgagccaggccagcacccagcaccacagcccccccgtgacccagaccatcgtgctgtgccacagcccccccgtgacccagaccatcgccctgtgccacagccccccccccatccaggtgagcgccctgcaccacagcccccccctggtgcagggcaccgccctgcaccacagcccccccagcgcccaggccagcgccctgtgctacagcccccccctggcccaggccgccgccatcagccacagcagcagcctgccccaggtgatcgccctgcacagaagccaggcccagagcagcgtgagcctgcagcagggctgggtgcagggcgccaacggcctgtgcagcgtggaccagggcgtgcagggcagcgccaccagccagttctacaccatgagcgagagactgcaccccagcgacgacagcatcaaggtgatccccctgaccaccttcgcccccagacagcaggccagacccagcagaggcgacagccccatcatggagacccaccccctgtag

SEQ ID NO: 1705 - DNA, 621 bp, synthetic construct
  misc_feature 1..621: note = source = /note="Description of Artificial Sequence: Synthetic coding sequence"
  source 1..621: mol_type = other DNA
atgggcacctggatcctgttcgcctgcctggtgggcgccgccttcgccatgcccctgcccccccaccccggccaccccggctacatcaacttcagctacgagaacagccacagccaggccatcaacgtggacagaatcgccctggtgctgacccccctgaagtggtaccagagcatgatcagacccccctacagcagctacggctacgagcccatgggcggctggctgcaccaccagatcatccccgtggtgagccagcagcaccccctgacccacaccctgcagagccaccaccacatccccgtggtgcccgcccagcagcccagagtgagacagcaggccctgatgcccgtgcccggccagcagagcatgacccccacccagcaccaccagcccaacctgcccctgcccgcccagcagcccttccagccccagcccgtgcagccccagccccaccagcccatgcagccccagccccccgtgcagcccatgcagcccctgctgccccagccccccctgccccccatgttccccctgagacccctgccccccatcctgcccgacctgcacctggaggcctggcccgccaccgacaagaccaagcaggaggaggtggactag

SEQ ID NO: 1706 - DNA, 618 bp, synthetic construct
  misc_feature 1..618: note = source = /note="Description of Artificial Sequence: Synthetic coding sequence"
  source 1..618: mol_type = other DNA
atgggcacctggatcctgttcgcctgcctggtgggcgccgccttcgccatgcccctgcccccccaccccggccaccccggctacatcaacttcagctacgagaacagccacagccaggccatcaacgtggacagaatcgccctggtgctgacccccctgaagtggtaccagagcatgatcagacccccctacagcagctacggctacgagcccatgggcggctggctgcaccaccagatcatccccgtggtgagccagcagcaccccctgacccacaccctgcagagccaccaccacatccccgtggtgcccgcccagcagcccagagtgagacagcaggccctgatgcccgtgcccggccagcagagcatgacccccacccagcaccaccagcccaacctgcccctgcccgcccagcagcccttccagccccagcccgtgcagccccagccccaccagcccatgcagccccagccccccgtgcagcccatgcagcccctgctgccccagccccccctgccccccatgttccccctgagacccctgccccccatcctgcccgacctgcacctggaggcctggcccgccaccgacaagaccaagcaggaggaggtgtag

SEQ ID NO: 1707 - DNA, 4599 bp, synthetic construct
  misc_feature 1..4599: note = source = /note="Description of Artificial Sequence: Synthetic coding sequence"
  source 1..4599: mol_type = other DNA
atgggccacagcaagcagatcagaatcctgctgctgaacgagatggagaagctggagaagaccctgttcagactggagcagggctacgagctgcagttcagactgggccccaccctgcagggcaaggccgtgaccgtgtacaccaactaccccttccccggcgagaccttcaacagagagaagttcagaagcctggactgggagaaccccaccgagagagaggacgacagcgacaagtactgcaagctgaacctgcagcagagcggcagcttccagtactacttcctgcagggcaacgagaagagcggcggcggctacatcgtggtggaccccatcctgagagtgggcgccgacaaccacgtgctgcccctggactgcgtgaccctgcagaccttcctggccaagtgcctgggccccttcgacgagtgggagagcagactgagagtggccaaggagagcggctacaacatgatccacttcacccccctgcagaccctgggcctgagcagaagctgctacagcctggccaaccagctggagctgaaccccgacttcagcagacccaacagaaagtacacctggaacgacgtgggccagctggtggagaagctgaagaaggagtggaacgtgatctgcatcaccgacgtggtgtacaaccacaccgccgccaacagcaagtggatccaggagcaccccgagtgcgcctacaacctggtgaacagcccccacctgaagcccgcctgggtgctggacagagccctgtggagattcagctgcgacgtggccgagggcaagtacaaggagaagggcatccccgccctgatcgagaacgaccaccacatgaacagcatcagaaagatcatctgggaggacatcttccccaagctgaagctgtgggagttcttccaggtggacgtgaacaaggccgtggagcagttcagaagactgctgacccaggagaacagaagagtgaccaagagcgaccccaaccagcacctgaccatcatccaggaccccgagtacagaagattcggctgcaccgtggacatgaacatcgccctgaccaccttcatcccccacgacaagggccccgccgccatcgaggagtgctgcaactggttccacaagagaatggaggagctgaacagcgagaagcacagactgatcaactaccaccaggagcaggccgtgaactgcctgctgggcaacgtgttctacgagagactggccggccacggccccaagctgggccccgtgaccagaaagcaccccctggtgaccagatacttcaccttccccttcgaggagatcgacttcagcatggaggagagcatgatccacctgcccaacaaggcctgcttcctgatggcccacaacggctgggtgatgggcgacgaccccctgagaaacttcgccgagcccggcagcgaggtgtacctgagaagagagctgatctgctggggcgacagcgtgaagctgagatacggcaacaagcccgaggactgcccctacctgtgggcccacatgaagaagtacaccgagatcaccgccacctacttccagggcgtgagactggacaactgccacagcacccccctgcacgtggccgagtacatgctggacgccgccagaaacctgcagcccaacctgtacgtggtggccgagctgttcaccggcagcgaggacctggacaacgtgttcgtgaccagactgggcatcagcagcctgatcagagaggccatgagcgcctacaacagccacgaggagggcagactggtgtacagatacggcggcgagcccgtgggcagcttcgtgcagccctgcctgagacccctgatgcccgccatcgcccacgccctgttcatggacatcacccacgacaacgagtgccccatcgtgcacagaagcgcctacgacgccctgcccagcaccaccatcgtgagcatggcctgctgcgccagcggcagcaccagaggctacgacgagctggtgccccaccagatcagcgtggtgagcgaggagagattctacaccaagtggaaccccgaggccctgcccagcaacaccggcgaggtgaacttccagagcggcatcatcgccgccagatgcgccatcagcaagctgcaccaggagctgggcgccaagggcttcatccaggtgtacgtggaccaggtggacgaggacatcgtggccgtgaccagacacagccccagcatccaccagagcgtggtggccgtgagcagaaccgccttcagaaaccccaagaccagcttctacagcaaggaggtgccccagatgtgcatccccggcaagatcgaggaggtggtgctggaggccagaaccatcgagagaaacaccaagccctacagaaaggacgagaacagcatcaacggcacccccgacatcaccgtggagatcagagagcacatccagctgaacgagagcaagatcgtgaagcaggccggcgtggccaccaagggccccaacgagtacatccaggagatcgagttcgagaacctgagccccggcagcgtgatcatcttcagagtgagcctggacccccacgcccaggtggccgtgggcatcctgagaaaccacctgacccagttcagcccccacttcaagagcggcagcctggccgtggacaacgccgaccccatcctgaagatccccttcgccagcctggccagcagactgaccctggccgagctgaaccagatcctgtacagatgcgagagcgaggagaaggaggacggcggcggctgctacgacatccccaactggagcgccctgaagtacgccggcctgcagggcctgatgagcgtgctggccgagatcagacccaagaacgacctgggccaccccttctgcaacaacctgagaagcggcgactggatgatcgactacgtgagcaacagactgatcagcagaagcggcaccatcgccgaggtgggcaagtggctgcaggccatgttcttctacctgaagcagatccccagatacctgatcccctgctacttcgacgccatcctgatcggcgcctacaccaccctgctggacaccgcctggaagcagatgagcagcttcgtgcagaacggcagcaccttcgtgaagcacctgagcctgggcagcgtgcagctgtgcggcgtgggcaagttccccagcctgcccatcctgagccccgccctgatggacgtgccctacagactgaacgagatcaccaaggagaaggagcagtgctgcgtgagcctggccgccggcctgccccacttcagcagcggcatcttcagatgctggggcagagacaccttcatcgccctgagaggcatcctgctgatcaccggcagatacgtggaggccagaaacatcatcctggccttcgccggcaccctgagacacggcctgatccccaacctgctgggcgagggcatctacgccagatacaactgcagagacgccgtgtggtggtggctgcagtgcatccaggactactgcaagatggtgcccaacggcctggacatcctgaagtgccccgtgagcagaatgtaccccaccgacgacagcgcccccctgcccgccggcaccctggaccagcccctgttcgaggtgatccaggaggccatgcagaagcacatgcagggcatccagttcagagagagaaacgccggcccccagatcgacagaaacatgaaggacgagggcttcaacatcaccgccggcgtggacgaggagaccggcttcgtgtacggcggcaacagattcaactgcggcacctggatggacaagatgggcgagagcgacagagccagaaacagaggcatccccgccacccccagagacggcagcgccgtggagatcgtgggcctgagcaagagcgccgtgagatggctgctggagctgagcaagaagaacatcttcccctaccacgaggtgaccgtgaagagacacggcaaggccatcaaggtgagctacgacgagtggaacagaaagatccaggacaacttcgagaagctgttccacgtgagcgaggaccccagcgacctgaacgagaagcaccccaacctggtgcacaagagaggcatctacaaggacagctacggcgccagcagcccctggtgcgactaccagctgagacccaacttcaccatcgccatggtggtggcccccgagctgttcaccaccgagaaggcctggaaggccctggagatcgccgagaagaagctgctgggccccctgggcatgaagaccctggaccccgacgacatggtgtactgcggcatctacgacaacgccctggacaacgacaactacaacctggccaagggcttcaactaccaccagggccccgagtggctgtggcccatcggctacttcctgagagccaagctgtacttcagcagactgatgggccccgagaccaccgccaagaccatcgtgctggtgaagaacgtgctgagcagacactacgtgcacctggagagaagcccctggaagggcctgcccgagctgaccaacgagaacgcccagtactgccccttcagctgcgagacccaggcctggagcatcgccaccatcctggagaccctgtacgacctgtag

SEQ ID NO: 1708 - DNA, 4551 bp, synthetic construct
  misc_feature 1..4551: note = source = /note="Description of Artificial Sequence: Synthetic coding sequence"
  source 1..4551: mol_type = other DNA
atggcccccatcctgagcatcaacctgttcatcggctacgagctgcagttcagactgggccccaccctgcagggcaaggccgtgaccgtgtacaccaactaccccttccccggcgagaccttcaacagagagaagttcagaagcctggactgggagaaccccaccgagagagaggacgacagcgacaagtactgcaagctgaacctgcagcagagcggcagcttccagtactacttcctgcagggcaacgagaagagcggcggcggctacatcgtggtggaccccatcctgagagtgggcgccgacaaccacgtgctgcccctggactgcgtgaccctgcagaccttcctggccaagtgcctgggccccttcgacgagtgggagagcagactgagagtggccaaggagagcggctacaacatgatccacttcacccccctgcagaccctgggcctgagcagaagctgctacagcctggccaaccagctggagctgaaccccgacttcagcagacccaacagaaagtacacctggaacgacgtgggccagctggtggagaagctgaagaaggagtggaacgtgatctgcatcaccgacgtggtgtacaaccacaccgccgccaacagcaagtggatccaggagcaccccgagtgcgcctacaacctggtgaacagcccccacctgaagcccgcctgggtgctggacagagccctgtggagattcagctgcgacgtggccgagggcaagtacaaggagaagggcatccccgccctgatcgagaacgaccaccacatgaacagcatcagaaagatcatctgggaggacatcttccccaagctgaagctgtgggagttcttccaggtggacgtgaacaaggccgtggagcagttcagaagactgctgacccaggagaacagaagagtgaccaagagcgaccccaaccagcacctgaccatcatccaggaccccgagtacagaagattcggctgcaccgtggacatgaacatcgccctgaccaccttcatcccccacgacaagggccccgccgccatcgaggagtgctgcaactggttccacaagagaatggaggagctgaacagcgagaagcacagactgatcaactaccaccaggagcaggccgtgaactgcctgctgggcaacgtgttctacgagagactggccggccacggccccaagctgggccccgtgaccagaaagcaccccctggtgaccagatacttcaccttccccttcgaggagatcgacttcagcatggaggagagcatgatccacctgcccaacaaggcctgcttcctgatggcccacaacggctgggtgatgggcgacgaccccctgagaaacttcgccgagcccggcagcgaggtgtacctgagaagagagctgatctgctggggcgacagcgtgaagctgagatacggcaacaagcccgaggactgcccctacctgtgggcccacatgaagaagtacaccgagatcaccgccacctacttccagggcgtgagactggacaactgccacagcacccccctgcacgtggccgagtacatgctggacgccgccagaaacctgcagcccaacctgtacgtggtggccgagctgttcaccggcagcgaggacctggacaacgtgttcgtgaccagactgggcatcagcagcctgatcagagaggccatgagcgcctacaacagccacgaggagggcagactggtgtacagatacggcggcgagcccgtgggcagcttcgtgcagccctgcctgagacccctgatgcccgccatcgcccacgccctgttcatggacatcacccacgacaacgagtgccccatcgtgcacagaagcgcctacgacgccctgcccagcaccaccatcgtgagcatggcctgctgcgccagcggcagcaccagaggctacgacgagctggtgccccaccagatcagcgtggtgagcgaggagagattctacaccaagtggaaccccgaggccctgcccagcaacaccggcgaggtgaacttccagagcggcatcatcgccgccagatgcgccatcagcaagctgcaccaggagctgggcgccaagggcttcatccaggtgtacgtggaccaggtggacgaggacatcgtggccgtgaccagacacagccccagcatccaccagagcgtggtggccgtgagcagaaccgccttcagaaaccccaagaccagcttctacagcaaggaggtgccccagatgtgcatccccggcaagatcgaggaggtggtgctggaggccagaaccatcgagagaaacaccaagccctacagaaaggacgagaacagcatcaacggcacccccgacatcaccgtggagatcagagagcacatccagctgaacgagagcaagatcgtgaagcaggccggcgtggccaccaagggccccaacgagtacatccaggagatcgagttcgagaacctgagccccggcagcgtgatcatcttcagagtgagcctggacccccacgcccaggtggccgtgggcatcctgagaaaccacctgacccagttcagcccccacttcaagagcggcagcctggccgtggacaacgccgaccccatcctgaagatccccttcgccagcctggccagcagactgaccctggccgagctgaaccagatcctgtacagatgcgagagcgaggagaaggaggacggcggcggctgctacgacatccccaactggagcgccctgaagtacgccggcctgcagggcctgatgagcgtgctggccgagatcagacccaagaacgacctgggccaccccttctgcaacaacctgagaagcggcgactggatgatcgactacgtgagcaacagactgatcagcagaagcggcaccatcgccgaggtgggcaagtggctgcaggccatgttcttctacctgaagcagatccccagatacctgatcccctgctacttcgacgccatcctgatcggcgcctacaccaccctgctggacaccgcctggaagcagatgagcagcttcgtgcagaacggcagcaccttcgtgaagcacctgagcctgggcagcgtgcagctgtgcggcgtgggcaagttccccagcctgcccatcctgagccccgccctgatggacgtgccctacagactgaacgagatcaccaaggagaaggagcagtgctgcgtgagcctggccgccggcctgccccacttcagcagcggcatcttcagatgctggggcagagacaccttcatcgccctgagaggcatcctgctgatcaccggcagatacgtggaggccagaaacatcatcctggccttcgccggcaccctgagacacggcctgatccccaacctgctgggcgagggcatctacgccagatacaactgcagagacgccgtgtggtggtggctgcagtgcatccaggactactgcaagatggtgcccaacggcctggacatcctgaagtgccccgtgagcagaatgtaccccaccgacgacagcgcccccctgcccgccggcaccctggaccagcccctgttcgaggtgatccaggaggccatgcagaagcacatgcagggcatccagttcagagagagaaacgccggcccccagatcgacagaaacatgaaggacgagggcttcaacatcaccgccggcgtggacgaggagaccggcttcgtgtacggcggcaacagattcaactgcggcacctggatggacaagatgggcgagagcgacagagccagaaacagaggcatccccgccacccccagagacggcagcgccgtggagatcgtgggcctgagcaagagcgccgtgagatggctgctggagctgagcaagaagaacatcttcccctaccacgaggtgaccgtgaagagacacggcaaggccatcaaggtgagctacgacgagtggaacagaaagatccaggacaacttcgagaagctgttccacgtgagcgaggaccccagcgacctgaacgagaagcaccccaacctggtgcacaagagaggcatctacaaggacagctacggcgccagcagcccctggtgcgactaccagctgagacccaacttcaccatcgccatggtggtggcccccgagctgttcaccaccgagaaggcctggaaggccctggagatcgccgagaagaagctgctgggccccctgggcatgaagaccctggaccccgacgacatggtgtactgcggcatctacgacaacgccctggacaacgacaactacaacctggccaagggcttcaactaccaccagggccccgagtggctgtggcccatcggctacttcctgagagccaagctgtacttcagcagactgatgggccccgagaccaccgccaagaccatcgtgctggtgaagaacgtgctgagcagacactacgtgcacctggagagaagcccctggaagggcctgcccgagctgaccaacgagaacgcccagtactgccccttcagctgcgagacccaggcctggagcatcgccaccatcctggagaccctgtacgacctgtag

SEQ ID NO: 1709 - DNA, 4548 bp, synthetic construct
  misc_feature 1..4548: note = source = /note="Description of Artificial Sequence: Synthetic coding sequence"
  source 1..4548: mol_type = other DNA
atgagcctgctgacctgcgccttctacctgggctacgagctgcagttcagactgggccccaccctgcagggcaaggccgtgaccgtgtacaccaactaccccttccccggcgagaccttcaacagagagaagttcagaagcctggactgggagaaccccaccgagagagaggacgacagcgacaagtactgcaagctgaacctgcagcagagcggcagcttccagtactacttcctgcagggcaacgagaagagcggcggcggctacatcgtggtggaccccatcctgagagtgggcgccgacaaccacgtgctgcccctggactgcgtgaccctgcagaccttcctggccaagtgcctgggccccttcgacgagtgggagagcagactgagagtggccaaggagagcggctacaacatgatccacttcacccccctgcagaccctgggcctgagcagaagctgctacagcctggccaaccagctggagctgaaccccgacttcagcagacccaacagaaagtacacctggaacgacgtgggccagctggtggagaagctgaagaaggagtggaacgtgatctgcatcaccgacgtggtgtacaaccacaccgccgccaacagcaagtggatccaggagcaccccgagtgcgcctacaacctggtgaacagcccccacctgaagcccgcctgggtgctggacagagccctgtggagattcagctgcgacgtggccgagggcaagtacaaggagaagggcatccccgccctgatcgagaacgaccaccacatgaacagcatcagaaagatcatctgggaggacatcttccccaagctgaagctgtgggagttcttccaggtggacgtgaacaaggccgtggagcagttcagaagactgctgacccaggagaacagaagagtgaccaagagcgaccccaaccagcacctgaccatcatccaggaccccgagtacagaagattcggctgcaccgtggacatgaacatcgccctgaccaccttcatcccccacgacaagggccccgccgccatcgaggagtgctgcaactggttccacaagagaatggaggagctgaacagcgagaagcacagactgatcaactaccaccaggagcaggccgtgaactgcctgctgggcaacgtgttctacgagagactggccggccacggccccaagctgggccccgtgaccagaaagcaccccctggtgaccagatacttcaccttccccttcgaggagatcgacttcagcatggaggagagcatgatccacctgcccaacaaggcctgcttcctgatggcccacaacggctgggtgatgggcgacgaccccctgagaaacttcgccgagcccggcagcgaggtgtacctgagaagagagctgatctgctggggcgacagcgtgaagctgagatacggcaacaagcccgaggactgcccctacctgtgggcccacatgaagaagtacaccgagatcaccgccacctacttccagggcgtgagactggacaactgccacagcacccccctgcacgtggccgagtacatgctggacgccgccagaaacctgcagcccaacctgtacgtggtggccgagctgttcaccggcagcgaggacctggacaacgtgttcgtgaccagactgggcatcagcagcctgatcagagaggccatgagcgcctacaacagccacgaggagggcagactggtgtacagatacggcggcgagcccgtgggcagcttcgtgcagccctgcctgagacccctgatgcccgccatcgcccacgccctgttcatggacatcacccacgacaacgagtgccccatcgtgcacagaagcgcctacgacgccctgcccagcaccaccatcgtgagcatggcctgctgcgccagcggcagcaccagaggctacgacgagctggtgccccaccagatcagcgtggtgagcgaggagagattctacaccaagtggaaccccgaggccctgcccagcaacaccggcgaggtgaacttccagagcggcatcatcgccgccagatgcgccatcagcaagctgcaccaggagctgggcgccaagggcttcatccaggtgtacgtggaccaggtggacgaggacatcgtggccgtgaccagacacagccccagcatccaccagagcgtggtggccgtgagcagaaccgccttcagaaaccccaagaccagcttctacagcaaggaggtgccccagatgtgcatccccggcaagatcgaggaggtggtgctggaggccagaaccatcgagagaaacaccaagccctacagaaaggacgagaacagcatcaacggcacccccgacatcaccgtggagatcagagagcacatccagctgaacgagagcaagatcgtgaagcaggccggcgtggccaccaagggccccaacgagtacatccaggagatcgagttcgagaacctgagccccggcagcgtgatcatcttcagagtgagcctggacccccacgcccaggtggccgtgggcatcctgagaaaccacctgacccagttcagcccccacttcaagagcggcagcctggccgtggacaacgccgaccccatcctgaagatccccttcgccagcctggccagcagactgaccctggccgagctgaaccagatcctgtacagatgcgagagcgaggagaaggaggacggcggcggctgctacgacatccccaactggagcgccctgaagtacgccggcctgcagggcctgatgagcgtgctggccgagatcagacccaagaacgacctgggccaccccttctgcaacaacctgagaagcggcgactggatgatcgactacgtgagcaacagactgatcagcagaagcggcaccatcgccgaggtgggcaagtggctgcaggccatgttcttctacctgaagcagatccccagatacctgatcccctgctacttcgacgccatcctgatcggcgcctacaccaccctgctggacaccgcctggaagcagatgagcagcttcgtgcagaacggcagcaccttcgtgaagcacctgagcctgggcagcgtgcagctgtgcggcgtgggcaagttccccagcctgcccatcctgagccccgccctgatggacgtgccctacagactgaacgagatcaccaaggagaaggagcagtgctgcgtgagcctggccgccggcctgccccacttcagcagcggcatcttcagatgctggggcagagacaccttcatcgccctgagaggcatcctgctgatcaccggcagatacgtggaggccagaaacatcatcctggccttcgccggcaccctgagacacggcctgatccccaacctgctgggcgagggcatctacgccagatacaactgcagagacgccgtgtggtggtggctgcagtgcatccaggactactgcaagatggtgcccaacggcctggacatcctgaagtgccccgtgagcagaatgtaccccaccgacgacagcgcccccctgcccgccggcaccctggaccagcccctgttcgaggtgatccaggaggccatgcagaagcacatgcagggcatccagttcagagagagaaacgccggcccccagatcgacagaaacatgaaggacgagggcttcaacatcaccgccggcgtggacgaggagaccggcttcgtgtacggcggcaacagattcaactgcggcacctggatggacaagatgggcgagagcgacagagccagaaacagaggcatccccgccacccccagagacggcagcgccgtggagatcgtgggcctgagcaagagcgccgtgagatggctgctggagctgagcaagaagaacatcttcccctaccacgaggtgaccgtgaagagacacggcaaggccatcaaggtgagctacgacgagtggaacagaaagatccaggacaacttcgagaagctgttccacgtgagcgaggaccccagcgacctgaacgagaagcaccccaacctggtgcacaagagaggcatctacaaggacagctacggcgccagcagcccctggtgcgactaccagctgagacccaacttcaccatcgccatggtggtggcccccgagctgttcaccaccgagaaggcctggaaggccctggagatcgccgagaagaagctgctgggccccctgggcatgaagaccctggaccccgacgacatggtgtactgcggcatctacgacaacgccctggacaacgacaactacaacctggccaagggcttcaactaccaccagggccccgagtggctgtggcccatcggctacttcctgagagccaagctgtacttcagcagactgatgggccccgagaccaccgccaagaccatcgtgctggtgaagaacgtgctgagcagacactacgtgcacctggagagaagcccctggaagggcctgcccgagctgaccaacgagaacgcccagtactgccccttcagctgcgagacccaggcctggagcatcgccaccatcctggagaccctgtacgacctgtag

SEQ ID NO: 1710 - DNA, 4599 bp, synthetic construct; identical to SEQ ID NO: 1707
  misc_feature 1..4599: note = source = /note="Description of Artificial Sequence: Synthetic coding sequence"
  source 1..4599: mol_type = other DNA

SEQ ID NO: 1711 - DNA, 4551 bp, synthetic construct; identical to SEQ ID NO: 1708
  misc_feature 1..4551: note = source = /note="Description of Artificial Sequence: Synthetic coding sequence"
  source 1..4551: mol_type = other DNA

SEQ ID NO: 1712 - DNA, 4599 bp, synthetic construct; identical to SEQ ID NO: 1707
  misc_feature 1..4599: note = source = /note="Description of Artificial Sequence: Synthetic coding sequence"
  source 1..4599: mol_type = other DNA

SEQ ID NO: 1713 - DNA, 4599 bp, synthetic construct; identical to SEQ ID NO: 1707
  misc_feature 1..4599: note = source = /note="Description of Artificial Sequence: Synthetic coding sequence"
  source 1..4599: mol_type = other DNA

SEQ ID NO: 1714 - DNA, 672 bp, synthetic construct
  misc_feature 1..672: note = source = /note="Description of Artificial Sequence: Synthetic coding sequence"
  source 1..672: mol_type = other DNA
atgaacaagcccctgctgtggatcagcgtgctgaccagcctgctggaggccttcgcccacaccgacctgagcggcaaggtgttcgtgttccccagagagagcgtgaccgaccacgtgaacctgatcacccccctggagaagcccctgcagaacttcaccctgtgcttcagagcctacagcgacctgagcagagcctacagcctgttcagctacaacacccagggcagagacaacgagctgctggtgtacaaggagagagtgggcgagtacagcctgtacatcggcagacacaaggtgaccagcaaggtgatcgagaagttccccgcccccgtgcacatctgcgtgagctgggagagcagcagcggcatcgccgagttctggatcaacggcacccccctggtgaagaagggcctgagacagggctacttcgtggaggcccagcccaagatcgtgctgggccaggagcaggacagctacggcggcaagttcgacagaagccagagcttcgtgggcgagatcggcgacctgtacatgtgggacagcgtgctgccccccgagaacatcctgagcgcctaccagggcacccccctgcccgccaacatcctggactggcaggccctgaactacgagatcagaggctacgtgatcatcaagcccctggtgtgggtgtag

SEQ ID NO: 1715 - DNA, 2418 bp, synthetic construct
  misc_feature 1..2418: note = source = /note="Description of Artificial Sequence: Synthetic coding sequence"
  source 1..2418: mol_type = other DNA
atgagcagcagcagctggctgctgctgagcctggtggccgtgaccgccgcccagagcaccatcgaggagcaggccaagaccttcctggacaagttcaaccacgaggccgaggacctgttctaccagagcagcctggccagctggaactacaacaccaacatcaccgaggagaacgtgcagaacatgaacaacgccggcgacaagtggagcgccttcctgaaggagcagagcaccctggcccagatgtaccccctgcaggagatccagaacctgaccgtgaagctgcagctgcaggccctgcagcagaacggcagcagcgtgctgagcgaggacaagagcaagagactgaacaccatcctgaacaccatgagcaccatctacagcaccggcaaggtgtgcaaccccgacaacccccaggagtgcctgctgctggagcccggcctgaacgagatcatggccaacagcctggactacaacgagagactgtgggcctgggagagctggagaagcgaggtgggcaagcagctgagacccctgtacgaggagtacgtggtgctgaagaacgagatggccagagccaaccactacgaggactacggcgactactggagaggcgactacgaggtgaacggcgtggacggctacgactacagcagaggccagctgatcgaggacgtggagcacaccttcgaggagatcaagcccctgtacgagcacctgcacgcctacgtgagagccaagctgatgaacgcctaccccagctacatcagccccatcggctgcctgcccgcccacctgctgggcgacatgtggggcagattctggaccaacctgtacagcctgaccgtgcccttcggccagaagcccaacatcgacgtgaccgacgccatggtggaccaggcctgggacgcccagagaatcttcaaggaggccgagaagttcttcgtgagcgtgggcctgcccaacatgacccagggcttctgggagaacagcatgctgaccgaccccggcaacgtgcagaaggccgtgtgccaccccaccgcctgggacctgggcaagggcgacttcagaatcctgatgtgcaccaaggtgaccatggacgacttcctgaccgcccaccacgagatgggccacatccagtacgacatggcctacgccgcccagcccttcctgctgagaaacggcgccaacgagggcttccacgaggccgtgggcgagatcatgagcctgagcgccgccacccccaagcacctgaagagcatcggcctgctgagccccgacttccaggaggacaacgagaccgagatcaacttcctgctgaagcaggccctgaccatcgtgggcaccctgcccttcacctacatgctggagaagtggagatggatggtgttcaagggcgagatccccaaggaccagtggatgaagaagtggtgggagatgaagagagagatcgtgggcgtggtggagcccgtgccccacgacgagacctactgcgaccccgccagcctgttccacgtgagcaacgactacagcttcatcagatactacaccagaaccctgtaccagttccagttccaggaggccctgtgccaggccgccaagcacgagggccccctgcacaagtgcgacatcagcaacagcaccgaggccggccagaagctgttcaacatgctgagactgggcaagagcgagccctggaccctggccctggagaacgtggtgggcgccaagaacatgaacgtgagacccctgctgaactacttcgagcccctgttcacctggctgaaggaccagaacaagaacagcttcgtgggctggagcaccgactggagcccctacgccgaccagagcatcaaggtgagaatcagcctgaagagcgccctgggcgacaaggcctacgagtggaacgacaacgagatgtacctgttcagaagcagcgtggcctacgccatgagacagtacttcctgaaggtgaagaaccagatgatcctgttcggcgaggaggacgtgagagtggccaacctgaagcccagaatcagcttcaacttcttcgtgaccgcccccaagaacgtgagcgacatcatccccagaaccgaggtggagaaggccatcagaatgagcagaagcagaatcaacgacgccttcagactgaacgacaacagcctggagttcctgggcatccagcccaccctgggcccccccaaccagccccccgtgagcatctggctgatcgtgttcggcgtggtgatgggcgtgatcgtggtgggcatcgtgatcctgatcttcaccggcatcagagacagaaagaagaagaacaaggccagaagcggcgagaacccctacgccagcatcgacatcagcaagggcgagaacaaccccggcttccagaacaccgacgacgtgcagaccagcttctag

SEQ ID NO: 1716 - DNA, 2418 bp, synthetic construct; identical to SEQ ID NO: 1715
  misc_feature 1..2418: note = source = /note="Description of Artificial Sequence: Synthetic coding sequence"
  source 1..2418: mol_type = other DNA

SEQ ID NO: 1717 - DNA, 804 bp, synthetic construct
  misc_feature 1..804: note = source = /note="Description of Artificial Sequence: Synthetic coding sequence"
  source 1..804: mol_type = other DNA
atgaaggccgccgtgctgaccctggccgtgctgttcctgaccggcagccaggccagacacttctggcagcaggacgagcccccccagagcccctgggacagagtgaaggacctggccaccgtgtacgtggacgtgctgaaggacagcggcagagactacgtgagccagttcgagggcagcgccctgggcaagcagctgaacctgaagctgctggacaactgggacagcgtgaccagcaccttcagcaagctgagagagcagctgggccccgtgacccaggagttctgggacaacctggagaaggagaccgagggcctgagacaggagatgagcaaggacctggaggaggtgaaggccaaggtgcagccctacctggacgacttccagaagaagtggcaggaggagatggagctgtacagacagaaggtggagcccctgagagccgagctgcaggagggcgccagacagaagctgcacgagctgcaggagaagctgagccccctgggcgaggagatgagagacagagccagagcccacgtggacgccctgagaacccacctggccccctacagcgacgagctgagacagtgcctggccgccagactggaggccctgaaggagaacggcggcgccagactggccgagtaccacgccaaggccaccgagcacctgagcaccctgagcgagaaggccaagcccgccctggaggacctgagacagggcctgctgcccgtgctggagagcttcaaggtgagcttcctgagcgccctggaggagtacaccaagaagctgaacacccagtag

SEQ ID NO: 1718 - DNA, 804 bp, synthetic construct
  misc_feature 1..804: note = source = /note="Description of Artificial Sequence: Synthetic coding sequence"
  source 1..804: mol_type = other DNA
atgaaggccgccgtgctgaccctggccgtgctgttcctgaccggcagccaggccagacacttctggcagcaggacgagcccccccagagcccctgggacagagtgaaggacctggccaccgtgtacgtggacgtgctgaaggacagcggcagagactacgtgagccagttcgagggcagcgccctgggcaagcagctgaacctgaagctgctggacaactgggacagcgtgaccagcaccttcagcaagctgagagagcagctgggccccgtgacccaggagttctgggacaacctggagaaggagaccgagggcctgagacaggagatgagcaaggacctggaggaggtgaaggccaaggtgcagccctacctggacgacttccagaagaagtggcaggaggagatggagctgtacagacagaaggtggagcccctgagagccgagctgcaggagggcgccagacagaagctgcacgagctgcaggagaagctgagccccctgggcgaggagatgagagactgcgccagagcccacgtggacgccctgagaacccacctggccccctacagcgacgagctgagacagagactggccgccagactggaggccctgaaggagaacggcggcgccagactggccgagtaccacgccaaggccaccgagcacctgagcaccctgagcgagaaggccaagcccgccctggaggacctgagacagggcctgctgcccgtgctggagagcttcaaggtgagcttcctgagcgccctggaggagtacaccaagaagctgaacacccagtag

SEQ ID NO: 1719 - DNA, 804 bp, synthetic construct
  misc_feature 1..804: note = source = /note="Description of Artificial Sequence: Synthetic coding sequence"
  source 1..804: mol_type = other DNA
atgaaggccgccgtgctgaccctggccgtgctgttcctgaccggcagccaggccagacacttctggcagcaggacgagcccccccagagcccctgggacagagtgaaggacctggccaccgtgtacgtggacgtgctgaaggacagcggcagagactacgtgagccagttcgagggcagcgccctgggcaagcagctgaacctgaagctgctggacaactgggacagcgtgaccagcaccttcagcaagctgagagagcagctgggccccgtgacccaggagttctgggacaacctggagaaggagaccgagggcctgagacaggagatgagcaaggacctggaggaggtgaaggccaaggtgcagccctacctggacgacttccagaagaagtggcaggaggagatggagctgtacagacagaaggtggagcccctgagagccgagctgcaggagggcgccagacagaagctgcacgagctgcaggagaagctgagccccctgggcgaggagatgagagacagagccagagcccacgtggacgccctgagaacccacctggccccctacagcgacgagctgagacagagactggccgccagactggaggccctgaaggagaacggcggcgccagactggccgagtaccacgccaaggccaccgagcacctgagcaccctgagcgagaaggccaagcccgccctggaggacctgagacagggcctgctgcccgtgctggagagcttcaaggtgagcttcctgagcgccctggaggagtacaccaagaagctgaacacccagtag

SEQ ID NO: 1720 - DNA, 804 bp, synthetic construct; identical to SEQ ID NO: 1719
  misc_feature 1..804: note = source = /note="Description of Artificial Sequence: Synthetic coding sequence"
  source 1..804: mol_type = other DNA

SEQ ID NO: 1721 - DNA, 804 bp, synthetic construct; identical to SEQ ID NO: 1719
  misc_feature 1..804: note = source = /note="Description of Artificial Sequence: Synthetic coding sequence"
  source 1..804: mol_type = other DNA

SEQ ID NO: 1722 - DNA, 804 bp, synthetic construct; identical to SEQ ID NO: 1719
  misc_feature 1..804: note = source = /note="Description of Artificial Sequence: Synthetic coding sequence"
  source 1..804: mol_type = other DNA

SEQ ID NO: 1723 - DNA, 1653 bp, synthetic construct
  misc_feature 1..1653: note = source = /note="Description of Artificial Sequence: Synthetic coding sequence"
  source 1..1653: mol_type = other DNA
atgaccggcgacaagggcccccagagactgagcggcagcagctacggcagcatcagcagccccaccagccccaccagccccggcccccagcaggccccccccagagagacctacctgagcgagaagatccccatccccgacaccaagcccggcaccttcagcctgagaaagctgtgggccttcaccggccccggcttcctgatgagcatcgccttcctggaccccggcaacatcgagagcgacctgcaggccggcgccgtggccggcttcaagctgctgtgggtgctgctgtgggccaccgtgctgggcctgctgtgccagagactggccgccagactgggcgtggtgaccggcaaggacctgggcgaggtgtgccacctgtactaccccaaggtgcccagaaccgtgctgtggctgaccatcgagctggccatcgtgggcagcgacatgcaggaggtgatcggcaccgccatcgccttcaacctgctgagcgccggcagaatccccctgtggggcggcgtgctgatcaccatcgtggacaccttcttcttcctgttcctggacaactacggcctgagaaagctggaggccttcttcggcctgctgatcaccatcatggccctgaccttcggctacgagtacgtggtggccagacccgagcagggcgccctgctgagaggcctgttcctgcccagctgccccggctgcggccaccccgagctgctgcaggccgtgggcatcgtgggcgccatcatcatgccccacaacatctacctgcacagcgccctggtgaagagcagagagatcgacagagccagaagagccgacatcagagaggccaacatgtacttcctgatcgaggccaccatcgccctgagcgtgagcttcatcatcaacctgttcgtgatggccgtgttcggccaggccttctaccagaagaccaaccaggccgccttcaacatctgcgccaacagcagcctgcacgactacgccaagatcttccccatgaacaacgccaccgtggccgtggacatctaccagggcggcgtgatcctgggctgcctgttcggccccgccgccctgtacatctgggccatcggcctgctggccgccggccagagcagcaccatgaccggcacctacgccggccagttcgtgatggagggcttcctgagactgagatggagcagattcgccagagtgctgctgaccagaagctgcgccatcctgcccaccgtgctggtggccgtgttcagagacctgagagacctgagcggcctgaacgacctgctgaacgtgctgcagagcctgctgctgcccttcgccgtgctgcccatcctgaccttcaccagcatgcccaccctgatgcaggagttcgccaacggcctgctgaacaaggtggtgaccagcagcatcatggtgctggtgtgcgccatcaacctgtacttcgtggtgagctacctgcccagcctgccccaccccgcctacttcggcctggccgccctgctggccgccgcctacctgggcctgagcacctacctggtgtggacctgctgcctggcccacggcgccaccttcctggcccacagcagccaccaccacttcctgtacggcctgctggaggaggaccagaagggcgagaccagcggctag

SEQ ID NO: 1724 - DNA, 13035 bp, synthetic construct
  misc_feature 1..13035: note = source = /note="Description of Artificial Sequence: Synthetic coding sequence"
  source 1..13035: mol_type = other DNA
atggacccccccagacccgccctgctggccctgctggccctgcccgccctgctgctgctgctgctggccggcgccagagccgaggaggagatgctggagaacgtgagcctggtgtgccccaaggacgccaccagattcaagcacctgagaaagtacacctacaactacgaggccgagagcagcagcggcgtgcccggcaccgccgacagcagaagcgccaccagaatcaactgcaaggtggagctggaggtgccccagctgtgcagcttcatcctgaagaccagccagtgcaccctgaaggaggtgtacggcttcaaccccgagggcaaggccctgctgaagaagaccaagaacagcgaggagttcgccgccgccatgagcagatacgagctgaagctggccatccccgagggcaagcaggtgttcctgtaccccgagaaggacgagcccacctacatcctgaacatcaagagaggcatcatcagcgccctgctggtgccccccgagaccgaggaggccaagcaggtgctgttcctggacaccgtgtacggcaactgcagcacccacttcaccgtgaagaccagaaagggcaacgtggccaccgagatcagcaccgagagagacctgggccagtgcgacagattcaagcccatcagaaccggcatcagccccctggccctgatcaagggcatgaccagacccctgagcaccctgatcagcagcagccagagctgccagtacaccctggacgccaagagaaagcacgtggccgaggccatctgcaaggagcagcacctgttcctgcccttcagctacaagaacaagtacggcatggtggcccaggtgacccagaccctgaagctggaggacacccccaagatcaacagcagattcttcggcgagggcaccaagaagatgggcctggccttcgagagcaccaagagcaccagcccccccaagcaggccgaggccgtgctgaagaccctgcaggagctgaagaagctgaccatcagcgagcagaacatccagagagccaacctgttcaacaagctggtgaccgagctgagaggcctgagcgacgaggccgtgaccagcctgctgccccagctgatcgaggtgagcagccccatcaccctgcaggccctggtgcagtgcggccagccccagtgcagcacccacatcctgcagtggctgaagagagtgcacgccaaccccctgctgatcgacgtggtgacctacctggtggccctgatccccgagcccagcgcccagcagctgagagagatcttcaacatggccagagaccagagaagcagagccaccctgtacgccctgagccacgccgtgaacaactaccacaagaccaaccccaccggcacccaggagctgctggacatcgccaactacctgatggagcagatccaggacgactgcaccggcgacgaggactacacctacctgatcctgagagtgatcggcaacatgggccagaccatggagcagctgacccccgagctgaagagcagcatcctgaagtgcgtgcagagcaccaagcccagcctgatgatccagaaggccgccatccaggccctgagaaagatggagcccaaggacaaggaccaggaggtgctgctgcagaccttcctggacgacgccagccccggcgacaagagactggccgcctacctgatgctgatgagaagccccagccaggccgacatcaacaagatcgtgcagatcctgccctgggagcagaacgagcaggtgaagaacttcgtggccagccacatcgccaacatcctgaacagcgaggagctggacatccaggacctgaagaagctggtgaaggaggccctgaaggagagccagctgcccaccgtgatggacttcagaaagttcagcagaaactaccagctgtacaagagcgtgagcctgcccagcctggaccccgccagcgccaagatcgagggcaacctgatcttcgaccccaacaactacctgcccaaggagagcatgctgaagaccaccctgaccgccttcggcttcgccagcgccgacctgatcgagatcggcctggagggcaagggcttcgagcccaccctggaggccctgttcggcaagcagggcttcttccccgacagcgtgaacaaggccctgtactgggtgaacggccaggtgcccgacggcgtgagcaaggtgctggtggaccacttcggctacaccaaggacgacaagcacgagcaggacatggtgaacggcatcatgctgagcgtggagaagctgatcaaggacctgaagagcaaggaggtgcccgaggccagagcctacctgagaatcctgggcgaggagctgggcttcgccagcctgcacgacctgcagctgctgggcaagctgctgctgatgggcgccagaaccctgcagggcatcccccagatgatcggcgaggtgatcagaaagggcagcaagaacgacttcttcctgcactacatcttcatggagaacgccttcgagctgcccaccggcgccggcctgcagctgcagatcagcagcagcggcgtgatcgcccccggcgccaaggccggcgtgaagctggaggtggccaacatgcaggccgagctggtggccaagcccagcgtgagcgtggagttcgtgaccaacatgggcatcatcatccccgacttcgccagaagcggcgtgcagatgaacaccaacttcttccacgagagcggcctggaggcccacgtggccctgaaggccggcaagctgaagttcatcatccccagccccaagagacccgtgaagctgctgagcggcggcaacaccctgcacctggtgagcaccaccaagaccgaggtgatcccccccctgatcgagaacagacagagctggagcgtgtgcaagcaggtgttccccggcctgaactactgcaccagcggcgcctacagcaacgccagcagcaccgacagcgccagctactaccccctgaccggcgacaccagactggagctggagctgagacccaccggcgagatcgagcagtacagcgtgagcgccacctacgagctgcagagagaggacagagccctggtggacaccctgaagttcgtgacccaggccgagggcgccaagcagaccgaggccaccatgaccttcaagtacaacagacagagcatgaccctgagcagcgaggtgcagatccccgacttcgacgtggacctgggcaccatcctgagagtgaacgacgagagcaccgagggcaagaccagctacagactgaccctggacatccagaacaagaagatcaccgaggtggccctgatgggccacctgagctgcgacaccaaggaggagagaaagatcaagggcgtgatcagcatccccagactgcaggccgaggccagaagcgagatcctggcccactggagccccgccaagctgctgctgcagatggacagcagcgccaccgcctacggcagcaccgtgagcaagagagtggcctggcactacgacgaggagaagatcgagttcgagtggaacaccggcaccaacgtggacaccaagaagatgaccagcaacttccccgtggacctgagcgactaccccaagagcctgcacatgtacgccaacagactgctggaccacagagtgccccagaccgacatgaccttcagacacgtgggcagcaagctgatcgtggccatgagcagctggctgcagaaggccagcggcagcctgccctacacccagaccctgcaggaccacctgaacagcctgaaggagttcaacctgcagaacatgggcctgcccgacttccacatccccgagaacctgttcctgaagagcgacggcagagtgaagtacaccctgaacaagaacagcctgaagatcgagatccccctgcccttcggcggcaagagcagcagagacctgaagatgctggagaccgtgagaacccccgccctgcacttcaagagcgtgggcttccacctgcccagcagagagttccaggtgcccaccttcaccatccccaagctgtaccagctgcaggtgcccctgctgggcgtgctggacctgagcaccaacgtgtacagcaacctgtacaactggagcgccagctacagcggcggcaacaccagcaccgaccacttcagcctgagagccagataccacatgaaggccgacagcgtggtggacctgctgagctacaacgtgcagggcagcggcgagaccacctacgaccacaagaacaccttcaccctgagctacgacggcagcctgagacacaagttcctggacagcaacatcaagttcagccacgtggagaagctgggcaacaaccccgtgagcaagggcctgctgatcttcgacgccagcagcagctggggcccccagatgagcgccagcgtgcacctggacagcaagaagaagcagcacctgttcgtgaaggaggtgaagatcgacggccagttcagagtgagcagcttctacgccaagggcacctacggcctgagctgccagagagaccccaacaccggcagactgaacggcgagagcaacctgagattcaacagcagctacctgcagggcaccaaccagatcaccggcagatacgaggacggcaccctgagcctgaccagcaccagcgacctgcagagcggcatcatcaagaacaccgccagcctgaagtacgagaactacgagctgaccctgaagagcgacaccaacggcaagtacaagaacttcgccaccagcaacaagatggacatgaccttcagcaagcagaacgccctgctgagaagcgagtaccaggccgactacgagagcctgagattcttcagcctgctgagcggcagcctgaacagccacggcctggagctgaacgccgacatcctgggcaccgacaagatcaacagcggcgcccacaaggccaccctgagaatcggccaggacggcatcagcaccagcgccaccaccaacctgaagtgcagcctgctggtgctggagaacgagctgaacgccgagctgggcctgagcggcgccagcatgaagctgaccaccaacggcagattcagagagcacaacgccaagttcagcctggacggcaaggccgccctgaccgagctgagcctgggcagcgcctaccaggccatgatcctgggcgtggacagcaagaacatcttcaacttcaaggtgagccaggagggcctgaagctgagcaacgacatgatgggcagctacgccgagatgaagttcgaccacaccaacagcctgaacatcgccggcctgagcctggacttcagcagcaagctggacaacatctacagcagcgacaagttctacaagcagaccgtgaacctgcagctgcagccctacagcctggtgaccaccctgaacagcgacctgaagtacaacgccctggacctgaccaacaacggcaagctgagactggagcccctgaagctgcacgtggccggcaacctgaagggcgcctaccagaacaacgagatcaagcacatctacgccatcagcagcgccgccctgagcgccagctacaaggccgacaccgtggccaaggtgcagggcgtggagttcagccacagactgaacaccgacatcgccggcctggccagcgccatcgacatgagcaccaactacaacagcgacagcctgcacttcagcaacgtgttcagaagcgtgatggcccccttcaccatgaccatcgacgcccacaccaacggcaacggcaagctggccctgtggggcgagcacaccggccagctgtacagcaagttcctgctgaaggccgagcccctggccttcaccttcagccacgactacaagggcagcaccagccaccacctggtgagcagaaagagcatcagcgccgccctggagcacaaggtgagcgccctgctgacccccgccgagcagaccggcacctggaagctgaagacccagttcaacaacaacgagtacagccaggacctggacgcctacaacaccaaggacaagatcggcgtggagctgaccggcagaaccctggccgacctgaccctgctggacagccccatcaaggtgcccctgctgctgagcgagcccatcaacatcatcgacgccctggagatgagagacgccgtggagaagccccaggagttcaccatcgtggccttcgtgaagtacgacaagaaccaggacgtgcacagcatcaacctgcccttcttcgagaccctgcaggagtacttcgagagaaacagacagaccatcatcgtggtgctggagaacgtgcagagaaacctgaagcacatcaacatcgaccagttcgtgagaaagtacagagccgccctgggcaagctgccccagcaggccaacgactacctgaacagcttcaactgggagagacaggtgagccacgccaaggagaagctgaccgccctgaccaagaagtacagaatcaccgagaacgacatccagatcgccctggacgacgccaagatcaacttcaacgagaagctgagccagctgcagacctacatgatccagttcgaccagtacatcaaggacagctacgacctgcacgacctgaagatcgccatcgccaacatcatcgacgagatcatcgagaagctgaagagcctggacgagcactaccacatcagagtgaacctggtgaagaccatccacgacctgcacctgttcatcgagaacatcgacttcaacaagagcggcagcagcaccgccagctggatccagaacgtggacaccaagtaccagatcagaatccagatccaggagaagctgcagcagctgaagagacacatccagaacatcgacatccagcacctggccggcaagctgaagcagcacatcgaggccatcgacgtgagagtgctgctggaccagctgggcaccaccatcagcttcgagagaatcaacgacatcctggagcacgtgaagcacttcgtgatcaacctgatcggcgacttcgaggtggccgagaagatcaacgccttcagagccaaggtgcacgagctgatcgagagatacgaggtggaccagcagatccaggtgctgatggacaagctggtggagctggcccaccagtacaagctgaaggagaccatccagaagctgagcaacgtgctgcagcaggtgaagatcaaggactacttcgagaagctggtgggcttcatcgacgacgccgtgaagaagctgaacgagctgagcttcaagaccttcatcgaggacgtgaacaagttcctggacatgctgatcaagaagctgaagagcttcgactaccaccagttcgtggacgagaccaacgacaagatcagagaggtgacccagagactgaacggcgagatccaggccctggagctgccccagaaggccgaggccctgaagctgttcctggaggagaccaaggccaccgtggccgtgtacctggagagcctgcaggacaccaagatcaccctgatcatcaactggctgcaggaggccctgagcagcgccagcctggcccacatgaaggccaagttcagagagaccctggaggacaccagagacagaatgtaccagatggacatccagcaggagctgcagagatacctgagcctggtgggccaggtgtacagcaccctggtgacctacatcagcgactggtggaccctggccgccaagaacctgaccgacttcgccgagcagtacagcatccaggactgggccaagagaatgaaggccctggtggagcagggcttcaccgtgcccgagatcaagaccatcctgggcaccatgcccgccttcgaggtgagcctgcaggccctgcagaaggccaccttccagacccccgacttcatcgtgcccctgaccgacctgagaatccccagcgtgcagatcaacttcaaggacctgaagaacatcaagatccccagcagattcagcacccccgagttcaccatcctgaacaccttccacatccccagcttcaccatcgacttcgtggagatgaaggtgaagatcatcagaaccatcgaccagatgctgaacagcgagctgcagtggcccgtgcccgacatctacctgagagacctgaaggtggaggacatccccctggccagaatcaccctgcccgacttcagactgcccgagatcgccatccccgagttcatcatccccaccctgaacctgaacgacttccaggtgcccgacctgcacatccccgagttccagctgccccacatcagccacaccatcgaggtgcccaccttcggcaagctgtacagcatcctgaagatccagagccccctgttcaccctggacgccaacgccgacatcggcaacggcaccaccagcgccaacgaggccggcatcgccgccagcatcaccgccaagggcgagagcaagctggaggtgctgaacttcgacttccaggccaacgcccagctgagcaaccccaagatcaaccccctggccctgaaggagagcgtgaagttcagcagcaagtacctgagaaccgagcacggcagcgagatgctgttcttcggcaacgccatcgagggcaagagcaacaccgtggccagcctgcacaccgagaagaacaccctggagctgagcaacggcgtgatcgtgaagatcaacaaccagctgaccctggacagcaacaccaagtacttccacaagctgaacatccccaagctggacttcagcagccaggccgacctgagaaacgagatcaagaccctgctgaaggccggccacatcgcctggaccagcagcggcaagggcagctggaagtgggcctgccccagattcagcgacgagggcacccacgagagccagatcagcttcaccatcgagggccccctgaccagcttcggcctgagcaacaagatcaacagcaagcacctgagagtgaaccagaacctggtgtacgagagcggcagcctgaacttcagcaagctggagatccagagccaggtggacagccagcacgtgggccacagcgtgctgaccgccaagggcatggccctgttcggcgagggcaaggccgagttcaccggcagacacgacgcccacctgaacggcaaggtgatcggcaccctgaagaacagcctgttcttcagcgcccagcccttcgagatcaccgccagcaccaacaacgagggcaacctgaaggtgagattccccctgagactgaccggcaagatcgacttcctgaacaactacgccctgttcctgagccccagcgcccagcaggccagctggcaggtgagcgccagattcaaccagtacaagtacaaccagaacttcagcgccggcaacaacgagaacatcatggaggcccacgtgggcatcaacggcgaggccaacctggacttcctgaacatccccctgaccatccccgagatgagactgccctacaccatcatcaccaccccccccctgaaggacttcagcctgtgggagaagaccggcctgaaggagttcctgaagaccaccaagcagagcttcgacctgagcgtgaaggcccagtacaagaagaacaagcacagacacagcatcaccaaccccctggccgtgctgtgcgagttcatcagccagagcatcaagagcttcgacagacacttcgagaagaacagaaacaacgccctggacttcgtgaccaagagctacaacgagaccaagatcaagttcgacaagtacaaggccgagaagagccacgacgagctgcccagaaccttccagatccccggctacaccgtgcccgtggtgaacgtggaggtgagccccttcaccatcgagatgagcgccttcggctacgtgttccccaaggccgtgagcatgcccagcttcagcatcctgggcagcgacgtgagagtgcccagctacaccctgatcctgcccagcctggagctgcccgtgctgcacgtgcccagaaacctgaagctgagcctgcccgacttcaaggagctgtgcaccatcagccacatcttcatccccgccatgggcaacatcacctacgacttcagcttcaagagcagcgtgatcaccctgaacaccaacgccgagctgttcaaccagagcgacatcgtggcccacctgctgagcagcagcagcagcgtgatcgacgccctgcagtacaagctggagggcaccaccagactgaccagaaagagaggcctgaagctggccaccgccctgagcctgagcaacaagttcgtggagggcagccacaacagcaccgtgagcctgaccaccaagaacatggaggtgagcgtggccaccaccaccaaggcccagatccccatcctgagaatgaacttcaagcaggagctgaacggcaacaccaagagcaagcccaccgtgagcagcagcatggagttcaagtacgacttcaacagcagcatgctgtacagcaccgccaagggcgccgtggaccacaagctgagcctggagagcctgaccagctacttcagcatcgagagcagcaccaagggcgacgtgaagggcagcgtgctgagcagagagtacagcggcaccatcgccagcgaggccaacacctacctgaacagcaagagcaccagaagcagcgtgaagctgcagggcaccagcaagatcgacgacatctggaacctggaggtgaaggagaacttcgccggcgaggccaccctgcagagaatctacagcctgtgggagcacagcaccaagaaccacctgcagctggagggcctgttcttcaccaacggcgagcacaccagcaaggccaccctggagctgagcccctggcagatgagcgccctggtgcaggtgcacgccagccagcccagcagcttccacgacttccccgacctgggccaggaggtggccctgaacgccaacaccaagaaccagaagatcagatggaagaacgaggtgagaatccacagcggcagcttccagagccaggtggagctgagcaacgaccaggagaaggcccacctggacatcgccggcagcctggagggccacctgagattcctgaagaacatcatcctgcccgtgtacgacaagagcctgtgggacttcctgaagctggacgtgaccaccagcatcggcagaagacagcacctgagagtgagcaccgccttcgtgtacaccaagaaccccaacggctacagcttcagcatccccgtgaaggtgctggccgacaagttcatcatccccggcctgaagctgaacgacctgaacagcgtgctggtgatgcccaccttccacgtgcccttcaccgacctgcaggtgcccagctgcaagctggacttcagagagatccagatctacaagaagctgagaaccagcagcttcgccctgaacctgcccaccctgcccgaggtgaagttccccgaggtggacgtgctgaccaagtacagccagcccgaggacagcctgatccccttcttcgagatcaccgtgcccgagagccagctgaccgtgagccagttcaccctgcccaagagcgtgagcgacggcatcgccgccctggacctgaacgccgtggccaacaagatcgccgacttcgagctgcccaccatcatcgtgcccgagcagaccatcgagatccccagcatcaagttcagcgtgcccgccggcatcgtgatccccagcttccaggccctgaccgccagattcgaggtggacagccccgtgtacaacgccacctggagcgccagcctgaagaacaaggccgactacgtggagaccgtgctggacagcacctgcagcagcaccgtgcagttcctggagtacgagctgaacgtgctgggcacccacaagatcgaggacggcaccctggccagcaagaccaagggcaccttcgcccacagagacttcagcgccgagtacgaggaggacggcaagtacgagggcctgcaggagtgggagggcaaggcccacctgaacatcaagagccccgccttcaccgacctgcacctgagataccagaaggacaagaagggcatcagcaccagcgccgccagccccgccgtgggcaccgtgggcatggacatggacgaggacgacgacttcagcaagtggaacttctactacagcccccagagcagccccgacaagaagctgaccatcttcaagaccgagctgagagtgagagagagcgacgaggagacccagatcaaggtgaactgggaggaggaggccgccagcggcctgctgaccagcctgaaggacaacgtgcccaaggccaccggcgtgctgtacgactacgtgaacaagtaccactgggagcacaccggcctgaccctgagagaggtgagcagcaagctgagaagaaacctgcagaacaacgccgagtgggtgtaccagggcgccatcagacagatcgacgacatcgacgtgagattccagaaggccgccagcggcaccaccggcacctaccaggagtggaaggacaaggcccagaacctgtaccaggagctgctgacccaggagggccaggccagcttccagggcctgaaggacaacgtgttcgacggcctggtgagagtgacccaggagttccacatgaaggtgaagcacctgatcgacagcctgatcgacttcctgaacttccccagattccagttccccggcaagcccggcatctacaccagagaggagctgtgcaccatgttcatcagagaggtgggcaccgtgctgagccaggtgtacagcaaggtgcacaacggcagcgagatcctgttcagctacttccaggacctggtgatcaccctgcccttcgagctgagaaagcacaagctgatcgacgtgatcagcatgtacagagagctgctgaaggacctgagcaaggaggcccaggaggtgttcaaggccatccagagcctgaagaccaccgaggtgctgagaaacctgcaggacctgctgcagttcatcttccagctgatcgaggacaacatcaagcagctgaaggagatgaagttcacctacctgatcaactacatccaggacgagatcaacaccatcttcagcgactacatcccctgcttctag

SEQ ID NO: 1725 - DNA, 798 bp, synthetic construct
  misc_feature 1..798: note = source = /note="Description of Artificial Sequence: Synthetic coding sequence"
  source 1..798: mol_type = other DNA
atgaagaaggaggtgtgcagcgtggccttcctgaaggccgtgttcgccgagttcctggccaccctgatcttcgtgttcttcggcctgggcagcgccctgaagtggcccagcgccctgcccaccatcctgcagatcgccctggccttcggcctggccatcggcaccctggcccaggccctgggccccgtgagcggcggccacatcaaccccgccatcaccctggccctgctggtgggcaaccagatcagcctgctgagagccttcttctacgtggccgcccagctggtgggcgccatcgccggcgccggcatcctgtacggcgtggcccccctgaacgccagaggcaacctggccgtgaacgccctgaacaacaacaccacccagggccaggccatggtggtggagctgatcctgaccttccagctggccctgtgcatcttcgccagcaccgacagcagaagaaccagccccgtgggcagccccgccctgagcatcggcctgagcgtgaccctgggccacctggtgggcatctacttcaccggctgcagcatgaaccccgccagaagcttcggccccgccgtggtgatgaacagattcagccccgcccactgggtgttctgggtgggccccatcgtgggcgccgtgctggccgccatcctgtacttctacctgctgttccccaacagcctgagcctgagcgagagagtggccatcatcaagggcacctacgagcccgacgaggactgggaggagcagagagaggagagaaagaagaccatggagctgaccaccagatag

SEQ ID NO: 1726 - DNA, 993 bp, synthetic construct
  misc_feature 1..993: note = source = /note="Description of Artificial Sequence: Synthetic coding sequence"
  source 1..993: mol_type = other DNA
atgagcgccaagagcagaaccatcggcatcatcggcgcccccttcagcaagggccagcccagaggcggcgtggaggagggccccaccgtgctgagaaaggccggcctgctggagaagctgaaggagcaggtgacccagaacttcctgatcctggagtgcgacgtgaaggactacggcgacctgcccttcgccgacatccccaacgacagccccttccagatcgtgaagaaccccagaagcgtgggcaaggccagcgagcagctggccggcaaggtggccgaggtgaagaagaacggcagaatcagcctggtgctgggcggcgaccacagcctggccatcggcagcatcagcggccacgccagagtgcaccccgacctgggcgtgatctgggtggacgcccacaccgacatcaacacccccctgaccaccaccagcggcaacctgcacggccagcccgtgagcttcctgctgaaggagctgaagggcaagatccccgacgtgcccggcttcagctgggtgaccccctgcatcagcgccaaggacatcgtgtacatcggcctgagagacgtggaccccggcgagcactacatcctgaagaccctgggcatcaagtacttcagcatgaccgaggtggacagactgggcatcggcaaggtgatggaggagaccctgagctacctgctgggcagaaagaagagacccatccacctgagcttcgacgtggacggcctggaccccagcttcacccccgccaccggcacccccgtggtgggcggcctgacctacagagagggcctgtacatcaccgaggagatctacaagaccggcctgctgagcggcctggacatcatggaggtgaaccccagcctgggcaagacccccgaggaggtgaccagaaccgtgaacaccgccgtggccatcaccctggcctgcttcggcctggccagagagggcaaccacaagcccatcgactacctgaacccccccaagtag

SEQ ID NO: 1727 - DNA, 969 bp, synthetic construct
  misc_feature 1..969: note = source = /note="Description of Artificial Sequence: Synthetic coding sequence"
  source 1..969: mol_type = other DNA
atgagcgccaagagcagaaccatcggcatcatcggcgcccccttcagcaagggccagcccagaggcggcgtggaggagggccccaccgtgctgagaaaggccggcctgctggagaagctgaaggagcaggagtgcgacgtgaaggactacggcgacctgcccttcgccgacatccccaacgacagccccttccagatcgtgaagaaccccagaagcgtgggcaaggccagcgagcagctggccggcaaggtggccgaggtgaagaagaacggcagaatcagcctggtgctgggcggcgaccacagcctggccatcggcagcatcagcggccacgccagagtgcaccccgacctgggcgtgatctgggtggacgcccacaccgacatcaacacccccctgaccaccaccagcggcaacctgcacggccagcccgtgagcttcctgctgaaggagctgaagggcaagatccccgacgtgcccggcttcagctgggtgaccccctgcatcagcgccaaggacatcgtgtacatcggcctgagagacgtggaccccggcgagcactacatcctgaagaccctgggcatcaagtacttcagcatgaccgaggtggacagactgggcatcggcaaggtgatggaggagaccctgagctacctgctgggcagaaagaagagacccatccacctgagcttcgacgtggacggcctggaccccagcttcacccccgccaccggcacccccgtggtgggcggcctgacctacagagagggcctgtacatcaccgaggagatctacaagaccggcctgctgagcggcctggacatcatggaggtgaaccccagcctgggcaagacccccgaggaggtgaccagaaccgtgaacaccgccgtggccatcaccctggcctgcttcggcctggccagagagggcaaccacaagcccatcgactacctgaacccccccaagtag

SEQ ID NO: 1728 - DNA, 711 bp, synthetic construct
  misc_feature 1..711: note = source = /note="Description of Artificial Sequence: Synthetic coding sequence"
  source 1..711: mol_type = other DNA
atgagcgccaagagcagaaccatcggcatcatcggcgcccccttcagcaagggccagcccagaggcggcgtggaggagggccccaccgtgctgagaaaggccggcctgctggagaagctgaaggagcaggagtgcgacgtgaaggactacggcgacctgcccttcgccgacatccccaacgacagccccttccagatcgtgaagaaccccagaagcgtgggcaaggccagcgagcagctggccggcaaggtggccgaggtgaagaagaacggcagaatcagcctggtgctgggcggcgaccacagcctggccatcggcagcatcagcggccacgccagagtgcaccccgacctgggcgtgatctgggtggacgcccacaccgacatcaacacccccctgaccaccaccagcggcaacctgcacggccagcccgtgagcttcctgctgaaggagctgaagggcaagatccccgacgtgcccggcttcagctgggtgaccccctgcatcagcgccaaggacatcgtgtacatcggcctgagagacgtggaccccggcgagcactacatcctgaagaccctgggcatcaagtacttcagcatgaccgaggtgaccagaaccgtgaacaccgccgtggccatcaccctggcctgcttcggcctggccagagagggcaaccacaagcccatcgactacctgaacccccccaagtag

SEQ ID NO: 1729 - DNA, 1395 bp, synthetic construct
  misc_feature 1..1395: note = source = /note="Description of Artificial Sequence: Synthetic coding sequence"
  source 1..1395: mol_type = other DNA
atggccagcgagagcggcaagctgtggggcggcagattcgtgggcgccgtggaccccatcatggagaagttcaacgccagcatcgcctacgacagacacctgtgggaggtggacgtgcagggcagcaaggcctacagcagaggcctggagaaggccggcctgctgaccaaggccgagatggaccagatcctgcacggcctggacaaggtggccgaggagtgggcccagggcaccttcaagctgaacagcaacgacgaggacatccacaccgccaacgagagaagactgaaggagctgatcggcgccaccgccggcaagctgcacaccggcagaagcagaaacgaccaggtggtgaccgacctgagactgtggatgagacagacctgcagcaccctgagcggcctgctgtgggagctgatcagaaccatggtggacagagccgaggccgagagagacgtgctgttccccggctacacccacctgcagagagcccagcccatcagatggagccactggatcctgagccacgccgtggccctgaccagagacagcgagagactgctggaggtgagaaagagaatcaacgtgctgcccctgggcagcggcgccatcgccggcaaccccctgggcgtggacagagagctgctgagagccgagctgaacttcggcgccatcaccctgaacagcatggacgccaccagcgagagagacttcgtggccgagttcctgttctgggccagcctgtgcatgacccacctgagcagaatggccgaggacctgatcctgtactgcaccaaggagttcagcttcgtgcagctgagcgacgcctacagcaccggcagcagcctgatgccccagaagaagaaccccgacagcctggagctgatcagaagcaaggccggcagagtgttcggcagatgcgccggcctgctgatgaccctgaagggcctgcccagcacctacaacaaggacctgcaggaggacaaggaggccgtgttcgaggtgagcgacaccatgagcgccgtgctgcaggtggccaccggcgtgatcagcaccctgcagatccaccaggagaacatgggccaggccctgagccccgacatgctggccaccgacctggcctactacctggtgagaaagggcatgcccttcagacaggcccacgaggccagcggcaaggccgtgttcatggccgagaccaagggcgtggccctgaaccagctgagcctgcaggagctgcagaccatcagccccctgttcagcggcgacgtgatctgcgtgtgggactacggccacagcgtggagcagtacggcgccctgggcggcaccgccagaagcagcgtggactggcagatcagacaggtgagagccctgctgcaggcccagcaggcctag

SEQ ID NO: 1730 - DNA, 1317 bp, synthetic construct
  misc_feature 1..1317: note = source = /note="Description of Artificial Sequence: Synthetic coding sequence"
  source 1..1317: mol_type = other DNA
atggccagcgagagcggcaagctgtggggcggcagattcgtgggcgccgtggaccccatcatggagaagttcaacgccagcatcgcctacgacagacacctgtgggaggtggacgtgcagggcagcaaggcctacagcagaggcctggagaaggccggcctgctgaccaaggccgagatggaccagatcctgcacggcctggacaaggtggccgaggagtgggcccagggcaccttcaagctgaacagcaacgacgaggacatccacaccgccaacgagagaagactgaaggagctgatcggcgccaccgccggcaagctgcacaccggcagaagcagaaacgaccaggtggtgaccgacctgagactgtggatgagacagacctgcagcaccctgagcggcctgctgtgggagctgatcagaaccatggtggacagagccgaggccgagagagacgtgctgttccccggctacacccacctgcagagagcccagcccatcagatggagccactggatcctgagcggcgccatcgccggcaaccccctgggcgtggacagagagctgctgagagccgagctgaacttcggcgccatcaccctgaacagcatggacgccaccagcgagagagacttcgtggccgagttcctgttctgggccagcctgtgcatgacccacctgagcagaatggccgaggacctgatcctgtactgcaccaaggagttcagcttcgtgcagctgagcgacgcctacagcaccggcagcagcctgatgccccagaagaagaaccccgacagcctggagctgatcagaagcaaggccggcagagtgttcggcagatgcgccggcctgctgatgaccctgaagggcctgcccagcacctacaacaaggacctgcaggaggacaaggaggccgtgttcgaggtgagcgacaccatgagcgccgtgctgcaggtggccaccggcgtgatcagcaccctgcagatccaccaggagaacatgggccaggccctgagccccgacatgctggccaccgacctggcctactacctggtgagaaagggcatgcccttcagacaggcccacgaggccagcggcaaggccgtgttcatggccgagaccaagggcgtggccctgaaccagctgagcctgcaggagctgcagaccatcagccccctgttcagcggcgacgtgatctgcgtgtgggactacggccacagcgtggagcagtacggcgccctgggcggcaccgccagaagcagcgtggactggcagatcagacaggtgagagccctgctgcaggcccagcaggcctag

SEQ ID NO: 1731 - DNA, 1335 bp, synthetic construct
  misc_feature 1..1335: note = source = /note="Description of Artificial Sequence: Synthetic coding sequence"
  source 1..1335: mol_type = other DNA
atggccagcgagagcggcaagctgtggggcggcagattcgtgggcgccgtggaccccatcatggagaagttcaacgccagcatcgcctacgacagacacctgtgggaggtggacgtgcagggcagcaaggcctacagcagaggcctggagaaggccggcctgctgaccaaggccgagatggaccagatcctgcacggcctggacaaggtggccgaggagtgggcccagggcaccttcaagctgaacagcaacgacgaggacatccacaccgccaacgagagaagactgaaggagctgatcggcgccaccgccggcaagctgcacaccggcagaagcagaaacgaccaggtggtgaccgacctgagactgtggatgagacagacctgcagcaccctgagcggcctgctgtgggagctgatcagaaccatggtggacagagccgaggccgagagagacgtgctgttccccggctacacccacctgcagagagcccagcccatcagatggagccactggatcctgagccacgccgtggccctgaccagagacagcgagagactgctggaggtgagaaagagaatcaacgtgctgcccctgggcagcggcgccatcgccggcaaccccctgggcgtggacagagagctgctgagagccgagctgaacttcggcgccatcaccctgaacagcatggacgccaccagcgagagagacttcgtggccgagttcctgttctgggccagcctgtgcatgacccacctgagcagaatggccgaggacctgatcctgtactgcaccaaggagttcagcttcgtgcagctgagcgacgcctacagcaccggcagcagcctgatgccccagaagaagaaccccgacagcctggagctgatcagaagcaaggccggcagagtgttcggcagagaggacaaggaggccgtgttcgaggtgagcgacaccatgagcgccgtgctgcaggtggccaccggcgtgatcagcaccctgcagatccaccaggagaacatgggccaggccctgagccccgacatgctggccaccgacctggcctactacctggtgagaaagggcatgcccttcagacaggcccacgaggccagcggcaaggccgtgttcatggccgagaccaagggcgtggccctgaaccagctgagcctgcaggagctgcagaccatcagccccctgttcagcggcgacgtgatctgcgtgtgggactacggccacagcgtggagcagtacggcgccctgggcggcaccgccagaagcagcgtggactggcagatcagacaggtgagagccctgctgcaggcccagcaggcctag

SEQ ID NO: 1732 - DNA, 1395 bp, synthetic construct; identical to SEQ ID NO: 1729
  misc_feature 1..1395: note = source = /note="Description of Artificial Sequence: Synthetic coding sequence"
  source 1..1395: mol_type = other DNA

SEQ ID NO: 1733 - DNA, 297 bp, synthetic construct
  misc_feature 1..297: note = source = /note="Description of Artificial Sequence: Synthetic coding sequence"
  source 1..297: mol_type = other DNA
atggagaagttcaacgccagcatcgcctacgacagacacctgtgggaggtggacgtgcagggcagcaaggcctacagcagaggcctggagaaggccggcctgctgaccaaggccgagatggaccagatcctgcacggcctggacaaggtggccgaggagtgggcccagggcaccttcaagctgaacagcaacgacgaggacatccacaccgccaacgagagaagactgaaggagctgatcggcgccaccgccggcaagctgcacaccggcagaagcagaaacgaccaggtgctgtag

SEQ ID NO: 1734 - DNA, 1239 bp, synthetic construct
  misc_feature 1..1239: note = source = /note="Description of Artificial Sequence: Synthetic coding sequence"
  source 1..1239: mol_type = other DNA
atgagcagcaagggcagcgtggtgctggcctacagcggcggcctggacaccagctgcatcctggtgtggctgaaggagcagggctacgacgtgatcgcctacctggccaacatcggccagaaggaggacttcgaggaggccagaaagaaggccctgaagctgggcgccaagaaggtgttcatcgaggacgtgagcagagagttcgtggaggagttcatctggcccgccatccagagcagcgccctgtacgaggacagatacctgctgggcaccagcctggccagaccctgcatcgccagaaagcaggtggagatcgcccagagagagggcgccaagtacgtgagccacggcgccaccggcaagggcaacgaccaggtgagattcgagctgagctgctacagcctggccccccagatcaaggtgatcgccccctggagaatgcccgagttctacaacagattcaagggcagaaacgacctgatggagtacgccaagcagcacggcatccccatccccgtgacccccaagaacccctggagcatggacgagaacctgatgcacatcagctacgaggccggcatcctggagaaccccaagaaccaggccccccccggcctgtacaccaagacccaggaccccgccaaggcccccaacacccccgacatcctggagatcgagttcaagaagggcgtgcccgtgaaggtgaccaacgtgaaggacggcaccacccaccagaccagcctggagctgttcatgtacctgaacgaggtggccggcaagcacggcgtgggcagaatcgacatcgtggagaacagattcatcggcatgaagagcagaggcatctacgagacccccgccggcaccatcctgtaccacgcccacctggacatcgaggccttcaccatggacagagaggtgagaaagatcaagcagggcctgggcctgaagttcgccgagctggtgtacaccggcttctggcacagccccgagtgcgagttcgtgagacactgcatcgccaagagccaggagagagtggagggcaaggtgcaggtgagcgtgctgaagggccaggtgtacatcctgggcagagagagccccctgagcctgtacaacgaggagctggtgagcatgaacgtgcagggcgactacgagcccaccgacgccaccggcttcatcaacatcaacagcctgagactgaaggagtaccacagactgcagagcaaggtgaccgccaagtag

SEQ ID NO: 1735 - DNA, 1239 bp, synthetic construct; identical to SEQ ID NO: 1734
  misc_feature 1..1239: note = source = /note="Description of Artificial Sequence: Synthetic coding sequence"
  source 1..1239: mol_type = other DNA

SEQ ID NO: 1736 - DNA, 510 bp, synthetic construct
  misc_feature 1..510: note = source = /note="Description of Artificial Sequence: Synthetic coding sequence"
  source 1..510: mol_type = other DNA
gagcccggccccctgcagctgatggtggtggccgaggcccagggcggcaagcacggcgtgggcagaatcgacatcgtggagaacagattcatcggcatgaagagcagaggcatctacgagacccccgccggcaccatcctgtaccacgcccacctggacatcgaggccttcaccatggacagagaggtgagaaagatcaagcagggcctgggcctgaagttcgccgagctggtgtacaccggcttctggcacagccccgagtgcgagttcgtgagacactgcatcgccaagagccaggagagagtggagggcaaggtgcaggtgagcgtgctgaagggccaggtgtacatcctgggcagagagagccccctgagcctgtacaacgaggagctggtgagcatgaacgtgcagggcgactacgagcccaccgacgccaccggcttcatcaacatcaacagcctgagactgaaggagtaccacagactgcagagcaaggtgaccgccaagtag

SEQ ID NO: 1737 - DNA, 1239 bp, synthetic construct; identical to SEQ ID NO: 1734
  misc_feature 1..1239: note = source = /note="Description of Artificial Sequence: Synthetic coding sequence"
  source 1..1239: mol_type = other DNA

SEQ ID NO: 1738 - DNA, 1239 bp, synthetic construct; identical to SEQ ID NO: 1734
  misc_feature 1..1239: note = source = /note="Description of Artificial Sequence: Synthetic coding sequence"
  source 1..1239: mol_type = other DNA

SEQ ID NO: 1739 - DNA, 597 bp, synthetic construct
  misc_feature 1..597: note = source = /note="Description of Artificial Sequence: Synthetic coding sequence"
  source 1..597: mol_type = other DNA
atgagcagcaagggcagcgtggtgctggcctacagcggcggcctggacaccagctgcatcctggtgtggctgaaggagcagggctacgacgtgatcgcctacctggccaacatcggccagaaggaggacttcgaggaggccagaaagaaggccctgaagctgggcgccaagaaggtgttcatcgaggacgtgagcagagagttcgtggaggagttcatctggcccgccatccagagcagcgccctgtacgaggacagatacctgctgggcaccagcctggccagaccctgcatcgccagaaagcaggtggagatcgcccagagagagggcgccaagtacgtgagccacggcgccaccggcaagggcaacgaccaggtgagattcgagctgagctgctacagcctggccccccagatcaaggtgatcgccccctggagaatgcccgagttctacaacagattcaagggcagaaacgacctgatggagtacgccaagcagcacggcatccccatccccgtgacccccaagaacccctggagcatggacgagaacctgatgcacatcagctacgaggccggcatcctggagaacccctag

SEQ ID NO: 1740 - DNA, 540 bp, synthetic construct
  misc_feature 1..540: note = source = /note="Description of Artificial Sequence: Synthetic coding sequence"
  source 1..540: mol_type = other DNA
atgagcagcaagggcagcgtggtgctggcctacagcggcggcctggacaccagctgcatcctggtgtggctgaaggagcagggctacgacgtgatcgcctacctggccaacatcggccagaaggaggacttcgaggaggccagaaagaaggccctgaagctgggcgccaagaaggtgttcatcgaggacgtgagcagagagttcgtggaggagttcatctggcccgccatccagagcagcgccctgtacgaggacagatacctgctgggcaccagcctggccagaccctgcatcgccagaaagcaggtggagatcgcccagagagagggcgccaagtacgtgagccacggcgccaccggcaaggtgatcgccccctggagaatgcccgagttctacaacagattcaagggcagaaacgacctgatggagtacgccaagcagcacggcatccccatccccgtgacccccaagaacccctggagcatggacgagaacctgatgcacatcagctacgaggccggcatcctggagaacccctag

SEQ ID NO: 1741 - DNA, 663 bp, synthetic construct
  misc_feature 1..663: note = source = /note="Description of Artificial Sequence: Synthetic coding sequence"
  source 1..663: mol_type = other DNA
atggagctgggcctgggcggcctgagcaccctgagccactgcccctggcccagacagcagcccgccctgtggcccaccctggccgccctggccctgctgagcagcgtggccgaggccagcctgggcagcgcccccagaagccccgcccccagagagggccccccccccgtgctggccagccccgccggccacctgcccggcggcagaaccgccagatggtgcagcggcagagccagaagaccccccccccagcccagcagacccgccccccccccccccgccccccccagcgccctgcccagaggcggcagagccgccagagccggcggccccggcagcagagccagagccgccggcgccagaggctgcagactgagaagccagctggtgcccgtgagagccctgggcctgggccacagaagcgacgagctggtgagattcagattctgcagcggcagctgcagaagagccagaagcccccacgacctgagcctggccagcctgctgggcgccggcgccctgagacccccccccggcagcagacccgtgagccagccctgctgcagacccaccagatacgaggccgtgagcttcatggacgtgaacagcacctggagaaccgtggacagactgagcgccaccgcctgcggctgcctgggctag

SEQ ID NO: 1742 - DNA, 663 bp, synthetic construct; identical to SEQ ID NO: 1741
  misc_feature 1..663: note = source = /note="Description of Artificial Sequence: Synthetic coding sequence"
  source 1..663: mol_type = other DNA

SEQ ID NO: 1743 - DNA, 687 bp, synthetic construct
  misc_feature 1..687: note = source = /note="Description of Artificial Sequence: Synthetic coding sequence"
  source 1..687: mol_type = other DNA
atggagctgggcctgggcggcctgagcaccctgagccactgcccctggcccagacagcaggcccccctgggcctgagcgcccagcccgccctgtggcccaccctggccgccctggccctgctgagcagcgtggccgaggccagcctgggcagcgcccccagaagccccgcccccagagagggccccccccccgtgctggccagccccgccggccacctgcccggcggcagaaccgccagatggtgcagcggcagagccagaagaccccccccccagcccagcagacccgccccccccccccccgccccccccagcgccctgcccagaggcggcagagccgccagagccggcggccccggcagcagagccagagccgccggcgccagaggctgcagactgagaagccagctggtgcccgtgagagccctgggcctgggccacagaagcgacgagctggtgagattcagattctgcagcggcagctgcagaagagccagaagcccccacgacctgagcctggccagcctgctgggcgccggcgccctgagacccccccccggcagcagacccgtgagccagccctgctgcagacccaccagatacgaggccgtgagcttcatggacgtgaacagcacctggagaaccgtggacagactgagcgccaccgcctgcggctgcctgggctag

SEQ ID NO: 1744 - DNA, 201 bp, synthetic construct
  misc_feature 1..201: note = source = /note="Description of Artificial Sequence: Synthetic coding sequence"
  source 1..201: mol_type = other DNA
atggagctgggcctgggcggcctgagcaccctgagccactgcccctggcccagacagcagcccgccctgtggcccaccctggccgccctggccctgctgagcagcgtggccgaggccagcctgggcagcgcccccagaagccccgcccccagagagggccccccccccgtgctggccagccccgccggccacctgccctag

SEQ ID NO: 1745 - DNA, 270 bp, synthetic construct
  misc_feature 1..270: note = source = /note="Description of Artificial Sequence: Synthetic coding sequence"
  source 1..270: mol_type = other DNA
atggagctgggcctgggcggcctgagcaccctgagccactgcccctggcccagacagcaggcccccctgggcctgagcgcccagcccgccctgtggcccaccctggccgccctggccctgctgagcagcgtggccgaggccagcctgggcagcgcccccagaagccccgcccccagagagggccccccccccgtgctggccagccccgccggccacctgcccggcggcagaaccgccagatggtgcagcggcagagccagaagaccctag

SEQ ID NO: 1746 - DNA, 201 bp, synthetic construct; identical to SEQ ID NO: 1744
  misc_feature 1..201: note = source = /note="Description of Artificial Sequence: Synthetic coding sequence"
  source 1..201: mol_type = other DNA

SEQ ID NO: 1747 - DNA, 270 bp, synthetic construct; identical to SEQ ID NO: 1745
  misc_feature 1..270: note = source = /note="Description of Artificial Sequence: Synthetic coding sequence"
  source 1..270: mol_type = other DNA

SEQ ID NO: 1748 - DNA, 687 bp, synthetic construct; identical to SEQ ID NO: 1743
  misc_feature 1..687: note = source = /note="Description of Artificial Sequence: Synthetic coding sequence"
  source 1..687: mol_type = other DNA

SEQ ID NO: 1749 - DNA, 1602 bp, synthetic construct
  misc_feature 1..1602: note = source = /note="Description of Artificial Sequence: Synthetic coding sequence"
  source 1..1602: mol_type = other DNA
atgggccccagaggcgccgccagcctgcccagaggccccggccccagaagactgctgctgcccgtggtgctgcccctgctgctgctgctgctgctggccccccccggcagcggcgccggcgccagcagacccccccacctggtgttcctgctggccgacgacctgggctggaacgacgtgggcttccacggcagcagaatcagaaccccccacctggacgccctggccgccggcggcgtgctgctggacaactactacacccagcccctgtgcacccccagcagaagccagctgctgaccggcagataccagatcagaaccggcctgcagcaccagatcatctggccctgccagcccagctgcgtgcccctggacgagaagctgctgccccagctgctgaaggaggccggctacaccacccacatggtgggcaagtggcacctgggcatgtacagaaaggagtgcctgcccaccagaagaggcttcgacacctacttcggctacctgctgggcagcgaggactactacagccacgagagatgcaccctgatcgacgccctgaacgtgaccagatgcgccctggacttcagagacggcgaggaggtggccaccggctacaagaacatgtacagcaccaacatcttcaccaagagagccatcgccctgatcaccaaccacccccccgagaagcccctgttcctgtacctggccctgcagagcgtgcacgagcccctgcaggtgcccgaggagtacctgaagccctacgacttcatccaggacaagaacagacaccactacgccggcatggtgagcctgatggacgaggccgtgggcaacgtgaccgccgccctgaagagcagcggcctgtggaacaacaccgtgttcatcttcagcaccgacaacggcggccagaccctggccggcggcaacaactggcccctgagaggcagaaagtggagcctgtgggagggcggcgtgagaggcgtgggcttcgtggccagccccctgctgaagcagaagggcgtgaagaacagagagctgatccacatcagcgactggctgcccaccctggtgaagctggccagaggccacaccaacggcaccaagcccctggacggcttcgacgtgtggaagaccatcagcgagggcagccccagccccagaatcgagctgctgcacaacatcgaccccaacttcgtggacagcagcccctgccccagaaacagcatggcccccgccaaggacgacagcagcctgcccgagtacagcgccttcaacaccagcgtgcacgccgccatcagacacggcaactggaagctgctgaccggctaccccggctgcggctactggttccccccccccagccagtacaacgtgagcgagatccccagcagcgacccccccaccaagaccctgtggctgttcgacatcgacagagaccccgaggagagacacgacctgagcagagagtacccccacatcgtgaccaagctgctgagcagactgcagttctaccacaagcacagcgtgcccgtgtacttccccgcccaggaccccagatgcgaccccaaggccaccggcgtgtggggcccctggatgtag

SEQ ID NO: 1750 - DNA, 1602 bp, synthetic construct; identical to SEQ ID NO: 1749
  misc_feature 1..1602: note = source = /note="Description of Artificial Sequence: Synthetic coding sequence"
  source 1..1602: mol_type = other DNA

SEQ ID NO: 1751 - DNA, 1242 bp, synthetic construct
  misc_feature 1..1242: note = source = /note="Description of Artificial Sequence: Synthetic coding sequence"
  source 1..1242: mol_type = other DNA
atgggccccagaggcgccgccagcctgcccagaggccccggccccagaagactgctgctgcccgtggtgctgcccctgctgctgctgctgctgctggccccccccggcagcggcgccggcgccagcagacccccccacctggtgttcctgctggccgacgacctgggctggaacgacgtgggcttccacggcagcagaatcagaaccccccacctggacgccctggccgccggcggcgtgctgctggacaactactacacccagcccctgtgcacccccagcagaagccagctgctgaccggcagataccagatcagaaccggcctgcagcaccagatcatctggccctgccagcccagctgcgtgcccctggacgagaagctgctgccccagctgctgaaggaggccggctacaccacccacatggtgggcaagtggcacctgggcatgtacagaaaggagtgcctgcccaccagaagaggcttcgacacctacttcggctacctgctgggcagcgaggactactacagccacgagagatgcaccctgatcgacgccctgaacgtgaccagatgcgccctggacttcagagacggcgaggaggtggccaccggctacaagaacatgtacagcaccaacatcttcaccaagagagccatcgccctgatcaccaaccacccccccgagaagcccctgttcctgtacctggccctgcagagcgtgcacgagcccctgcaggtgcccgaggagtacctgaagccctacgacttcatccaggacaagaacagacaccactacgccggcatggtgagcctgatggacgaggccgtgggcaacgtgaccgccgccctgaagagcagcggcctgtggaacaacaccgtgttcatcttcagcaccgacaacggcggccagaccctggccggcggcaacaactggcccctgagaggcagaaagtggagcctgtgggagggcggcgtgagaggcgtgggcttcgtggccagccccctgctgaagcagaagggcgtgaagaacagagagctgatccacatcagcgactggctgcccaccctggtgaagctggccagaggccacaccaacggcaccaagcccctggacggcttcgacgtgtggaagaccatcagcgagggcagccccagccccagaatcgagctgctgcacaacatcgaccccaacttcgtggacagcagcccctactggcccgagtgcagcctgctgctgtag

SEQ ID NO: 1752 - DNA, 138 bp, synthetic construct
  misc_feature 1..138: note = source = /note="Description of Artificial Sequence: Synthetic coding sequence"
  source 1..138: mol_type = other DNA
atgggccccagaggcgccgccagcctgcccagaggccccggccccagaagactgctgctgcccgtggtgctgcccctgctgctgctgctgctgctggccccccccggcagcggcgccggcgccagcagacccccctag

SEQ ID NO: 1753 - DNA, 1788 bp, synthetic construct
  misc_feature 1..1788: note = source = /note="Description of Artificial Sequence: Synthetic coding sequence"
  source 1..1788: mol_type = other DNA
atggccggccccagcccccccctgagagccggcgtgggcagaagactgctgggcgtggcccaccccgacctgagaccctgcctgtgcggcgagctgcaggtggagggcggccccggccccgtgcccggcatgctgagaacctgctacgtgagaagcccctggagaagaggccccagcagcgccagaggcgagcagagcggcagcggccacctggagcaggaggaggtgcagagcggcagcctgctgttcagactgctgctgttcctgagcagaagccccgccagcagaaaccagagaatcctgtacaccgtgctggagtgccagcccctgttcgacagcagcgacatgaccatcgccgagtgggtgtgcctggcccagaccatcaagagacactacgagcagtaccacggcttcgtggtgatccacggcaccgacaccatggccttcgccgccagcatgctgagcttcatgctggagaacctgcagaagaccgtgatcctgaccggcgcccaggtgcccatccacgccctgtggagcgacggcagagagaacctgctgggcgccctgctgatggccggccagtacgtgatccccgaggtgtgcctgttcttccagaaccagctgttcagaggcaacagagccaccaaggtggacgccagaagattcgccgccttctgcagccccaacctgctgcccctggccaccgtgggcgccgacatcaccatcaacagagagctggtgagaaaggtggacggcaaggccggcctggtggtgcacagcagcatggagcaggacgtgggcctgctgagactgtaccccggcatccccgccgccctggtgagagccttcctgcagccccccctgaagggcgtggtgatggagaccttcggcagcggcaacggccccaccaagcccgacctgctgcaggagctgagagtggccaccgagagaggcctggtgatcgtgaactgcacccactgcctgcagggcgccgtgaccaccgactacgccgccggcatggccatggccggcgccggcgtgatcagcggcttcgacatgaccagcgaggccgccctggccaagctgagctacgtgctgggccagcccggcctgagcctggacgtgagaaaggagctgctgaccaaggacctgagaggcgagatgaccccccccagcgtggaggagagaagacccagcctgcagggcaacaccctgggcggcggcgtgagctggctgctgagcctgagcggcagccaggaggccgacgccctgagaaacgccctggtgcccagcctggcctgcgccgccgcccacgccggcgacgtggaggccctgcaggccctggtggagctgggcagcgacctgggcctggtggacttcaacggccagacccccctgcacgccgccgccagaggcggccacaccgaggccgtgaccatgctgctgcagagaggcgtggacgtgaacaccagagacaccgacggcttcagccccctgctgctggccgtgagaggcagacaccccggcgtgatcggcctgctgagagaggccggcgccagcctgagcacccaggagctggaggaggccggcaccgagctgtgcagactggcctacagagccgacctggagggcctgcaggtgtggtggcaggccggcgccgacctgggccagcccggctacgacggccacagcgccctgcacgtggccgaggccgccggcaacctggccgtggtggccttcctgcagagcctggagggcgccgtgggcgcccaggccccctgcccctag

SEQ ID NO: 1754 - DNA, 1740 bp, synthetic construct
  misc_feature 1..1740: note = source = /note="Description of Artificial Sequence: Synthetic coding sequence"
  source 1..1740: mol_type = other DNA
atggccagagccgtgggccccgagagaagactgctggccgtgtacaccggcggcaccatcggcatgagaagcgagctgggcgtgctggtgcccggcaccggcctggccgccatcctgagaaccctgcccatgttccacgacgaggagcacgccagagccagaggcctgagcgaggacaccctggtgctgccccccgccagcagaaaccagagaatcctgtacaccgtgctggagtgccagcccctgttcgacagcagcgacatgaccatcgccgagtgggtgtgcctggcccagaccatcaagagacactacgagcagtaccacggcttcgtggtgatccacggcaccgacaccatggccttcgccgccagcatgctgagcttcatgctggagaacctgcagaagaccgtgatcctgaccggcgcccaggtgcccatccacgccctgtggagcgacggcagagagaacctgctgggcgccctgctgatggccggccagtacgtgatccccgaggtgtgcctgttcttccagaaccagctgttcagaggcaacagagccaccaaggtggacgccagaagattcgccgccttctgcagccccaacctgctgcccctggccaccgtgggcgccgacatcaccatcaacagagagctggtgagaaaggtggacggcaaggccggcctggtggtgcacagcagcatggagcaggacgtgggcctgctgagactgtaccccggcatccccgccgccctggtgagagccttcctgcagccccccctgaagggcgtggtgatggagaccttcggcagcggcaacggccccaccaagcccgacctgctgcaggagctgagagtggccaccgagagaggcctggtgatcgtgaactgcacccactgcctgcagggcgccgtgaccaccgactacgccgccggcatggccatggccggcgccggcgtgatcagcggcttcgacatgaccagcgaggccgccctggccaagctgagctacgtgctgggccagcccggcctgagcctggacgtgagaaaggagctgctgaccaaggacctgagaggcgagatgaccccccccagcgtggaggagagaagacccagcctgcagggcaacaccctgggcggcggcgtgagctggctgctgagcctgagcggcagccaggaggccgacgccctgagaaacgccctggtgcccagcctggcctgcgccgccgcccacgccggcgacgtggaggccctgcaggccctggtggagctgggcagcgacctgggcctggtggacttcaacggccagacccccctgcacgccgccgccagaggcggccacaccgaggccgtgaccatgctgctgcagagaggcgtggacgtgaacaccagagacaccgacggcttcagccccctgctgctggccgtgagaggcagacaccccggcgtgatcggcctgctgagagaggccggcgccagcctgagcacccaggagctggaggaggccggcaccgagctgtgcagactggcctacagagccgacctggagggcctgcaggtgtggtggcaggccggcgccgacctgggccagcccggctacgacggccacagcgccctgcacgtggccgaggccgccggcaacctggccgtggtggccttcctgcagagcctggagggcgccgtgggcgcccaggccccctgccccgagcccagctgcttccaggaggtgctgcccggcgtgtag

SEQ ID NO: 1755 - DNA, 423 bp, synthetic construct
  misc_feature 1..423: note = source = /note="Description of Artificial Sequence: Synthetic coding sequence"
  source 1..423: mol_type = other DNA
gccgccgccagaggcggccacaccgaggccgtgaccatgctgctgcagagaggcgtggacgtgaacaccagagacaccgacggcttcagccccctgctgctggccgtgagaggcagacaccccggcgtgatcggcctgctgagagaggccggcgccagcctgagcacccaggagctggaggaggccggcaccgagctgtgcagactggcctacagagccgacctggagggcctgcaggtgtggtggcaggccggcgccgacctgggccagcccggctacgacggccacagcgccctgcacgtggccgaggccgccggcaacctggccgtggtggccttcctgcagagcctggagggcgccgtgggcgcccaggccccctgccccgagcccagctgcttccaggaggtgctgcccggcgtgtag

SEQ ID NO: 1756 - DNA, 1722 bp, synthetic construct
  misc_feature 1..1722: note = source = /note="Description of Artificial Sequence: Synthetic coding sequence"
  source 1..1722: mol_type = other DNA
atggccagagccgtgggccccgagagaagactgctggccgtgtacaccggcggcaccatcggcatgagaagcgagctgggcgtgctggtgcccggcaccggcctggccgccatcctgagaaccctgcccatgttccacgacgaggagcacgccagagccagaggcctgagcgaggacaccctggtgctgccccccgccagcagaaaccagagaatcctgtacaccgtgctggagtgccagcccctgttcgacagcagcgacatgaccatcgccgagtgggtgtgcctggcccagaccatcaagagacactacgagcagtaccacggcttcgtggtgatccacggcaccgacaccatggccttcgccgccagcatgctgagcttcatgctggagaacctgcagaagaccgtgatcctgaccggcgcccaggtgcccatccacgccctgtggagcgacggcagagagaacctgctgggcgccctgctgatggccggccagtacgtgatccccgaggtgtgcctgttcttccagaaccagctgttcagaggcaacagagccaccaaggtggacgccagaagattcgccgccttctgcagccccaacctgctgcccctggccaccgtgggcgccgacatcaccatcaacagagagctggtgagaaaggtggacggcaaggccggcctggtggtgcacagcagcatggagcaggacgtgggcctgctgagactgtaccccggcatccccgccgccctggtgagagccttcctgcagccccccctgaagggcgtggtgatggagaccttcggcagcggcaacggccccaccaagcccgacctgctgcaggagctgagagtggccaccgagagaggcctggtgatcgtgaactgcacccactgcctgcagggcgccgtgaccaccgactacgccgccggcatggccatggccggcgccggcgtgatcagcggcttcgacatgaccagcgaggccgccctggccaagctgagctacgtgctgggccagcccggcctgagcctggacgtgagaaaggagctgctgaccaaggacctgagaggcgagatgaccccccccagcgtggaggagagaagacccagcctgcagggcaacaccctgggcggcggcgtgagctggctgctgagcctgagcggcagccaggaggccgacgccctgagaaacgccctggtgcccagcctggcctgcgccgccgcccacgccggcgacgtggaggccctgcaggccctggtggagctgggcagcgacctgggcctggtggacttcaacggccagacccccctgcacgccgccgccagaggcggccacaccgaggccgtgaccatgctgctgcagagaggcgtggacgtgaacaccagagacaccgacggcttcagccccctgctgctggccgtgagaggcagacaccccggcgtgatcggcctgctgagagaggccggcgccagcctgagcacccaggagctggaggaggccggcaccgagctgtgcagactggcctacagagccgacctggagggcctgcaggtgtggtggcaggccggcgccgacctgggccagcccggctacgacggccacagcgccctgcacgtggccgaggccgccggcaacctggccgtggtggccttcctgcagagcctggagggcgccgtgggcgcccaggccccctgccccgaggtgctgcccggcgtgtag

SEQ ID NO: 1757 - DNA, 942 bp, synthetic construct
  misc_feature 1..942: note = source = /note="Description of Artificial Sequence: Synthetic coding sequence"
  source 1..942: mol_type = other DNA
atgaccagctgccacatcgccgaggagcacatccagaaggtggccatcttcggcggcacccacggcaacgagctgaccggcgtgttcctggtgaagcactggctggagaacggcgccgagatccagagaaccggcctggaggtgaagcccttcatcaccaaccccagagccgtgaagaagtgcaccagatacatcgactgcgacctgaacagaatcttcgacctggagaacctgggcaagaagatgagcgaggacctgccctacgaggtgagaagagcccaggagatcaaccacctgttcggccccaaggacagcgaggacagctacgacatcatcttcgacctgcacaacaccaccagcaacatgggctgcaccctgatcctggaggacagcagaaacaacttcctgatccagatgttccactacatcaagaccagcctggcccccctgccctgctacgtgtacctgatcgagcaccccagcctgaagtacgccaccaccagaagcatcgccaagtaccccgtgggcatcgaggtgggcccccagccccagggcgtgctgagagccgacatcctggaccagatgagaaagatgatcaagcacgccctggacttcatccaccacttcaacgagggcaaggagttccccccctgcgccatcgaggtgtacaagatcatcgagaaggtggactaccccagagacgagaacggcgagatcgccgccatcatccaccccaacctgcaggaccaggactggaagcccctgcaccccggcgaccccatgttcctgaccctggacggcaagaccatccccctgggcggcgactgcaccgtgtaccccgtgttcgtgaacgaggccgcctactacgagaagaaggaggccttcgccaagaccaccaagctgaccctgaacgccaagagcatcagatgctgcctgcactag

SEQ ID NO: 1758 - DNA, 942 bp, synthetic construct; identical to SEQ ID NO: 1757
  misc_feature 1..942: note = source = /note="Description of Artificial Sequence: Synthetic coding sequence"
  source 1..942: mol_type = other DNA

SEQ ID NO: 1759 - DNA, 3756 bp, synthetic construct
  misc_feature 1..3756: note = source = /note="Description of Artificial Sequence: Synthetic coding sequence"
  source 1..3756: mol_type = other DNA
atgagcaccgagagagacagcgagaccaccttcgacgaggacagccagcccaacgacgaggtggtgccctacagcgacgacgagaccgaggacgagctggacgaccagggcagcgccgtggagcccgagcagaacagagtgaacagagaggccgaggagaacagagagcccttcagaaaggagtgcacctggcaggtgaaggccaacgacagaaagtaccacgagcagccccacttcatgaacaccaagttcctgtgcatcaaggagagcaagtacgccaacaacgccatcaagacctacaagtacaacgccttcaccttcatccccatgaacctgttcgagcagttcaagagagccgccaacctgtacttcctggccctgctgatcctgcaggccgtgccccagatcagcaccctggcctggtacaccaccctggtgcccctgctggtggtgctgggcgtgaccgccatcaaggacctggtggacgacgtggccagacacaagatggacaaggagatcaacaacagaacctgcgaggtgatcaaggacggcagattcaaggtggccaagtggaaggagatccaggtgggcgacgtgatcagactgaagaagaacgacttcgtgcccgccgacatcctgctgctgagcagcagcgagcccaacagcctgtgctacgtggagaccgccgagctggacggcgagaccaacctgaagttcaagatgagcctggagatcaccgaccagtacctgcagagagaggacaccctggccaccttcgacggcttcatcgagtgcgaggagcccaacaacagactggacaagttcaccggcaccctgttctggagaaacaccagcttccccctggacgccgacaagatcctgctgagaggctgcgtgatcagaaacaccgacttctgccacggcctggtgatcttcgccggcgccgacaccaagatcatgaagaacagcggcaagaccagattcaagagaaccaagatcgactacctgatgaactacatggtgtacaccatcttcgtggtgctgatcctgctgagcgccggcctggccatcggccacgcctactgggaggcccaggtgggcaacagcagctggtacctgtacgacggcgaggacgacacccccagctacagaggcttcctgatcttctggggctacatcatcgtgctgaacaccatggtgcccatcagcctgtacgtgagcgtggaggtgatcagactgggccagagccacttcatcaactgggacctgcagatgtactacgccgagaaggacacccccgccaaggccagaaccaccaccctgaacgagcagctgggccagatccactacatcttcagcgacaagaccggcaccctgacccagaacatcatgaccttcaagaagtgctgcatcaacggccagatctacggcgaccacagagacgccagccagcacaaccacaacaagatcgagcaggtggacttcagctggaacacctacgccgacggcaagctggccttctacgaccactacctgatcgagcagatccagagcggcaaggagcccgaggtgagacagttcttcttcctgctggccgtgtgccacaccgtgatggtggacagaaccgacggccagctgaactaccaggccgccagccccgacgagggcgccctggtgaacgccgccagaaacttcggcttcgccttcctggccagaacccagaacaccatcaccatcagcgagctgggcaccgagagaacctacaacgtgctggccatcctggacttcaacagcgacagaaagagaatgagcatcatcgtgagaacccccgagggcaacatcaagctgtactgcaagggcgccgacaccgtgatctacgagagactgcacagaatgaaccccaccaagcaggagacccaggacgccctggacatcttcgccaacgagaccctgagaaccctgtgcctgtgctacaaggagatcgaggagaaggagttcaccgagtggaacaagaagttcatggccgccagcgtggccagcaccaacagagacgaggccctggacaaggtgtacgaggagatcgagaaggacctgatcctgctgggcgccaccgccatcgaggacaagctgcaggacggcgtgcccgagaccatcagcaagctggccaaggccgacatcaagatctgggtgctgaccggcgacaagaaggagaccgccgagaacatcggcttcgcctgcgagctgctgaccgaggacaccaccatctgctacggcgaggacatcaacagcctgctgcacgccagaatggagaaccagagaaacagaggcggcgtgtacgccaagttcgccccccccgtgcaggagagcttcttcccccccggcggcaacagagccctgatcatcaccggcagctggctgaacgagatcctgctggagaagaagaccaagagaaacaagatcctgaagctgaagttccccagaaccgaggaggagagaagaatgagaacccagagcaagagaagactggaggccaagaaggagcagagacagaagaacttcgtggacctggcctgcgagtgcagcgccgtgatctgctgcagagtgacccccaagcagaaggccatggtggtggacctggtgaagagatacaagaaggccatcaccctggccatcggcgacggcgccaacgacgtgaacatgatcaagaccgcccacatcggcgtgggcatcagcggccaggagggcatgcaggccgtgatgagcagcgactacagcttcgcccagttcagatacctgcagagactgctgctggtgcacggcagatggagctacatcagaatgtgcaagttcctgagatacttcttctacaagaacttcgccttcaccctggtgcacttctggtacagcttcttcaacggctacagcgcccagaccgcctacgaggactggttcatcaccctgtacaacgtgctgtacaccagcctgcccgtgctgctgatgggcctgctggaccaggacgtgagcgacaagctgagcctgagattccccggcctgtacatcgtgggccagagagacctgctgttcaactacaagagattcttcgtgagcctgctgcacggcgtgctgaccagcatgatcctgttcttcatccccctgggcgcctacctgcagaccgtgggccaggacggcgaggcccccagcgactaccagagcttcgccgtgaccatcgccagcgccctggtgatcaccgtgaacttccagatcggcctggacaccagctactggaccttcgtgaacgccttcagcatcttcggcagcatcgccctgtacttcggcatcatgttcgacttccacagcgccggcatccacgtgctgttccccagcgccttccagttcaccggcaccgccagcaacgccctgagacagccctacatctggctgaccatcatcctggccgtggccgtgtgcctgctgcccgtggtggccatcagattcctgagcatgaccatctggcccagcgagagcgacaagatccagaagcacagaaagagactgaaggccgaggagcagtggcagagaagacagcaggtgttcagaagaggcgtgagcaccagaagaagcgcctacgccttcagccaccagagaggctacgccgacctgatcagcagcggcagaagcatcagaaagaagagaagccccctggacgccatcgtggccgacggcaccgccgagtacagaagaaccggcgacagctag

SEQ ID NO: 1760 - DNA, 3756 bp, synthetic construct; identical to SEQ ID NO: 1759
  misc_feature 1..3756: note = source = /note="Description of Artificial Sequence: Synthetic coding sequence"
  source 1..3756: mol_type = other DNA

SEQ ID NO: 1761 - DNA, 4398 bp, synthetic construct
  misc_feature 1..4398: note = source = /note="Description of Artificial Sequence: Synthetic coding sequence"
  source 1..4398: mol_type = other DNA
atgcccgagcaggagagacagatcaccgccagagagggcgccagcagaaagatcctgagcaagctgagcctgcccaccagagcctgggagcccgccatgaagaagagcttcgccttcgacaacgtgggctacgagggcggcctggacggcctgggccccagcagccaggtggccaccagcaccgtgagaatcctgggcatgacctgccagagctgcgtgaagagcatcgaggacagaatcagcaacctgaagggcatcatcagcatgaaggtgagcctggagcagggcagcgccaccgtgaagtacgtgcccagcgtggtgtgcctgcagcaggtgtgccaccagatcggcgacatgggcttcgaggccagcatcgccgagggcaaggccgccagctggcccagcagaagcctgcccgcccaggaggccgtggtgaagctgagagtggagggcatgacctgccagagctgcgtgagcagcatcgagggcaaggtgagaaagctgcagggcgtggtgagagtgaaggtgagcctgagcaaccaggaggccgtgatcacctaccagccctacctgatccagcccgaggacctgagagaccacgtgaacgacatgggcttcgaggccgccatcaagagcaaggtggcccccctgagcctgggccccatcgacatcgagagactgcagagcaccaaccccaagagacccctgagcagcgccaaccagaacttcaacaacagcgagaccctgggccaccagggcagccacgtggtgaccctgcagctgagaatcgacggcatgcactgcaagagctgcgtgctgaacatcgaggagaacatcggccagctgctgggcgtgcagagcatccaggtgagcctggagaacaagaccgcccaggtgaagtacgaccccagctgcaccagccccgtggccctgcagagagccatcgaggccctgccccccggcaacttcaaggtgagcctgcccgacggcgccgagggcagcggcaccgaccacagaagcagcagcagccacagccccggcagcccccccagaaaccaggtgcagggcacctgcagcaccaccctgatcgccatcgccggcatgacctgcgccagctgcgtgcacagcatcgagggcatgatcagccagctggagggcgtgcagcagatcagcgtgagcctggccgagggcaccgccaccgtgctgtacaaccccagcgtgatcagccccgaggagctgagagccgccatcgaggacatgggcttcgaggccagcgtggtgagcgagagctgcagcaccaaccccctgggcaaccacagcgccggcaacagcatggtgcagaccaccgacggcacccccaccagcgtgcaggaggtggccccccacaccggcagactgcccgccaaccacgcccccgacatcctggccaagagcccccagagcaccagagccgtggccccccagaagtgcttcctgcagatcaagggcatgacctgcgccagctgcgtgagcaacatcgagagaaacctgcagaaggaggccggcgtgctgagcgtgctggtggccctgatggccggcaaggccgagatcaagtacgaccccgaggtgatccagcccctggagatcgcccagttcatccaggacctgggcttcgaggccgccgtgatggaggactacgccggcagcgacggcaacatcgagctgaccatcaccggcatgacctgcgccagctgcgtgcacaacatcgagagcaagctgaccagaaccaacggcatcacctacgccagcgtggccctggccaccagcaaggccctggtgaagttcgaccccgagatcatcggccccagagacatcatcaagatcatcgaggagatcggcttccacgccagcctggcccagagaaaccccaacgcccaccacctggaccacaagatggagatcaagcagtggaagaagagcttcctgtgcagcctggtgttcggcatccccgtgatggccctgatgatctacatgctgatccccagcaacgagccccaccagagcatggtgctggaccacaacatcatccccggcctgagcatcctgaacctgatcttcttcatcctgtgcaccttcgtgcagctgctgggcggctggtacttctacgtgcaggcctacaagagcctgagacacagaagcgccaacatggacgtgctgatcgtgctggccaccagcatcgcctacgtgtacagcctggtgatcctggtggtggccgtggccgagaaggccgagagaagccccgtgaccttcttcgacaccccccccatgctgttcgtgttcatcgccctgggcagatggctggagcacctggccaagagcaagaccagcgaggccctggccaagctgatgagcctgcaggccaccgaggccaccgtggtgaccctgggcgaggacaacctgatcatcagagaggagcaggtgcccatggagctggtgcagagaggcgacatcgtgaaggtggtgcccggcggcaagttccccgtggacggcaaggtgctggagggcaacaccatggccgacgagagcctgatcaccggcgaggccatgcccgtgaccaagaagcccggcagcaccgtgatcgccggcagcatcaacgcccacggcagcgtgctgatcaaggccacccacgtgggcaacgacaccaccctggcccagatcgtgaagctggtggaggaggcccagatgagcaaggcccccatccagcagctggccgacagattcagcggctacttcgtgcccttcatcatcatcatgagcaccctgaccctggtggtgtggatcgtgatcggcttcatcgacttcggcgtggtgcagagatacttccccaaccccaacaagcacatcagccagaccgaggtgatcatcagattcgccttccagaccagcatcaccgtgctgtgcatcgcctgcccctgcagcctgggcctggccacccccaccgccgtgatggtgggcaccggcgtggccgcccagaacggcatcctgatcaagggcggcaagcccctggagatggcccacaagatcaagaccgtgatgttcgacaagaccggcaccatcacccacggcgtgcccagagtgatgagagtgctgctgctgggcgacgtggccaccctgcccctgagaaaggtgctggccgtggtgggcaccgccgaggccagcagcgagcaccccctgggcgtggccgtgaccaagtactgcaaggaggagctgggcaccgagaccctgggctactgcaccgacttccaggccgtgcccggctgcggcatcggctgcaaggtgagcaacgtggagggcatcctggcccacagcgagagacccctgagcgcccccgccagccacctgaacgaggccggcagcctgcccgccgagaaggacgccgtgccccagaccttcagcgtgctgatcggcaacagagagtggctgagaagaaacggcctgaccatcagcagcgacgtgagcgacgccatgaccgaccacgagatgaagggccagaccgccatcctggtggccatcgacggcgtgctgtgcggcatgatcgccatcgccgacgccgtgaagcaggaggccgccctggccgtgcacaccctgcagagcatgggcgtggacgtggtgctgatcaccggcgacaacagaaagaccgccagagccatcgccacccaggtgggcatcaacaaggtgttcgccgaggtgctgcccagccacaaggtggccaaggtgcaggagctgcagaacaagggcaagaaggtggccatggtgggcgacggcgtgaacgacagccccgccctggcccaggccgacatgggcgtggccatcggcaccggcaccgacgtggccatcgaggccgccgacgtggtgctgatcagaaacgacctgctggacgtggtggccagcatccacctgagcaagagaaccgtgagaagaatcagaatcaacctggtgctggccctgatctacaacctggtgggcatccccatcgccgccggcgtgttcatgcccatcggcatcgtgctgcagccctggatgggcagcgccgccatggccgccagcagcgtgagcgtggtgctgagcagcctgcagctgaagtgctacaagaagcccgacctggagagatacgaggcccaggcccacggccacatgaagcccctgaccgccagccaggtgagcgtgcacatcggcatggacgacagatggagagacagccccagagccaccccctgggaccaggtgagctacgtgagccaggtgagcctgagcagcctgaccagcgacaagcccagcagacacagcgccgccgccgacgacgacggcgacaagtggagcctgctgctgaacggcagagacgaggagcagtacatctag

SEQ ID NO: 1762 - DNA, 3777 bp, synthetic construct
  misc_feature 1..3777: note = source = /note="Description of Artificial Sequence: Synthetic coding sequence"
  source 1..3777: mol_type = other DNA
atgcccgagcaggagagacagatcaccgccagagagggcgccagcagaaagatcctgagcaagctgagcctgcccaccagagcctgggagcccgccatgaagaagagcttcgccttcgacaacgtgggctacgagggcggcctggacggcctgggccccagcagccaggtggccaccagcaccgtgagaatcctgggcatgacctgccagagctgcgtgaagagcatcgaggacagaatcagcaacctgaagggcatcatcagcatgaaggtgagcctggagcagggcagcgccaccgtgaagtacgtgcccagcgtggtgtgcctgcagcaggtgtgccaccagatcggcgacatgggcttcgaggccagcatcgccgagggcaaggccgccagctggcccagcagaagcctgcccgcccaggaggccgtggtgaagctgagagtggagggcatgacctgccagagctgcgtgagcagcatcgagggcaaggtgagaaagctgcagggcgtggtgagagtgaaggtgagcctgagcaaccaggaggccgtgatcacctaccagccctacctgatccagcccgaggacctgagagaccacgtgaacgacatgggcttcgaggccgccatcaagagcaaggtggcccccctgagcctgggccccatcgacatcgagagactgcagagcaccaaccccaagagacccctgagcagcgccaaccagaacttcaacaacagcgagaccctgggccaccagggcagccacgtggtgaccctgcagctgagaatcgacggcatgcactgcaagagctgcgtgctgaacatcgaggagaacatcggccagctgctgggcgtgcagagcatccaggtgagcctggagaacaagaccgcccaggtgaagtacgaccccagctgcaccagccccgtggccctgcagagagccatcgaggccctgccccccggcaacttcaaggtgagcctgcccgacggcgccgagggcagcggcaccgaccacagaagcagcagcagccacagccccggcagcccccccagaaaccaggtgcagggcacctgcagcaccaccctgatcgccatcgccggcatgacctgcgccagctgcgtgcacagcatcgagggcatgatcagccagctggagggcgtgcagcagatcagcgtgagcctggccgagggcaccgccaccgtgctgtacaaccccagcgtgatcagccccgaggagctgagagccgccatcgaggacatgggcttcgaggccagcgtggtgagcgagagctgcagcaccaaccccctgggcaaccacagcgccggcaacagcatggtgcagaccaccgacggcacccccaccagcgtgcaggaggtggccccccacaccggcagactgcccgccaaccacgcccccgacatcctggccaagagcccccagagcaccagagccgtggccccccagaagtgcttcctgcagatcaagggcatgacctgcgccagctgcgtgagcaacatcgagagaaacctgcagaaggaggccggcgtgctgagcgtgctggtggccctgatggccggcaaggccgagatcaagtacgaccccgaggtgatccagcccctggagatcgcccagttcatccaggacctgggcttcgaggccgccgtgatggaggactacgccggcagcgacggcaacatcgagctgaccatcaccggcatgacctgcgccagctgcgtgcacaacatcgagagcaagctgaccagaaccaacggcatcacctacgccagcgtggccctggccaccagcaaggccctggtgaagttcgaccccgagatcatcggccccagagacatcatcaagatcatcgagagcaagaccagcgaggccctggccaagctgatgagcctgcaggccaccgaggccaccgtggtgaccctgggcgaggacaacctgatcatcagagaggagcaggtgcccatggagctggtgcagagaggcgacatcgtgaaggtggtgcccggcggcaagttccccgtggacggcaaggtgctggagggcaacaccatggccgacgagagcctgatcaccggcgaggccatgcccgtgaccaagaagcccggcagcaccgtgatcgccggcagcatcaacgcccacggcagcgtgctgatcaaggccacccacgtgggcaacgacaccaccctggcccagatcgtgaagctggtggaggaggcccagatgagcaagaaccccaacaagcacatcagccagaccgaggtgatcatcagattcgccttccagaccagcatcaccgtgctgtgcatcgcctgcccctgcagcctgggcctggccacccccaccgccgtgatggtgggcaccggcgtggccgcccagaacggcatcctgatcaagggcggcaagcccctggagatggcccacaagatcaagaccgtgatgttcgacaagaccggcaccatcacccacggcgtgcccagagtgatgagagtgctgctgctgggcgacgtggccaccctgcccctgagaaaggtgctggccgtggtgggcaccgccgaggccagcagcgagcaccccctgggcgtggccgtgaccaagtactgcaaggaggagctgggcaccgagaccctgggctactgcaccgacttccaggccgtgcccggctgcggcatcggctgcaaggtgagcaacgtggagggcatcctggcccacagcgagagacccctgagcgcccccgccagccacctgaacgaggccggcagcctgcccgccgagaaggacgccgtgccccagaccttcagcgtgctgatcggcaacagagagtggctgagaagaaacggcctgaccatcagcagcgacgtgagcgacgccatgaccgaccacgagatgaagggccagaccgccatcctggtggccatcgacggcgtgctgtgcggcatgatcgccatcgccgacgccgtgaagcaggaggccgccctggccgtgcacaccctgcagagcatgggcgtggacgtggtgctgatcaccggcgacaacagaaagaccgccagagccatcgccacccaggtgggcatcaacaaggtgttcgccgaggtgctgcccagccacaaggtggccaaggtgcaggagctgcagaacaagggcaagaaggtggccatggtgggcgacggcgtgaacgacagccccgccctggcccaggccgacatgggcgtggccatcggcaccggcaccgacgtggccatcgaggccgccgacgtggtgctgatcagaaacgacctgctggacgtggtggccagcatccacctgagcaagagaaccgtgagaagaatcagaatcaacctggtgctggccctgatctacaacctggtgggcatccccatcgccgccggcgtgttcatgcccatcggcatcgtgctgcagccctggatgggcagcgccgccatggccgccagcagcgtgagcgtggtgctgagcagcctgcagctgaagtgctacaagaagcccgacctggagagatacgaggcccaggcccacggccacatgaagcccctgaccgccagccaggtgagcgtgcacatcggcatggacgacagatggagagacagccccagagccaccccctgggaccaggtgagctacgtgagccaggtgagcctgagcagcctgaccagcgacaagcccagcagacacagcgccgccgccgacgacgacggcgacaagtggagcctgctgctgaacggcagagacgaggagcagtacatctag

SEQ ID NO: 1763 - DNA, 4065 bp, synthetic construct
  misc_feature 1..4065: note = source = /note="Description of Artificial Sequence: Synthetic coding sequence"
  source 1..4065: mol_type = other DNA
atgcccgagcaggagagacagatcaccgccagagagggcgccagcagaaagatcctgagcaagctgagcctgcccaccagagcctgggagcccgccatgaagaagagcttcgccttcgacaacgtgggctacgagggcggcctggacggcctgggccccagcagccaggtggccaccagcaccgtgagaatcctgggcatgacctgccagagctgcgtgaagagcatcgaggacagaatcagcaacctgaagggcatcatcagcatgaaggtgagcctggagcagggcagcgccaccgtgaagtacgtgcccagcgtggtgtgcctgcagcaggtgtgccaccagatcggcgacatgggcttcgaggccagcatcgccgagggcaaggccgccagctggcccagcagaagcctgcccgcccaggaggccgtggtgaagctgagagtggagggcatgacctgccagagctgcgtgagcagcatcgagggcaaggtgagaaagctgcagggcgtggtgagagtgaaggtgagcctgagcaaccaggaggccgtgatcacctaccagccctacctgatccagcccgaggacctgagagaccacgtgaacgacatgggcttcgaggccgccatcaagagcaaggtggcccccctgagcctgggccccatcgacatcgagagactgcagagcaccaaccccaagagacccctgagcagcgccaaccagaacttcaacaacagcgagaccctgggccaccagggcagccacgtggtgaccctgcagctgagaatcgacggcatgcactgcatgatcagccagctggagggcgtgcagcagatcagcgtgagcctggccgagggcaccgccaccgtgctgtacaaccccagcgtgatcagccccgaggagctgagagccgccatcgaggacatgggcttcgaggccagcgtggtgagcgagagctgcagcaccaaccccctgggcaaccacagcgccggcaacagcatggtgcagaccaccgacggcacccccaccagcgtgcaggaggtggccccccacaccggcagactgcccgccaaccacgcccccgacatcctggccaagagcccccagagcaccagagccgtggccccccagaagtgcttcctgcagatcaagggcatgacctgcgccagctgcgtgagcaacatcgagagaaacctgcagaaggaggccggcgtgctgagcgtgctggtggccctgatggccggcaaggccgagatcaagtacgaccccgaggtgatccagcccctggagatcgcccagttcatccaggacctgggcttcgaggccgccgtgatggaggactacgccggcagcgacggcaacatcgagctgaccatcaccggcatgacctgcgccagctgcgtgcacaacatcgagagcaagctgaccagaaccaacggcatcacctacgccagcgtggccctggccaccagcaaggccctggtgaagttcgaccccgagatcatcggccccagagacatcatcaagatcatcgaggagatcggcttccacgccagcctggcccagagaaaccccaacgcccaccacctggaccacaagatggagatcaagcagtggaagaagagcttcctgtgcagcctggtgttcggcatccccgtgatggccctgatgatctacatgctgatccccagcaacgagccccaccagagcatggtgctggaccacaacatcatccccggcctgagcatcctgaacctgatcttcttcatcctgtgcaccttcgtgcagctgctgggcggctggtacttctacgtgcaggcctacaagagcctgagacacagaagcgccaacatggacgtgctgatcgtgctggccaccagcatcgcctacgtgtacagcctggtgatcctggtggtggccgtggccgagaaggccgagagaagccccgtgaccttcttcgacaccccccccatgctgttcgtgttcatcgccctgggcagatggctggagcacctggccaagagcaagaccagcgaggccctggccaagctgatgagcctgcaggccaccgaggccaccgtggtgaccctgggcgaggacaacctgatcatcagagaggagcaggtgcccatggagctggtgcagagaggcgacatcgtgaaggtggtgcccggcggcaagttccccgtggacggcaaggtgctggagggcaacaccatggccgacgagagcctgatcaccggcgaggccatgcccgtgaccaagaagcccggcagcaccgtgatcgccggcagcatcaacgcccacggcagcgtgctgatcaaggccacccacgtgggcaacgacaccaccctggcccagatcgtgaagctggtggaggaggcccagatgagcaaggcccccatccagcagctggccgacagattcagcggctacttcgtgcccttcatcatcatcatgagcaccctgaccctggtggtgtggatcgtgatcggcttcatcgacttcggcgtggtgcagagatacttccccaaccccaacaagcacatcagccagaccgaggtgatcatcagattcgccttccagaccagcatcaccgtgctgtgcatcgcctgcccctgcagcctgggcctggccacccccaccgccgtgatggtgggcaccggcgtggccgcccagaacggcatcctgatcaagggcggcaagcccctggagatggcccacaagatcaagaccgtgatgttcgacaagaccggcaccatcacccacggcgtgcccagagtgatgagagtgctgctgctgggcgacgtggccaccctgcccctgagaaaggtgctggccgtggtgggcaccgccgaggccagcagcgagcaccccctgggcgtggccgtgaccaagtactgcaaggaggagctgggcaccgagaccctgggctactgcaccgacttccaggccgtgcccggctgcggcatcggctgcaaggtgagcaacgtggagggcatcctggcccacagcgagagacccctgagcgcccccgccagccacctgaacgaggccggcagcctgcccgccgagaaggacgccgtgccccagaccttcagcgtgctgatcggcaacagagagtggctgagaagaaacggcctgaccatcagcagcgacgtgagcgacgccatgaccgaccacgagatgaagggccagaccgccatcctggtggccatcgacggcgtgctgtgcggcatgatcgccatcgccgacgccgtgaagcaggaggccgccctggccgtgcacaccctgcagagcatgggcgtggacgtggtgctgatcaccggcgacaacagaaagaccgccagagccatcgccacccaggtgggcatcaacaaggtgttcgccgaggtgctgcccagccacaaggtggccaaggtgcaggagctgcagaacaagggcaagaaggtggccatggtgggcgacggcgtgaacgacagccccgccctggcccaggccgacatgggcgtggccatcggcaccggcaccgacgtggccatcgaggccgccgacgtggtgctgatcagaaacgacctgctggacgtggtggccagcatccacctgagcaagagaaccgtgagaagaatcagaatcaacctggtgctggccctgatctacaacctggtgggcatccccatcgccgccggcgtgttcatgcccatcggcatcgtgctgcagccctggatgggcagcgccgccatggccgccagcagcgtgagcgtggtgctgagcagcctgcagctgaagtgctacaagaagcccgacctggagagatacgaggcccaggcccacggccacatgaagcccctgaccgccagccaggtgagcgtgcacatcggcatggacgacagatggagagacagccccagagccaccccctgggaccaggtgagctacgtgagccaggtgagcctgagcagcctgaccagcgacaagcccagcagacacagcgccgccgccgacgacgacggcgacaagtggagcctgctgctgaacggcagagacgaggagcagtacatctag

SEQ ID NO: 1764 - DNA, 3108 bp, synthetic construct
  misc_feature 1..3108: note = source = /note="Description of Artificial Sequence: Synthetic coding sequence"
  source 1..3108: mol_type = other DNA
atgcccgagcaggagagacagatcaccgccagagagggcgccagcagaaagatcctgagcaagctgagcctgcccaccagagcctgggagcccgccatgaagaagagcttcgccttcgacaacgtgggctacgagggcggcctggacggcctgggccccagcagccaggtggccaccagcaccgtgagaatcctgggcatgacctgccagagctgcgtgaagagcatcgaggacagaatcagcaacctgaagggcatcatcagcatgaaggtgagcctggagcagggcagcgccaccgtgaagtacgtgcccagcgtggtgtgcctgcagcaggtgtgccaccagatcggcgacatgggcttcgaggccagcatcgccgagggcaaggccgccagctggcccagcagaagcctgcccgcccaggaggccgtggtgaagctgagagtggagggcatgacctgccagagctgcgtgagcagcatcgagggcaaggtgagaaagctgcagggcgtggtgagagtgaaggtgagcctgagcaaccaggaggccgtgatcacctaccagccctacctgatccagcccgaggacctgagagaccacgtgaacgacatgggcttcgaggccgccatcaagagcaaggtggcccccctgagcctgggccccatcgacatcgagagactgcagagcaccaaccccaagagacccctgagcagcgccaaccagaacttcaacaacagcgagaccctgggccaccagggcagccacgtggtgaccctgcagctgagaatcgacggcatgcactgcaagagctgcgtgctgaacatcgaggagaacatcggccagctgctgggcgtgcagagcatccaggtgagcctggagaacaagaccgcccaggtgaagtacgaccccagctgcaccagccccgtggccctgcagagagccatcgaggccctgccccccggcaacttcaaggtgagcctgcccgacggcgccgagggcagcggcaccgaccacagaagcagcagcagccacagccccggcagcccccccagaaaccaggtgcagggcacctgcagcaccaccctgatcgccatcgccggcatgacctgcgccagctgcgtgcacagcatcgagggcatgatcagccagctggagggcgtgcagcagatcagcgtgagcctggccgagggcaccgccaccgtgctgtacaaccccagcgtgatcagccccgaggagctgagagccgccatcgaggacatgggcttcgaggccagcgtggtgagcggcgaggccatgcccgtgaccaagaagcccggcagcaccgtgatcgccggcagcatcaacgcccacggcagcgtgctgatcaaggccacccacgtgggcaacgacaccaccctggcccagatcgtgaagctggtggaggaggcccagatgagcaaggcccccatccagcagctggccgacagattcagcggctacttcgtgcccttcatcatcatcatgagcaccctgaccctggtggtgtggatcgtgatcggcttcatcgacttcggcgtggtgcagagatacttccccaaccccaacaagcacatcagccagaccgaggtgatcatcagattcgccttccagaccagcatcaccgtgctgtgcatcgcctgcccctgcagcctgggcctggccacccccaccgccgtgatggtgggcaccggcgtggccgcccagaacggcatcctgatcaagggcggcaagcccctggagatggcccacaagatcaagaccgtgatgttcgacaagaccggcaccatcacccacggcgtgcccagagtgatgagagtgctgctgctgggcgacgtggccaccctgcccctgagaaaggtgctggccgtggtgggcaccgccgaggccagcagcgagcaccccctgggcgtggccgtgaccaagtactgcaaggaggagctgggcaccgagaccctgggctactgcaccgacttccaggccgtgcccggctgcggcatcggctgcaaggtgagcaacgtggagggcatcctggcccacagcgagagacccctgagcgcccccgccagccacctgaacgaggccggcagcctgcccgccgagaaggacgccgtgccccagaccttcagcgtgctgatcggcaacagagagtggctgagaagaaacggcctgaccatcagcagcgacgtgagcgacgccatgaccgaccacgagatgaagggccagaccgccatcctggtggccatcgacggcgtgctgtgcggcatgatcgccatcgccgacgccgtgaagcaggaggccgccctggccgtgcacaccctgcagagcatgggcgtggacgtggtgctgatcaccggcgacaacagaaagaccgccagagccatcgccacccaggtgggcatcaacaaggtgttcgccgaggtgctgcccagccacaaggtggccaaggtgcaggagctgcagaacaagggcaagaaggtggccatggtgggcgacggcgtgaacgacagccccgccctggcccaggccgacatgggcgtggccatcggcaccggcaccgacgtggccatcgaggccgccgacgtggtgctgatcagaaacgacctgctggacgtggtggccagcatccacctgagcaagagaaccgtgagaagaatcagaatcaacctggtgctggccctgatctacaacctggtgggcatccccatcgccgccggcgtgttcatgcccatcggcatcgtgctgcagccctggatgggcagcgccgccatggccgccagcagcgtgagcgtggtgctgagcagcctgcagctgaagtgctacaagaagcccgacctggagagatacgaggcccaggcccacggccacatgaagcccctgaccgccagccaggtgagcgtgcacatcggcatggacgacagatggagagacagccccagagccaccccctgggaccaggtgagctacgtgagccaggtgagcctgagcagcctgaccagcgacaagcccagcagacacagcgccgccgccgacgacgacggcgacaagtggagcctgctgctgaacggcagagacgaggagcagtacatctag

SEQ ID NO: 1765 - DNA, 2031 bp, synthetic construct
  misc_feature 1..2031: note = source = /note="Description of Artificial Sequence: Synthetic coding sequence"
  source 1..2031: mol_type = other DNA
atggacgtgctgatcgtgctggccaccagcatcgcctacgtgtacagcctggtgatcctggtggtggccgtggccgagaaggccgagagaagccccgtgaccttcttcgacaccccccccatgctgttcgtgttcatcgccctgggcagatggctggagcacctggccaagagcaagaccagcgaggccctggccaagctgatgagcctgcaggccaccgaggccaccgtggtgaccctgggcgaggacaacctgatcatcagagaggagcaggtgcccatggagctggtgcagagaggcgacatcgtgaaggtggtgcccggcggcaagttccccgtggacggcaaggtgctggagggcaacaccatggccgacgagagcctgatcaccggcgaggccatgcccgtgaccaagaagcccggcagcaccgtgatcgccggcagcatcaacgcccacggcagcgtgctgatcaaggccacccacgtgggcaacgacaccaccctggcccagatcgtgaagctggtggaggaggcccagatgagcaaggcccccatccagcagctggccgacagattcagcggctacttcgtgcccttcatcatcatcatgagcaccctgaccctggtggtgtggatcgtgatcggcttcatcgacttcggcgtggtgcagagatacttccccaaccccaacaagcacatcagccagaccgaggtgatcatcagattcgccttccagaccagcatcaccgtgctgtgcatcgcctgcccctgcagcctgggcctggccacccccaccgccgtgatggtgggcaccggcgtggccgcccagaacggcatcctgatcaagggcggcaagcccctggagatggcccacaaggagctgggcaccgagaccctgggctactgcaccgacttccaggccgtgcccggctgcggcatcggctgcaaggtgagcaacgtggagggcatcctggcccacagcgagagacccctgagcgcccccgccagccacctgaacgaggccggcagcctgcccgccgagaaggacgccgtgccccagaccttcagcgtgctgatcggcaacagagagtggctgagaagaaacggcctgaccatcagcagcgacgtgagcgacgccatgaccgaccacgagatgaagggccagaccgccatcctggtggccatcgacggcgtgctgtgcggcatgatcgccatcgccgacgccgtgaagcaggaggccgccctggccgtgcacaccctgcagagcatgggcgtggacgtggtgctgatcaccggcgacaacagaaagaccgccagagccatcgccacccaggtgggcatcaacaaggtgttcgccgaggtgctgcccagccacaaggtggccaaggtgcaggagctgcagaacaagggcaagaaggtggccatggtgggcgacggcgtgaacgacagccccgccctggcccaggccgacatgggcgtggccatcggcaccggcaccgacgtggccatcgaggccgccgacgtggtgctgatcagaaacgacctgctggacgtggtggccagcatccacctgagcaagagaaccgtgagaagaatcagaatcaacctggtgctggccctgatctacaacctggtgggcatccccatcgccgccggcgtgttcatgcccatcggcatcgtgctgcagccctggatgggcagcgccgccatggccgccagcagcgtgagcgtggtgctgagcagcctgcagctgaagtgctacaagaagcccgacctggagagatacgaggcccaggcccacggccacatgaagcccctgaccgccagccaggtgagcgtgcacatcggcatggacgacagatggagagacagccccagagccaccccctgggaccaggtgagctacgtgagccaggtgagcctgagcagcctgaccagcgacaagcccagcagacacagcgccgccgccgacgacgacggcgacaagtggagcctgctgctgaacggcagagacgaggagcagtacatctag

SEQ ID NO: 1766 - DNA, 4203 bp, synthetic construct
  misc_feature 1..4203: note = source = /note="Description of Artificial Sequence: Synthetic coding sequence"
  source 1..4203: mol_type = other DNA
atgcccgagcaggagagacagatcaccgccagagagggcgccagcagaaagatcctgagcaagctgagcctgcccaccagagcctgggagcccgccatgaagaagagcttcgccttcgacaacgtgggctacgagggcggcctggacggcctgggccccagcagccaggtggccaccagcaccgtgagaatcctgggcatgacctgccagagctgcgtgaagagcatcgaggacagaatcagcaacctgaagggcatcatcagcatgaaggtgagcctggagcagggcagcgccaccgtgaagtacgtgcccagcgtggtgtgcctgcagcaggtgtgccaccagatcggcgacatgggcttcgaggccagcatcgccgagggcaaggccgccagctggcccagcagaagcctgcccgcccaggaggccgtggtgaagctgagagtggagggcatgacctgccagagctgcgtgagcagcatcgagggcaaggtgagaaagctgcagggcgtggtgagagtgaaggtgagcctgagcaaccaggaggccgtgatcacctaccagccctacctgatccagcccgaggacctgagagaccacgtgaacgacatgggcttcgaggccgccatcaagagcaaggtggcccccctgagcctgggccccatcgacatcgagagactgcagagcaccaaccccaagagacccctgagcagcgccaaccagaacttcaacaacagcgagaccctgggccaccagggcagccacgtggtgaccctgcagctgagaatcgacggcatgcactgcaagagctgcgtgctgaacatcgaggagaacatcggccagctgctgggcgtgcagagcatccaggtgagcctggagaacaagaccgcccaggtgaagtacgaccccagctgcaccagccccgtggccctgcagagagccatcgaggccctgccccccggcaacttcaaggtgagcctgcccgacggcgccgagggcagcggcaccgaccacagaagcagcagcagccacagccccggcagcccccccagaaaccaggtgcagggcacctgcagcaccaccctgatcgccatcgccggcatgacctgcgccagctgcgtgcacagcatcgagggcatgatcagccagctggagggcgtgcagcagatcagcgtgagcctggccgagggcaccgccaccgtgctgtacaaccccagcgtgatcagccccgaggagctgagagccgccatcgaggacatgggcttcgaggccagcgtggtgagcgagagctgcagcaccaaccccctgggcaaccacagcgccggcaacagcatggtgcagaccaccgacggcacccccaccagcgtgcaggaggtggccccccacaccggcagactgcccgccaaccacgcccccgacatcctggccaagagcccccagagcaccagagccgtggccccccagaagtgcttcctgcagatcaagggcatgacctgcgccagctgcgtgagcaacatcgagagaaacctgcagaaggaggccggcgtgctgagcgtgctggtggccctgatggccggcaaggccgagatcaagtacgaccccgaggtgatccagcccctggagatcgcccagttcatccaggacctgggcttcgaggccgccgtgatggaggactacgccggcagcgacggcaacatcgagctgaccatcaccggcatgacctgcgccagctgcgtgcacaacatcgagagcaagctgaccagaaccaacggcatcacctacgccagcgtggccctggccaccagcaaggccctggtgaagttcgaccccgagatcatcggccccagagacatcatcaagatcatcgaggagatcggcttccacgccagcctggcccagagaaaccccaacgcccaccacctggaccacaagatggagatcaagcagtggaagaagagcttcctgtgcagcctggtgttcggcatccccgtgatggccctgatgatctacatgctgatccccagcaacgagccccaccagagcatggtgctggaccacaacatcatccccggcctgagcatcctgaacctgatcttcttcatcctgtgcaccttcgtgcagctgctgggcggctggtacttctacgtgcaggcctacaagagcctgagacacagaagcgccaacatggacgtgctgatcgtgctggccaccagcatcgcctacgtgtacagcctggtgatcctggtggtggccgtggccgagaaggccgagagaagccccgtgaccttcttcgacaccccccccatgctgttcgtgttcatcgccctgggcagatggctggagcacctggccaagagcaagaccagcgaggccctggccaagctgatgagcctgcaggccaccgaggccaccgtggtgaccctgggcgaggacaacctgatcatcagagaggagcaggtgcccatggagctggtgcagagaggcgacatcgtgaaggtggtgcccggcggcaagttccccgtggacggcaaggtgctggagggcaacaccatggccgacgagagcctgatcaccggcgaggccatgcccgtgaccaagaagcccggcagcaccgtgatcgccggcagcatcaacgcccacggcagcgtgctgatcaaggccacccacgtgggcaacgacaccaccctggcccagatcgtgaagctggtggaggaggcccagatgagcaaggcccccatccagcagctggccgacagattcagcggctacttcgtgcccttcatcatcatcatgagcaccctgaccctggtggtgtggatcgtgatcggcttcatcgacttcggcgtggtgcagagatacttccccatcaagaccgtgatgttcgacaagaccggcaccatcacccacggcgtgcccagagtgatgagagtgctgctgctgggcgacgtggccaccctgcccctgagaaaggtgctggccgtggtgggcaccgccgaggccagcagcgagcaccccctgggcgtggccgtgaccaagtactgcaaggaggagctgggcaccgagaccctgggctactgcaccgacttccaggccgtgcccggctgcggcatcggctgcaaggtgagcaacgtggagggcatcctggcccacagcgagagacccctgagcgcccccgccagccacctgaacgaggccggcagcctgcccgccgagaaggacgccgtgccccagaccttcagcgtgctgatcggcaacagagagtggctgagaagaaacggcctgaccatcagcagcgacgtgagcgacgccatgaccgaccacgagatgaagggccagaccgccatcctggtggccatcgacggcgtgctgtgcggcatgatcgccatcgccgacgccgtgaagcaggaggccgccctggccgtgcacaccctgcagagcatgggcgtggacgtggtgctgatcaccggcgacaacagaaagaccgccagagccatcgccacccaggtgggcatcaacaaggtgttcgccgaggtgctgcccagccacaaggtggccaaggtgcaggagctgcagaacaagggcaagaaggtggccatggtgggcgacggcgtgaacgacagccccgccctggcccaggccgacatgggcgtggccatcggcaccggcaccgacgtggccatcgaggccgccgacgtggtgctgatcagaaacgacctgctggacgtggtggccagcatccacctgagcaagagaaccgtgagaagaatcagaatcaacctggtgctggccctgatctacaacctggtgggcatccccatcgccgccggcgtgttcatgcccatcggcatcgtgctgcagccctggatgggcagcgccgccatggccgccagcagcgtgagcgtggtgctgagcagcctgcagctgaagtgctacaagaagcccgacctggagagatacgaggcccaggcccacggccacatgaagcccctgaccgccagccaggtgagcgtgcacatcggcatggacgacagatggagagacagccccagagccaccccctgggaccaggtgagctacgtgagccaggtgagcctgagcagcctgaccagcgacaagcccagcagacacagcgccgccgccgacgacgacggcgacaagtggagcctgctgctgaacggcagagacgaggagcagtacatctag

SEQ ID NO: 1767 - DNA, 4164 bp, synthetic construct
  misc_feature 1..4164: note = source = /note="Description of Artificial Sequence: Synthetic coding sequence"
  source 1..4164: mol_type = other DNA
atgcccgagcaggagagacagatcaccgccagagagggcgccagcagaaagatcctgagcaagctgagcctgcccaccagagcctgggagcccgccatgaagaagagcttcgccttcgacaacgtgggctacgagggcggcctggacggcctgggccccagcagccaggtggccaccagcaccgtgagaatcctgggcatgacctgccagagctgcgtgaagagcatcgaggacagaatcagcaacctgaagggcatcatcagcatgaaggtgagcctggagcagggcagcgccaccgtgaagtacgtgcccagcgtggtgtgcctgcagcaggtgtgccaccagatcggcgacatgggcttcgaggccagcatcgccgagggcaaggccgccagctggcccagcagaagcctgcccgcccaggaggccgtggtgaagctgagagtggagggcatgacctgccagagctgcgtgagcagcatcgagggcaaggtgagaaagctgcagggcgtggtgagagtgaaggtgagcctgagcaaccaggaggccgtgatcacctaccagccctacctgatccagcccgaggacctgagagaccacgtgaacgacatgggcttcgaggccgccatcaagagcaaggtggcccccctgagcctgggccccatcgacatcgagagactgcagagcaccaaccccaagagacccctgagcagcgccaaccagaacttcaacaacagcgagaccctgggccaccagggcagccacgtggtgaccctgcagctgagaatcgacggcatgcactgcaagagctgcgtgctgaacatcgaggagaacatcggccagctgctgggcgtgcagagcatccaggtgagcctggagaacaagaccgcccaggtgaagtacgaccccagctgcaccagccccgtggccctgcagagagccatcgaggccctgccccccggcaacttcaaggtgagcctgcccgacggcgccgagggcagcggcaccgaccacagaagcagcagcagccacagccccggcagcccccccagaaaccaggtgcagggcacctgcagcaccaccctgatcgccatcgccggcatgacctgcgccagctgcgtgcacagcatcgagggcatgatcagccagctggagggcgtgcagcagatcagcgtgagcctggccgagggcaccgccaccgtgctgtacaaccccagcgtgatcagccccgaggagctgagagccgccatcgaggacatgggcttcgaggccagcgtggtgagcgagagctgcagcaccaaccccctgggcaaccacagcgccggcaacagcatggtgcagaccaccgacggcacccccaccagcgtgcaggaggtggccccccacaccggcagactgcccgccaaccacgcccccgacatcctggccaagagcccccagagcaccagagccgtggccccccagaagtgcttcctgcagatcaagggcatgacctgcgccagctgcgtgagcaacatcgagagaaacctgcagaaggaggccggcgtgctgagcgtgctggtggccctgatggccggcaaggccgagatcaagtacgaccccgaggtgatccagcccctggagatcgcccagttcatccaggacctgggcttcgaggccgccgtgatggaggactacgccggcagcgacggcaacatcgagctgaccatcaccggcatgacctgcgccagctgcgtgcacaacatcgagagcaagctgaccagaaccaacggcatcacctacgccagcgtggccctggccaccagcaaggccctggtgaagttcgaccccgagatcatcggccccagagacatcatcaagatcatcgaggagatcggcttccacgccagcctggcccagagaaaccccaacgcccaccacctggaccacaagatggagatcaagcagtggaagaagagcttcctgtgcagcctggtgttcggcatccccgtgatggccctgatgatctacatgctgatccccagcaacgagccccaccagagcatggtgctggaccacaacatcatccccggcctgagcatcctgaacctgatcttcttcatcctgtgcaccttcgtgcagagcaagaccagcgaggccctggccaagctgatgagcctgcaggccaccgaggccaccgtggtgaccctgggcgaggacaacctgatcatcagagaggagcaggtgcccatggagctggtgcagagaggcgacatcgtgaaggtggtgcccggcggcaagttccccgtggacggcaaggtgctggagggcaacaccatggccgacgagagcctgatcaccggcgaggccatgcccgtgaccaagaagcccggcagcaccgtgatcgccggcagcatcaacgcccacggcagcgtgctgatcaaggccacccacgtgggcaacgacaccaccctggcccagatcgtgaagctggtggaggaggcccagatgagcaaggcccccatccagcagctggccgacagattcagcggctacttcgtgcccttcatcatcatcatgagcaccctgaccctggtggtgtggatcgtgatcggcttcatcgacttcggcgtggtgcagagatacttccccaaccccaacaagcacatcagccagaccgaggtgatcatcagattcgccttccagaccagcatcaccgtgctgtgcatcgcctgcccctgcagcctgggcctggccacccccaccgccgtgatggtgggcaccggcgtggccgcccagaacggcatcctgatcaagggcggcaagcccctggagatggcccacaagatcaagaccgtgatgttcgacaagaccggcaccatcacccacggcgtgcccagagtgatgagagtgctgctgctgggcgacgtggccaccctgcccctgagaaaggtgctggccgtggtgggcaccgccgaggccagcagcgagcaccccctgggcgtggccgtgaccaagtactgcaaggaggagctgggcaccgagaccctgggctactgcaccgacttccaggccgtgcccggctgcggcatcggctgcaaggtgagcaacgtggagggcatcctggcccacagcgagagacccctgagcgcccccgccagccacctgaacgaggccggcagcctgcccgccgagaaggacgccgtgccccagaccttcagcgtgctgatcggcaacagagagtggctgagaagaaacggcctgaccatcagcagcgacgtgagcgacgccatgaccgaccacgagatgaagggccagaccgccatcctggtggccatcgacggcgtgctgtgcggcatgatcgccatcgccgacgccgtgaagcaggaggccgccctggccgtgcacaccctgcagagcatgggcgtggacgtggtgctgatcaccggcgacaacagaaagaccgccagagccatcgccacccaggtgggcatcaacaaggtgttcgccgaggtgctgcccagccacaaggtggccaaggtgcaggagctgcagaacaagggcaagaaggtggccatggtgggcgacggcgtgaacgacagccccgccctggcccaggccgacatgggcgtggccatcggcaccggcaccgacgtggccatcgaggccgccgacgtggtgctgatcagaaacgacctgctggacgtggtggccagcatccacctgagcaagagaaccgtgagaagaatcagaatcaacctggtgctggccctgatctacaacctggtgggcatccccatcgccgccggcgtgttcatgcccatcggcatcgtgctgcagccctggatgggcagcgccgccatggccgccagcagcgtgagcgtggtgctgagcagcctgcagctgaagtgctacaagaagcccgacctggagagatacgaggcccaggcccacggccacatgaagcccctgaccgccagccaggtgagcgtgcacatcggcatggacgacagatggagagacagccccagagccaccccctgggaccaggtgagctacgtgagccaggtgagcctgagcagcctgaccagcgacaagcccagcagacacagcgccgccgccgacgacgacggcgacaagtggagcctgctgctgaacggcagagacgaggagcagtacatctag

SEQ ID NO: 1768 - DNA, 1587 bp, synthetic construct
  misc_feature 1..1587: note = source = /note="Description of Artificial Sequence: Synthetic coding sequence"
  source 1..1587: mol_type = other DNA
atgaagaagagcttcgccttcgacaacgtgggctacgagggcggcctggacggcctgggccccagcagccaggtggccaccagcaccgtgagaatcctgggcatgacctgccagagctgcgtgaagagcatcgaggacagaatcagcaacctgaagggcatcatcagcatgaaggtgagcctggagcagggcagcgccaccgtgaagtacgtgcccagcgtggtgtgcctgcagcaggtgtgccaccagatcggcgacatgggcttcgaggccagcatcgccgagggcaaggccgccagctggcccagcagaagcctgcccgcccaggaggccgtggtgaagctgagagtggagggcatgacctgccagagctgcgtgagcagcatcgagggcaaggtgagaaagctgcagggcgtggtgagagtgaaggtgagcctgagcaaccaggaggccgtgatcacctaccagccctacctgatccagcccgaggacctgagagaccacgtgaacgacatgggcttcgaggccgccatcaagagcaaggtggcccccctgagcctgggccccatcgacatcgagagactgcagagcaccaaccccaagagacccctgagcagcgccaaccagaacttcaacaacagcgagaccctgggccaccagggcagccacgtggtgaccctgcagctgagaatcgacggcatgcactgcaagagctgcgtgctgaacatcgaggagaacatcggccagctgctgggcgtgcagagcatccaggtgagcctggagaacaagaccgcccaggtgaagtacgaccccagctgcaccagccccgtggccctgcagagagccatcgaggccctgccccccggcaacttcaaggtgagcctgcccgacggcgccgagggcagcggcaccgaccacagaagcagcagcagccacagccccggcagcccccccagaaaccaggtgcagggcacctgcagcaccaccctgatcgccatcgccggcatgacctgcgccagctgcgtgcacagcatcgagggcatgatcagccagctggagggcgtgcagcagatcagcgtgagcctggccgagggcaccgccaccgtgctgtacaaccccagcgtgatcagccccgaggagctgagagccgccatcgaggacatgggcttcgaggccagcgtggtgagcgagagctgcagcaccaaccccctgggcaaccacagcgccggcaacagcatggtgcagaccaccgacggcacccccaccagcgtgcaggaggtggccccccacaccggcagactgcccgccaaccacgcccccgacatcctggccaagagcccccagagcaccagagccgtggccccccagaagtgcttcctgcagatcaagggcatgacctgcgccagctgcgtgagcaacatcgagagaaacctgcagaaggaggccgcccccagatgggtggtgctgctgagaagcggcctgcagatcagcgagacccaggtgagccagcacggcagagcccacagacccggccacaagcactgcctgtgcctgttcagcggccaccccggcggctgctgcggctag

SEQ ID NO: 1769 - DNA, 3966 bp, synthetic construct
  misc_feature 1..3966: note = source = /note="Description of Artificial Sequence: Synthetic coding sequence"
  source 1..3966: mol_type = other DNA
atgagcgacagcgtgatcctgagaagcatcaagaagttcggcgaggagaacgacggcttcgagagcgacaagagctacaacaacgacaagaagagcagactgcaggacgagaagaagggcgacggcgtgagagtgggcttcttccagctgttcagattcagcagcagcaccgacatctggctgatgttcgtgggcagcctgtgcgccttcctgcacggcatcgcccagcccggcgtgctgctgatcttcggcaccatgaccgacgtgttcatcgactacgacgtggagctgcaggagctgcagatccccggcaaggcctgcgtgaacaacaccatcgtgtggaccaacagcagcctgaaccagaacatgaccaacggcaccagatgcggcctgctgaacatcgagagcgagatgatcaagttcgccagctactacgccggcatcgccgtggccgtgctgatcaccggctacatccagatctgcttctgggtgatcgccgccgccagacagatccagaagatgagaaagttctacttcagaagaatcatgagaatggagatcggctggttcgactgcaacagcgtgggcgagctgaacaccagattcagcgacgacatcaacaagatcaacgacgccatcgccgaccagatggccctgttcatccagagaatgaccagcaccatctgcggcttcctgctgggcttcttcagaggctggaagctgaccctggtgatcatcagcgtgagccccctgatcggcatcggcgccgccaccatcggcctgagcgtgagcaagttcaccgactacgagctgaaggcctacgccaaggccggcgtggtggccgacgaggtgatcagcagcatgagaaccgtggccgccttcggcggcgagaagagagaggtggagagatacgagaagaacctggtgttcgcccagagatggggcatcagaaagggcatcgtgatgggcttcttcaccggcttcgtgtggtgcctgatcttcctgtgctacgccctggccttctggtacggcagcaccctggtgctggacgagggcgagtacacccccggcaccctggtgcagatcttcctgagcgtgatcgtgggcgccctgaacctgggcaacgccagcccctgcctggaggccttcgccaccggcagagccgccgccaccagcatcttcgagaccatcgacagaaagcccatcatcgactgcatgagcgaggacggctacaagctggacagaatcaagggcgagatcgagttccacaacgtgaccttccactaccccagcagacccgaggtgaagatcctgaacgacctgaacatggtgatcaagcccggcgagatgaccgccctggtgggccccagcggcgccggcaagagcaccgccctgcagctgatccagagattctacgacccctgcgagggcatggtgaccgtggacggccacgacatcagaagcctgaacatccagtggctgagagaccagatcggcatcgtggagcaggagcccgtgctgttcagcaccaccatcgccgagaacatcagatacggcagagaggacgccaccatggaggacatcgtgcaggccgccaaggaggccaacgcctacaacttcatcatggacctgccccagcagttcgacaccctggtgggcgagggcggcggccagatgagcggcggccagaagcagagagtggccatcgccagagccctgatcagaaaccccaagatcctgctgctggacatggccaccagcgccctggacaacgagagcgaggccatggtgcaggaggtgctgagcaagatccagcacggccacaccatcatcagcgtggcccacagactgagcaccgtgagagccgccgacaccatcatcggcttcgagcacggcaccgccgtggagagaggcacccacgaggagctgctggagagaaagggcgtgtacttcaccctggtgaccctgcagagccagggcaaccaggccctgaacgaggaggacatcaaggacgccaccgaggacgacatgctggccagaaccttcagcagaggcagctaccaggacagcctgagagccagcatcagacagagaagcaagagccagctgagctacctggtgcacgagccccccctggccgtggtggaccacaagagcacctacgaggaggacagaaaggacaaggacatccccgtgcaggaggaggtggagcccgcccccgtgagaagaatcctgaagttcagcgcccccgagtggccctacatgctggtgggcagcgtgggcgccgccgtgaacggcaccgtgacccccctgtacgccttcctgttcagccagatcctgggcaccttcagcatccccgacaaggaggagcagagaagccagatcaacggcgtgtgcctgctgttcgtggccatgggctgcgtgagcctgttcacccagttcctgcagggctacgccttcgccaagagcggcgagctgctgaccaagagactgagaaagttcggcttcagagccatgctgggccaggacatcgcctggttcgacgacctgagaaacagccccggcgccctgaccaccagactggccaccgacgccagccaggtgcagggcgccgccggcagccagatcggcatgatcgtgaacagcttcaccaacgtgaccgtggccatgatcatcgccttcagcttcagctggaagctgagcctggtgatcctgtgcttcttccccttcctggccctgagcggcgccacccagaccagaatgctgaccggcttcgccagcagagacaagcaggccctggagatggtgggccagatcaccaacgaggccctgagcaacatcagaaccgtggccggcatcggcaaggagagaagattcatcgaggccctggagaccgagctggagaagcccttcaagaccgccatccagaaggccaacatctacggcttctgcttcgccttcgcccagtgcatcatgttcatcgccaacagcgccagctacagatacggcggctacctgatcagcaacgagggcctgcacttcagctacgtgttcagagtgatcagcgccgtggtgctgagcgccaccgccctgggcagagccttcagctacacccccagctacgccaaggccaagatcagcgccgccagattcttccagctgctggacagacagccccccatcagcgtgtacaacaccgccggcgagaagtgggacaacttccagggcaagatcgacttcgtggactgcaagttcacctaccccagcagacccgacagccaggtgctgaacggcctgagcgtgagcatcagccccggccagaccctggccttcgtgggcagcagcggctgcggcaagagcaccagcatccagctgctggagagattctacgaccccgaccagggcaaggtgatgatcgacggccacgacagcaagaaggtgaacgtgcagttcctgagaagcaacatcggcatcgtgagccaggagcccgtgctgttcgcctgcagcatcatggacaacatcaagtacggcgacaacaccaaggagatccccatggagagagtgatcgccgccgccaagcaggcccagctgcacgacttcgtgatgagcctgcccgagaagtacgagaccaacgtgggcagccagggcagccagctgagcagaggcgagaagcagagaatcgccatcgccagagccatcgtgagagaccccaagatcctgctgctggacgaggccaccagcgccctggacaccgagagcgagaagaccgtgcaggtggccctggacaaggccagagagggcagaacctgcatcgtgatcgcccacagactgagcaccatccagaacgccgacatcatcgccgtgatggcccagggcgtggtgatcgagaagggcacccacgaggagctgatggcccagaagggcgcctactacaagctggtgaccaccggcagccccatcagctag

SEQ ID NO: 1770 - DNA, 3861 bp, synthetic construct
  misc_feature 1..3861: note = source = /note="Description of Artificial Sequence: Synthetic coding sequence"
  source 1..3861: mol_type = other DNA
atggacctggaggccgccaagaacggcaccgcctggagacccaccagcgccgagggcgacttcgagctgggcatcagcagcaagcagaagagaaagaagaccaagaccgtgaagatgatcggcgtgctgaccctgttcagatacagcgactggcaggacaagctgttcatgagcctgggcaccatcatggccatcgcccacggcagcggcctgcccctgatgatgatcgtgttcggcgagatgaccgacaagttcgtggacaccgccggcaacttcagcttccccgtgaacttcagcctgagcctgctgaaccccggcaagatcctggaggaggagatgaccagatacgcctactactacagcggcctgggcgccggcgtgctggtggccgcctacatccaggtgagcttctggaccctggccgccggcagacagatcagaaagatcagacagaagttcttccacgccatcctgagacaggagatcggctggttcgacatcaacgacaccaccgagctgaacaccagactgaccgacgacatcagcaagatcagcgagggcatcggcgacaaggtgggcatgttcttccaggccgtggccaccttcttcgccggcttcatcgtgggcttcatcagaggctggaagctgaccctggtgatcatggccatcagccccatcctgggcctgagcgccgccgtgtgggccaagatcctgagcgccttcagcgacaaggagctggccgcctacgccaaggccggcgccgtggccgaggaggccctgggcgccatcagaaccgtgatcgccttcggcggccagaacaaggagctggagagataccagaagcacctggagaacgccaaggagatcggcatcaagaaggccatcagcgccaacatcagcatgggcatcgccttcctgctgatctacgccagctacgccctggccttctggtacggcagcaccctggtgatcagcaaggagtacaccatcggcaacgccatgaccgtgttcttcagcatcctgatcggcgccttcagcgtgggccaggccgccccctgcatcgacgccttcgccaacgccagaggcgccgcctacgtgatcttcgacatcatcgacaacaaccccaagatcgacagcttcagcgagagaggccacaagcccgacagcatcaagggcaacctggagttcaacgacgtgcacttcagctaccccagcagagccaacgtgaagatcctgaagggcctgaacctgaaggtgcagagcggccagaccgtggccctggtgggcagcagcggctgcggcaagagcaccaccgtgcagctgatccagagactgtacgaccccgacgagggcaccatcaacatcgacggccaggacatcagaaacttcaacgtgaactacctgagagagatcatcggcgtggtgagccaggagcccgtgctgttcagcaccaccatcgccgagaacatctgctacggcagaggcaacgtgaccatggacgagatcaagaaggccgtgaaggaggccaacgcctacgagttcatcatgaagctgccccagaagttcgacaccctggtgggcgagagaggcgcccagctgagcggcggccagaagcagagaatcgccatcgccagagccctggtgagaaaccccaagatcctgctgctggacgaggccaccagcgccctggacaccgagagcgaggccgaggtgcaggccgccctggacaaggccagagagggcagaaccaccatcgtgatcgcccacagactgagcaccgtgagaaacgccgacgtgatcgccggcttcgaggacggcgtgatcgtggagcagggcagccacagcgagctgatgaagaaggagggcgtgtacttcaagctggtgaacatgcagaccagcggcagccagatccagagcgaggagttcgagctgaacgacgagaaggccgccaccagaatggcccccaacggctggaagagcagactgttcagacacagcacccagaagaacctgaagaacagccagatgtgccagaagagcctggacgtggagaccgacggcctggaggccaacgtgccccccgtgagcttcctgaaggtgctgaagctgaacaagaccgagtggccctacttcgtggtgggcaccgtgtgcgccatcgccaacggcggcctgcagcccgccttcagcgtgatcttcagcgagatcatcgccatcttcggccccggcgacgacgccgtgaagcagcagaagtgcaacatcttcagcctgatcttcctgttcctgggcatcatcagcttcttcaccttcttcctgcagggcttcaccttcggcaaggccggcgagatcctgaccagaagactgagaagcatggccttcaaggccatgctgagacaggacatgagctggttcgacgaccacaagaacagcaccggcgccctgagcaccagactggccaccgacgccgcccaggtgcagggcgccaccggcaccagactggccctgatcgcccagaacatcgccaacctgggcaccggcatcatcatcagcttcatctacggctggcagctgaccctgctgctgctggccgtggtgcccatcatcgccgtgagcggcatcgtggagatgaagctgctggccggcaacgccaagagagacaagaaggagctggaggccgccggcaagatcgccaccgaggccatcgagaacatcagaaccgtggtgagcctgacccaggagagaaagttcgagagcatgtacgtggagaagctgtacggcccctacagaaacagcgtgcagaaggcccacatctacggcatcaccttcagcatcagccaggccttcatgtacttcagctacgccggctgcttcagattcggcgcctacctgatcgtgaacggccacatgagattcagagacgtgatcctggtgttcagcgccatcgtgttcggcgccgtggccctgggccacgccagcagcttcgcccccgactacgccaaggccaagctgagcgccgcccacctgttcatgctgttcgagagacagcccctgatcgacagctacagcgaggagggcctgaagcccgacaagttcgagggcaacatcaccttcaacgaggtggtgttcaactaccccaccagagccaacgtgcccgtgctgcagggcctgagcctggaggtgaagaagggccagaccctggccctggtgggcagcagcggctgcggcaagagcaccgtggtgcagctgctggagagattctacgaccccctggccggcaccgtgttcgtggacttcggcttccagctgctggacggccaggaggccaagaagctgaacgtgcagtggctgagagcccagctgggcatcgtgagccaggagcccatcctgttcgactgcagcatcgccgagaacatcgcctacggcgacaacagcagagtggtgagccaggacgagatcgtgagcgccgccaaggccgccaacatccaccccttcatcgagaccctgccccacaagtacgagaccagagtgggcgacaagggcacccagctgagcggcggccagaagcagagaatcgccatcgccagagccctgatcagacagccccagatcctgctgctggacgaggccaccagcgccctggacaccgagagcgagaaggtggtgcaggaggccctggacaaggccagagagggcagaacctgcatcgtgatcgcccacagactgagcaccatccagaacgccgacctgatcgtggtgttccagaacggcagagtgaaggagcacggcacccaccagcagctgctggcccagaagggcatctacttcagcatggtgagcgtgcaggccggcacccagaacctgtag

SEQ ID NO: 1771 - DNA, 3699 bp, synthetic construct
  misc_feature 1..3699: note = source = /note="Description of Artificial Sequence: Synthetic coding sequence"
  source 1..3699: mol_type = other DNA
atggacctggaggccgccaagaacggcaccgcctggagacccaccagcgccgagggcgacttcgagctgggcatcagcagcaagcagaagagaaagaagaccaagaccgtgaagatgatcggcgtgctgaccctgttcagatacagcgactggcaggacaagctgttcatgagcctgggcaccatcatggccatcgcccacggcagcggcctgcccctgatgatgatcgtgttcggcgagatgaccgacaagttcgtggacaccgccggcaacttcagcttccccgtgaacttcagcctgagcctgctgaaccccggcaagatcctggaggaggagatgaccagatacgcctactactacagcggcctgggcgccggcgtgctggtggccgcctacatccaggtgagcttctggaccctggccgccggcagacagatcagaaagatcagacagaagttcttccacgccatcctgagacaggagatcggctggttcgacatcaacgacaccaccgagctgaacaccagactgaccgacgacatcagcaagatcagcgagggcatcggcgacaaggtgggcatgttcttccaggccgtggccaccttcttcgccggcttcatcgtgggcttcatcagaggctggaagctgaccctggtgatcatggccatcagccccatcctgggcctgagcgccgccgtgtgggccaagatcctgagcgccttcagcgacaaggagctggccgcctacgccaaggccggcgccgtggccgaggaggccctgggcgccatcagaaccgtgatcgccttcggcggccagaacaaggagctggagagataccagaagcacctggagaacgccaaggagatcggcatcaagaaggccatcagcgccaacatcagcatgggcatcgccttcctgctgatctacgccagctacgccctggccttctggtacggcagcaccctggtgatcagcaaggagtacaccatcggcaacgccatgaccgtgttcttcagcatcctgatcggcgccttcagcgtgggccaggccgccccctgcatcgacgccttcgccaacgccagaggcgccgcctacgtgatcttcgacatcatcgacaacaaccccaagatcgacagcttcagcgagagaggccacaagcccgacagcatcaagggcaacctggagttcaacgacgtgcacttcagctaccccagcagagccaacgtgaagatcctgaagggcctgaacctgaaggtgcagagcggccagaccgtggccctggtgggcagcagcggctgcggcaagagcaccaccgtgcagctgatccagagactgtacgaccccgacgagggcaccatcaacatcgacggccaggacatcagaaacttcaacgtgaactacctgagagagatcatcggcgtggtgagccaggagcccgtgctgttcagcaccaccatcgccgagaacatctgctacggcagaggcaacgtgaccatggacgagatcaagaaggccgtgaaggaggccaacgcctacgagttcatcatgaagctgccccagaagttcgacaccctggtgggcgagagaggcgcccagctgagcggcggccagaagcagagaatcgccatcgccagagccctggtgagaaaccccaagatcctgctgctggacgaggccaccagcgccctggacaccgagagcgaggccgaggtgcaggccgccctggacaaggccagagagggcagaaccaccatcgtgatcgcccacagactgagcaccgtgagaaacgccgacgtgatcgccggcttcgaggacggcgtgatcgtggagcagggcagccacagcgagctgatgaagaaggagggcgtgtacttcaagctggtgaacatgcagaccagcggcagccagatccagagcgaggagttcgagctgaacgacgagaaggccgccaccagaatggcccccaacggctggaagagcagactgttcagacacagcacccagaagaacctgaagaacagccagatgtgccagaagagcctggacgtggagaccgacggcctggaggccaacgtgccccccgtgagcttcctgaaggtgctgaagctgaacaagaccgagtggccctacttcgtggtgggcaccgtgtgcgccatcgccaacggcggcctgcagcccgccttcagcgtgatcttcagcgagatcatcgccatcttcggccccggcgacgacgccgtgaagcagcagaagtgcaacatcttcagcctgatcttcctgttcctgggcatcatcagcttcttcaccttcttcctgcagggcttcaccttcggcaaggccggcgagatcctgaccagaagactgagaagcatggccttcaaggccatgctgagacaggacatgagctggttcgacgaccacaagaacagcaccggcgccctgagcaccagactggccaccgacgccgcccaggtgcagggcgccaccggcaccagactggccctgatcgcccagaacatcgccaacctgggcaccggcatcatcatcagcttcatctacggctggcagctgaccctgctgctgctggccgtggtgcccatcatcgccgtgagcggcatcgtggagatgaagctgctggccggcaacgccaagagagacaagaaggagctggaggccgccggcaagatcgccaccgaggccatcgagaacatcagaaccgtggtgagcctgacccaggagagaaagttcgagagcatgtacgtggagaagctgtacggcccctacagagtgttcagcgccatcgtgttcggcgccgtggccctgggccacgccagcagcttcgcccccgactacgccaaggccaagctgagcgccgcccacctgttcatgctgttcgagagacagcccctgatcgacagctacagcgaggagggcctgaagcccgacaagttcgagggcaacatcaccttcaacgaggtggtgttcaactaccccaccagagccaacgtgcccgtgctgcagggcctgagcctggaggtgaagaagggccagaccctggccctggtgggcagcagcggctgcggcaagagcaccgtggtgcagctgctggagagattctacgaccccctggccggcaccgtgctgctggacggccaggaggccaagaagctgaacgtgcagtggctgagagcccagctgggcatcgtgagccaggagcccatcctgttcgactgcagcatcgccgagaacatcgcctacggcgacaacagcagagtggtgagccaggacgagatcgtgagcgccgccaaggccgccaacatccaccccttcatcgagaccctgccccacaagtacgagaccagagtgggcgacaagggcacccagctgagcggcggccagaagcagagaatcgccatcgccagagccctgatcagacagccccagatcctgctgctggacgaggccaccagcgccctggacaccgagagcgagaaggtggtgcaggaggccctggacaaggccagagagggcagaacctgcatcgtgatcgcccacagactgagcaccatccagaacgccgacctgatcgtggtgttccagaacggcagagtgaaggagcacggcacccaccagcagctgctggcccagaagggcatctacttcagcatggtgagcgtgcaggccggcacccagaacctgtag

SEQ ID NO: 1772 - DNA, 3840 bp, synthetic construct
  misc_feature 1..3840: note = source = /note="Description of Artificial Sequence: Synthetic coding sequence"
  source 1..3840: mol_type = other DNA
atggacctggaggccgccaagaacggcaccgcctggagacccaccagcgccgagggcgacttcgagctgggcatcagcagcaagcagaagagaaagaagaccaagaccgtgaagatgatcggcgtgctgaccctgttcagatacagcgactggcaggacaagctgttcatgagcctgggcaccatcatggccatcgcccacggcagcggcctgcccctgatgatgatcgtgttcggcgagatgaccgacaagttcgtggacaccgccggcaacttcagcttccccgtgaacttcagcctgagcctgctgaaccccggcaagatcctggaggaggagatgaccagatacgcctactactacagcggcctgggcgccggcgtgctggtggccgcctacatccaggtgagcttctggaccctggccgccggcagacagatcagaaagatcagacagaagttcttccacgccatcctgagacaggagatcggctggttcgacatcaacgacaccaccgagctgaacaccagactgaccgacgacatcagcaagatcagcgagggcatcggcgacaaggtgggcatgttcttccaggccgtggccaccttcttcgccggcttcatcgtgggcttcatcagaggctggaagctgaccctggtgatcatggccatcagccccatcctgggcctgagcgccgccgtgtgggccaagatcctgagcgccttcagcgacaaggagctggccgcctacgccaaggccggcgccgtggccgaggaggccctgggcgccatcagaaccgtgatcgccttcggcggccagaacaaggagctggagagataccagaagcacctggagaacgccaaggagatcggcatcaagaaggccatcagcgccaacatcagcatgggcatcgccttcctgctgatctacgccagctacgccctggccttctggtacggcagcaccctggtgatcagcaaggagtacaccatcggcaacgccatgaccgtgttcttcagcatcctgatcggcgccttcagcgtgggccaggccgccccctgcatcgacgccttcgccaacgccagaggcgccgcctacgtgatcttcgacatcatcgacaacaaccccaagatcgacagcttcagcgagagaggccacaagcccgacagcatcaagggcaacctggagttcaacgacgtgcacttcagctaccccagcagagccaacgtgaagatcctgaagggcctgaacctgaaggtgcagagcggccagaccgtggccctggtgggcagcagcggctgcggcaagagcaccaccgtgcagctgatccagagactgtacgaccccgacgagggcaccatcaacatcgacggccaggacatcagaaacttcaacgtgaactacctgagagagatcatcggcgtggtgagccaggagcccgtgctgttcagcaccaccatcgccgagaacatctgctacggcagaggcaacgtgaccatggacgagatcaagaaggccgtgaaggaggccaacgcctacgagttcatcatgaagctgccccagaagttcgacaccctggtgggcgagagaggcgcccagctgagcggcggccagaagcagagaatcgccatcgccagagccctggtgagaaaccccaagatcctgctgctggacgaggccaccagcgccctggacaccgagagcgaggccgaggtgcaggccgccctggacaaggccagagagggcagaaccaccatcgtgatcgcccacagactgagcaccgtgagaaacgccgacgtgatcgccggcttcgaggacggcgtgatcgtggagcagggcagccacagcgagctgatgaagaaggagggcgtgtacttcaagctggtgaacatgcagaccagcggcagccagatccagagcgaggagttcgagctgaacgacgagaaggccgccaccagaatggcccccaacggctggaagagcagactgttcagacacagcacccagaagaacctgaagaacagccagatgtgccagaagagcctggacgtggagaccgacggcctggaggccaacgtgccccccgtgagcttcctgaaggtgctgaagctgaacaagaccgagtggccctacttcgtggtgggcaccgtgtgcgccatcgccaacggcggcctgcagcccgccttcagcgtgatcttcagcgagatcatcgccatcttcggccccggcgacgacgccgtgaagcagcagaagtgcaacatcttcagcctgatcttcctgttcctgggcatcatcagcttcttcaccttcttcctgcagggcttcaccttcggcaaggccggcgagatcctgaccagaagactgagaagcatggccttcaaggccatgctgagacaggacatgagctggttcgacgaccacaagaacagcaccggcgccctgagcaccagactggccaccgacgccgcccaggtgcagggcgccaccggcaccagactggccctgatcgcccagaacatcgccaacctgggcaccggcatcatcatcagcttcatctacggctggcagctgaccctgctgctgctggccgtggtgcccatcatcgccgtgagcggcatcgtggagatgaagctgctggccggcaacgccaagagagacaagaaggagctggaggccgccggcaagatcgccaccgaggccatcgagaacatcagaaccgtggtgagcctgacccaggagagaaagttcgagagcatgtacgtggagaagctgtacggcccctacagaaacagcgtgcagaaggcccacatctacggcatcaccttcagcatcagccaggccttcatgtacttcagctacgccggctgcttcagattcggcgcctacctgatcgtgaacggccacatgagattcagagacgtgatcctggtgttcagcgccatcgtgttcggcgccgtggccctgggccacgccagcagcttcgcccccgactacgccaaggccaagctgagcgccgcccacctgttcatgctgttcgagagacagcccctgatcgacagctacagcgaggagggcctgaagcccgacaagttcgagggcaacatcaccttcaacgaggtggtgttcaactaccccaccagagccaacgtgcccgtgctgcagggcctgagcctggaggtgaagaagggccagaccctggccctggtgggcagcagcggctgcggcaagagcaccgtggtgcagctgctggagagattctacgaccccctggccggcaccgtgctgctggacggccaggaggccaagaagctgaacgtgcagtggctgagagcccagctgggcatcgtgagccaggagcccatcctgttcgactgcagcatcgccgagaacatcgcctacggcgacaacagcagagtggtgagccaggacgagatcgtgagcgccgccaaggccgccaacatccaccccttcatcgagaccctgccccacaagtacgagaccagagtgggcgacaagggcacccagctgagcggcggccagaagcagagaatcgccatcgccagagccctgatcagacagccccagatcctgctgctggacgaggccaccagcgccctggacaccgagagcgagaaggtggtgcaggaggccctggacaaggccagagagggcagaacctgcatcgtgatcgcccacagactgagcaccatccagaacgccgacctgatcgtggtgttccagaacggcagagtgaaggagcacggcacccaccagcagctgctggcccagaagggcatctacttcagcatggtgagcgtgcaggccggcacccagaacctgtag

SEQ ID NO: 1773 - DNA, 186 bp, synthetic construct
  misc_feature 1..186: note = source = /note="Description of Artificial Sequence: Synthetic coding sequence"
  source 1..186: mol_type = other DNA
atggacctggaggccgccaagaacggcaccgcctggagacccaccagcgccgagggcgacttcgagctgggcatcagcagcaagcagaagagaaagaagaccaagaccgtgaagatgatcggcgtgctgaccctgttcagatacagcgactggcaggacaagctgttcatgagcctgggcacctag

SEQ ID NO: 1774 - DNA, 3699 bp, synthetic construct; identical to SEQ ID NO: 1771
  misc_feature 1..3699: note = source = /note="Description of Artificial Sequence: Synthetic coding sequence"
  source 1..3699: mol_type = other DNA

SEQ ID NO: 1775 - DNA, 3840 bp, synthetic construct; identical to SEQ ID NO: 1772
  misc_feature 1..3840: note = source = /note="Description of Artificial Sequence: Synthetic coding sequence"
  source 1..3840: mol_type = other DNA

SEQ ID NO: 1776 - DNA, 1464 bp, synthetic construct
  misc_feature 1..1464: note = source = /note="Description of Artificial Sequence: Synthetic coding sequence"
  source 1..1464: mol_type = other DNA
atgagagagaacatggccagaggcccctgcaacgcccccagatgggccagcctgatggtgctggtggccatcggcaccgccgtgaccgccgccgtgaaccccggcgtggtggtgagaatcagccagaagggcctggactacgccagccagcagggcaccgccgccctgcagaaggagctgaagagaatcaagatccccgactacagcgacagcttcaagatcaagcacctgggcaagggccactacagcttctacagcatggacatcagagagttccagctgcccagcagccagatcagcatggtgcccaacgtgggcctgaagttcagcatcagcaacgccaacatcaagatcagcggcaagtggaaggcccagaagagattcctgaagatgagcggcaacttcgacctgagcatcgagggcatgagcatcagcgccgacctgaagctgggcagcaaccccaccagcggcaagcccaccatcacctgcagcagctgcagcagccacatcaacagcgtgcacgtgcacatcagcaagagcaaggtgggctggctgatccagctgttccacaagaagatcgagagcgccctgagaaacaagatgaacagccaggtgtgcgagaaggtgaccaacagcgtgagcagcgagctgcagccctacttccagaccctgcccgtgatgaccaagatcgacagcgtggccggcatcaactacggcctggtggccccccccgccaccaccgccgagaccctggacgtgcagatgaagggcgagttctacagcgagaaccaccacaaccccccccccttcgccccccccgtgatggagttccccgccgcccacgacagaatggtgtacctgggcctgagcgactacttcttcaacaccgccggcctggtgtaccaggaggccggcgtgctgaagatgaccctgagagacgacatgatccccaaggagagcaagttcagactgaccaccaagttcttcggcaccttcctgcccgaggtggccaagaagttccccaacatgaagatccagatccacgtgagcgccagcacccccccccacctgagcgtgcagcccaccggcctgaccttctaccccgccgtggacgtgcaggccttcgccgtgctgcccaacagcagcctggccagcctgttcctgatcggcatgcacaccaccggcagcatggaggtgagcgccgagagcaacagactggtgggcgagctgaagctggacagactgctgctggagctgaagcacagcaacatcggccccttccccgtggagctgctgcaggacatcatgaactacatcgtgcccatcctggtgctgcccagagtgaacgagaagctgcagaagggcttccccctgcccacccccgccagagtgcagctgtacaacgtggtgctgcagccccaccagaacttcctgctgttcggcgccgacgtggtgtacaagtag

SEQ ID NO: 1777 - DNA, 1449 bp, synthetic construct
  misc_feature 1..1449: note = source = /note="Description of Artificial Sequence: Synthetic coding sequence"
  source 1..1449: mol_type = other DNA
atggacgagggcatcccccacctgcaggagagacagctgctggagcacagagacttcatcggcctggactacagcagcctgtacatgtgcaagcccaagagaagcatgaagagagacgacaccaaggacacctacaagctgccccacagactgatcgagaagaagagaagagacagaatcaacgagtgcatcgcccagctgaaggacctgctgcccgagcacctgaagctgaccaccctgggccacctggagaaggccgtggtgctggagctgaccctgaagcacctgaaggccctgaccgccctgaccgagcagcagcaccagaagatcatcgccctgcagaacggcgagagaagcctgaagagccccatccagagcgacctggacgccttccacagcggcttccagacctgcgccaaggaggtgctgcagtacctgagcagattcgagagctggacccccagagagcccagatgcgtgcagctgatcaaccacctgcacgccgtggccacccagttcctgcccaccccccagctgctgacccagcaggtgcccctgagcaagggcaccggcgcccccagcgccgccggcagcgccgccgccccctgcctggagagagccggccagaagctggagcccctggcctactgcgtgcccgtgatccagagaacccagcccagcgccgagctggccgccgagaacgacaccgacaccgacagcggctacggcggcgaggccgaggccagacccgacagagagaagggcaagggcgccggcgccagcagagtgaccatcaagcaggagccccccggcgaggacagccccgcccccaagagaatgaagctggacagcagaggcggcggcagcggcggcggccccggcggcggcgccgccgccgccgccgccgccctgctgggccccgaccccgccgccgccgccgccctgctgagacccgacgccgccctgctgagcagcctggtggccttcggcggcggcggcggcgcccccttcccccagcccgccgccgccgccgcccccttctgcctgcccttctgcttcctgagccccagcgccgccgccgcctacgtgcagcccttcctggacaagagcggcctggagaagtacctgtaccccgccgccgccgccgcccccttccccctgctgtaccccggcatccccgcccccgccgccgccgccgccgccgccgccgccgccgccgccgccgccgccgccttcccctgcctgagcagcgtgctgagccccccccccgagaaggccggcgccgccgccgccaccctgctgccccacgaggtggcccccctgggcgccccccacccccagcacccccacggcagaacccacctgcccttcgccggccccagagagcccggcaaccccgagagcagcgcccaggaggaccccagccagcccggcaaggaggccccctag

SEQ ID NO: 1778 - DNA, 1113 bp, synthetic construct
  misc_feature 1..1113: note = source = /note="Description of Artificial Sequence: Synthetic coding sequence"
  source 1..1113: mol_type = other DNA
atggacgagggcatcccccacctgcaggagagacagctgctggagcacagagacttcatcggcctggactacagcagcctgtacatgtgcaagcccaagagaagcatgaagagagacgacaccaaggacacctacaagctgccccacagactgatcgagaagaagagaagagacagaatcaacgagtgcatcgcccagctgaaggacctgctgcccgagcacctgaagctgaccaccctgggccacctggagaaggccgtggtgctggagctgaccctgaagcacctgaaggccctgaccgccctgaccgagcagcagcaccagaagatcatcgccctgcagaacggcgagagaagcctgaagagccccatccagagcgacctggacgccttccacagcggcttccagacctgcgccaaggaggtgctgcagtacctgagcagattcgagagctggacccccagagagcccagatgcgtgcagctgatcaaccacctgcacgccgtggccacccagttcctgcccaccccccagctgctgacccagcaggtgcccctgagcaagggcaccggcgcccccagcgccgccggcagcgccgccgccccctgcctggagagagccggccagaagctggagcccctggcctactgcgtgcccgtgatccagagaacccagcccagcgccgagctggccgccgagaacgacaccgacaccgacagcggctacggcggcgaggccgaggccagacccgacagagagaagggcaagggcgccggcgccagcagagtgaccatcaagcaggagccccccggcgaggacagccccccccccccccccagaagccccgcctgccccagatgctgcagacccctgcccagaagaagagcccccccccccagacccagctgcagaaccagatggagacccctgggcagaagaacccccagcaccagaaccgccgcccccacctgccccagccccggccccgccagcagaggcaccagaagagccctgctgagaaagatccccagaagccaggagagaaagctgcccgagagcctgagacccgagggcagaagattcaagcagagcgagaagctgaagtacccctag

SEQ ID NO: 1779 - DNA, 1191 bp, synthetic construct
  misc_feature 1..1191: note = source = /note="Description of Artificial Sequence: Synthetic coding sequence"
  source 1..1191: mol_type = other DNA
atggtggccggcaccagatgcctgctggccctgctgctgccccaggtgctgctgggcggcgccgccggcctggtgcccgagctgggcagaagaaagttcgccgccgccagcagcggcagacccagcagccagcccagcgacgaggtgctgagcgagttcgagctgagactgctgagcatgttcggcctgaagcagagacccacccccagcagagacgccgtggtgcccccctacatgctggacctgtacagaagacacagcggccagcccggcagccccgcccccgaccacagactggagagagccgccagcagagccaacaccgtgagaagcttccaccacgaggagagcctggaggagctgcccgagaccagcggcaagaccaccagaagattcttcttcaacctgagcagcatccccaccgaggagttcatcaccagcgccgagctgcaggtgttcagagagcagatgcaggacgccctgggcaacaacagcagcttccaccacagaatcaacatctacgagatcatcaagcccgccaccgccaacagcaagttccccgtgaccagactgctggacaccagactggtgaaccagaacgccagcagatgggagagcttcgacgtgacccccgccgtgatgagatggaccgcccagggccacgccaaccacggcttcgtggtggaggtggcccacctggaggagaagcagggcgtgagcaagagacacgtgagaatcagcagaagcctgcaccaggacgagcacagctggagccagatcagacccctgctggtgaccttcggccacgacggcaagggccaccccctgcacaagagagagaagagacaggccaagcacaagcagagaaagagactgaagagcagctgcaagagacaccccctgtacgtggacttcagcgacgtgggctggaacgactggatcgtggccccccccggctaccacgccttctactgccacggcgagtgccccttccccctggccgaccacctgaacagcaccaaccacgccatcgtgcagaccctggtgaacagcgtgaacagcaagatccccaaggcctgctgcgtgcccaccgagctgagcgccatcagcatgctgtacctggacgagaacgagaaggtggtgctgaagaactaccaggacatggtggtggagggctgcggctgcagatag

SEQ ID NO: 1780 - DNA, 1296 bp, synthetic construct
  misc_feature 1..1296: note = source = /note="Description of Artificial Sequence: Synthetic coding sequence"
  source 1..1296: mol_type = other DNA
atgcacgtgagaagcctgagagccgccgccccccacagcttcgtggccctgtgggcccccctgttcctgctgagaagcgccctggccgacttcagcctggacaacgaggtgcacagcagcttcatccacagaagactgagaagccaggagagaagagagatgcagagagagatcctgagcatcctgggcctgccccacagacccagaccccacctgcagggcaagcacaacagcgcccccatgttcatgctggacctgtacaacgccatggccgtggaggagggcggcggccccggcggccagggcttcagctacccctacaaggccgtgttcagcacccagggcccccccctggccagcctgcaggacagccacttcctgaccgacgccgacatggtgatgagcttcgtgaacctggtggagcacgacaaggagttcttccaccccagataccaccacagagagttcagattcgacctgagcaagatccccgagggcgaggccgtgaccgccgccgagttcagaatctacaaggactacatcagagagagattcgacaacgagaccttcagaatcagcgtgtaccaggtgctgcaggagcacctgggcagagagagcgacctgttcctgctggacagcagaaccctgtgggccagcgaggagggctggctggtgttcgacatcaccgccaccagcaaccactgggtggtgaaccccagacacaacctgggcctgcagctgagcgtggagaccctggacggccagagcatcaaccccaagctggccggcctgatcggcagacacggcccccagaacaagcagcccttcatggtggccttcttcaaggccaccgaggtgcacttcagaagcatcagaagcaccggcagcaagcagagaagccagaacagaagcaagacccccaagaaccaggaggccctgagaatggccaacgtggccgagaacagcagcagcgaccagagacaggcctgcaagaagcacgagctgtacgtgagcttcagagacctgggctggcaggactggatcatcgcccccgagggctacgccgcctactactgcgagggcgagtgcgccttccccctgaacagctacatgaacgccaccaaccacgccatcgtgcagaccctggtgcacttcatcaaccccgagaccgtgcccaagccctgctgcgcccccacccagctgaacgccatcagcgtgctgtacttcgacgacagcagcaacgtgatcctgaagaagtacagaaacatggtggtgagagcctgcggctgccactag

SEQ ID NO: 1781 - DNA, 1098 bp, synthetic construct
  misc_feature 1..1098: note = source = /note="Description of Artificial Sequence: Synthetic coding sequence"
  source 1..1098: mol_type = other DNA
atgcacgtgagaagcctgagagccgccgccccccacagcttcgtggccctgtgggcccccctgttcctgctgagaagcgccctggccgacttcagcctggacaacgaggtgcacagcagcttcatccacagaagactgagaagccaggagagaagagagatgcagagagagatcctgagcatcctgggcctgccccacagacccagaccccacctgcagggcaagcacaacagcgcccccatgttcatgctggacctgtacaacgccatggccgtggaggagggcggcggccccggcggccagggcttcagctacccctacaaggccgtgttcagcacccagggcccccccctggccagcctgcaggacagccacttcctgaccgacgccgacatggtgatgagcttcgtgaacctggtggagcacgacaaggagttcttccaccccagataccaccacagagagttcagattcgacctgagcaagatccccgagggcgaggccgtgaccgccgccgagttcagaatctacaaggactacatcagagagagattcgacaacgagaccttcagaatcagcgtgtaccaggtgctgcaggagcacctgggcagagagagcgacctgttcctgctggacagcagaaccctgtgggccagcgaggagggctggctggtgttcgacatcaccgccaccagcaaccactgggtggtgaaccccagacacaacctgggcctgcagctgagcgtggagaccctggacgagaacagcagcagcgaccagagacaggcctgcaagaagcacgagctgtacgtgagcttcagagacctgggctggcaggactggatcatcgcccccgagggctacgccgcctactactgcgagggcgagtgcgccttccccctgaacagctacatgaacgccaccaaccacgccatcgtgcagaccctggtgcacttcatcaaccccgagaccgtgcccaagccctgctgcgcccccacccagctgaacgccatcagcgtgctgtacttcgacgacagcagcaacgtgatcctgaagaagtacagaaacatggtggtgagagcctgcggctgccactag

SEQ ID NO: 1782 - DNA, 1656 bp, synthetic construct
  misc_feature 1..1656: note = source = /note="Description of Artificial Sequence: Synthetic coding sequence"
  source 1..1656: mol_type = other DNA
atggccggcgacctgagcgccggcttcttcatggaggagctgaacacctacagacagaagcagggcgtggtgctgaagtaccaggagctgcccaacagcggccccccccacgacagaagattcaccttccaggtgatcatcgacggcagagagttccccgagggcgagggcagaagcaagaaggaggccaagaacgccgccgccaagctggccgtggagatcctgaacaaggagaagaaggccgtgagccccctgctgctgaccaccaccaacagcagcgagggcctgagcatgggcaactacatcggcctgatcaacagaatcgcccagaagaagagactgaccgtgaactacgagcagtgcgccagcggcgtgcacggccccgagggcttccactacaagtgcaagatgggccagaaggagtacagcatcggcaccggcagcaccaagcaggaggccaagcagctggccgccaagctggcctacctgcagatcctgagcgaggagaccagcgtgaagagcgactacctgagcagcggcagcttcgccaccacctgcgagagccagagcaacagcctggtgaccagcaccctggccagcgagagcagcagcgagggcgacttcagcgccgacaccagcgagatcaacagcaacagcgacagcctgaacagcagcagcctgctgatgaacggcctgagaaacaaccagagaaaggccaagagaagcctggcccccagattcgacctgcccgacatgaaggagaccaagtacaccgtggacaagagattcggcatggacttcaaggagatcgagctgatcggcagcggcggcttcggccaggtgttcaaggccaagcacagaatcgacggcaagacctacgtgatcaagagagtgaagtacaacaacgagaaggccgagagagaggtgaaggccctggccaagctggaccacgtgaacatcgtgcactacaacggctgctgggacggcttcgactacgaccccgagaccagcgacgacagcctggagagcagcgactacgaccccgagaacagcaagaacagcagcagaagcaagaccaagtgcctgttcatccagatggagttctgcgacaagggcaccctggagcagtggatcgagaagagaagaggcgagaagctggacaaggtgctggccctggagctgttcgagcagatcaccaagggcgtggactacatccacagcaagaagctgatccacagagacctgaagcccagcaacatcttcctggtggacaccaagcaggtgaagatcggcgacttcggcctggtgaccagcctgaagaacgacggcaagagaaccagaagcaagggcaccctgagatacatgagccccgagcagatcagcagccaggactacggcaaggaggtggacctgtacgccctgggcctgatcctggccgagctgctgcacgtgtgcgacaccgccttcgagaccagcaagttcttcaccgacctgagagacggcatcatcagcgacatcttcgacaagaaggagaagaccctgctgcagaagctgctgagcaagaagcccgaggacagacccaacaccagcgagatcctgagaaccctgaccgtgtggaagaagagccccgagaagaacgagagacacacctgctag

SEQ ID NO: 1783 - DNA, 366 bp, synthetic construct
  misc_feature 1..366: note = source = /note="Description of Artificial Sequence: Synthetic coding sequence"
  source 1..366: mol_type = other DNA
atgaccagaatcctgaccgccttcaaggtggtgagaaccctgaagaccggcttcggcttcaccaacgtgaccgcccaccagaagtggaagttcagcagacccggcatcagactgctgagcgtgaaggcccagaccgcccacatcgtgctggaggacggcaccaagatgaagggctacagcttcggccaccccagcagcgtggccggcgaggtggtgttcaacaccggcctgggcggctaccccgaggccatcaccgaccccgcctacaagggccagatcctgaccatggccaaccccatcatcggcaacggcggcgcccccgacaccaccgccctggacgagctgggcctgagcaagtacctgtag

SEQ ID NO: 1784 - DNA, 4521 bp, synthetic construct
  misc_feature 1..4521: note = source = /note="Description of Artificial Sequence: Synthetic coding sequence"
  source 1..4521: mol_type = other DNA
atgccccagatcatcaagatgaccagaatcctgaccgccttcaaggtggtgagaaccctgaagaccggcttcggcttcaccaacgtgaccgcccaccagaagtggaagttcagcagacccggcatcagactgctgagcgtgaaggcccagaccgcccacatcgtgctggaggacggcaccaagatgaagggctacagcttcggccaccccagcagcgtggccggcgaggtggtgttcaacaccggcctgggcggctaccccgaggccatcaccgaccccgcctacaagggccagatcctgaccatggccaaccccatcatcggcaacggcggcgcccccgacaccaccgccctggacgagctgggcctgagcaagtacctggagagcaacggcatcaaggtgagcggcctgctggtgctggactacagcaaggactacaaccactggctggccaccaagagcctgggccagtggctgcaggaggagaaggtgcccgccatctacggcgtggacaccagaatgctgaccaagatcatcagagacaagggcaccatgctgggcaagatcgagttcgagggccagcccgtggacttcgtggaccccaacaagcagaacctgatcgccgaggtgagcaccaaggacgtgaaggtgtacggcaagggcaaccccaccaaggtggtggccgtggactgcggcatcaagaacaacgtgatcagactgctggtgaagagaggcgccgaggtgcacctggtgccctggaaccacgacttcaccaagatggagtacgacggcatcctgatcgccggcggccccggcaaccccgccctggccgagcccctgatccagaacgtgagaaagatcctggagagcgacagaaaggagcccctgttcggcatcagcaccggcaacctgatcaccggcctggccgccggcgccaagacctacaagatgagcatggccaacagaggccagaaccagcccgtgctgaacatcaccaacaagcaggccttcatcaccgcccagaaccacggctacgccctggacaacaccctgcccgccggctggaagcccctgttcgtgaacgtgaacgaccagaccaacgagggcatcatgcacgagagcaagcccttcttcgccgtgcagttccaccccgaggtgacccccggccccatcgacaccgagtacctgttcgacagcttcttcagcctgatcaagaagggcaaggccaccaccatcaccagcgtgctgcccaagcccgccctggtggccagcagagtggaggtgagcaaggtgctgatcctgggcagcggcggcctgagcatcggccaggccggcgagttcgactacagcggcagccaggccgtgaaggccatgaaggaggagaacgtgaagaccgtgctgatgaaccccaacatcgccagcgtgcagaccaacgaggtgggcctgaagcaggccgacaccgtgtacttcctgcccatcaccccccagttcgtgaccgaggtgatcaaggccgagcagcccgacggcctgatcctgggcatgggcggccagaccgccctgaactgcggcgtggagctgttcaagagaggcgtgctgaaggagtacggcgtgaaggtgctgggcaccagcgtggagagcatcatggccaccgaggacagacagctgttcagcgacaagctgaacgagatcaacgagaagatcgcccccagcttcgccgtggagagcatcgaggacgccctgaaggccgccgacaccatcggctaccccgtgatgatcagaagcgcctacgccctgggcggcctgggcagcggcatctgccccaacagagagaccctgatggacctgagcaccaaggccttcgccatgaccaaccagatcctggtggagaagagcgtgaccggctggaaggagatcgagtacgaggtggtgagagacgccgacgacaactgcgtgaccgtgtgcaacatggagaacgtggacgccatgggcgtgcacaccggcgacagcgtggtggtggcccccgcccagaccctgagcaacgccgagttccagatgctgagaagaaccagcatcaacgtggtgagacacctgggcatcgtgggcgagtgcaacatccagttcgccctgcaccccaccagcatggagtactgcatcatcgaggtgaacgccagactgagcagaagcagcgccctggccagcaaggccaccggctaccccctggccttcatcgccgccaagatcgccctgggcatccccctgcccgagatcaagaacgtggtgagcggcaagaccagcgcctgcttcgagcccagcctggactacatggtgaccaagatccccagatgggacctggacagattccacggcaccagcagcagaatcggcagcagcatgaagagcgtgggcgaggtgatggccatcggcagaaccttcgaggagagcttccagaaggccctgagaatgtgccaccccagcatcgagggcttcacccccagactgcccatgaacaaggagtggcccagcaacctggacctgagaaaggagctgagcgagcccagcagcaccagaatctacgccatcgccaaggccatcgacgacaacatgagcctggacgagatcgagaagctgacctacatcgacaagtggttcctgtacaagatgagagacatcctgaacatggagaagaccctgaagggcctgaacagcgagagcatgaccgaggagaccctgaagagagccaaggagatcggcttcagcgacaagcagatcagcaagtgcctgggcctgaccgaggcccagaccagagagctgagactgaagaagaacatccacccctgggtgaagcagatcgacaccctggccgccgagtaccccagcgtgaccaactacctgtacgtgacctacaacggccaggagcacgacgtgaacttcgacgaccacggcatgatggtgctgggctgcggcccctaccacatcggcagcagcgtggagttcgactggtgcgccgtgagcagcatcagaaccctgagacagctgggcaagaagaccgtggtggtgaactgcaaccccgagaccgtgagcaccgacttcgacgagtgcgacaagctgtacttcgaggagctgagcctggagagaatcctggacatctaccaccaggaggcctgcggcggctgcatcatcagcgtgggcggccagatccccaacaacctggccgtgcccctgtacaagaacggcgtgaagatcatgggcaccagccccctgcagatcgacagagccgaggacagaagcatcttcagcgccgtgctggacgagctgaaggtggcccaggccccctggaaggccgtgaacaccctgaacgaggccctggagttcgccaagagcgtggactacccctgcctgctgagacccagctacgtgctgagcggcagcgccatgaacgtggtgttcagcgaggacgagatgaagaagttcctggaggaggccaccagagtgagccaggagcaccccgtggtgctgaccaagttcgtggagggcgccagagaggtggagatggacgccgtgggcaaggacggcagagtgatcagccacgccatcagcgagcacgtggaggacgccggcgtgcacagcggcgacgccaccctgatgctgcccacccagaccatcagccagggcgccatcgagaaggtgaaggacgccaccagaaagatcgccaaggccttcgccatcagcggccccttcaacgtgcagttcctggtgaagggcaacgacgtgctggtgatcgagtgcaacctgagagccagcagaagcttccccttcgtgagcaagaccctgggcgtggacttcatcgacgtggccaccaaggtgatgatcggcgagaacgtggacgagaagcacctgcccaccctggaccaccccatcatccccgccgactacgtggccatcaaggcccccatgttcagctggcccagactgagagacgccgaccccatcctgagatgcgagatggccagcaccggcgaggtggcctgcttcggcgagggcatccacaccgccttcctgaaggccatgctgagcaccggcttcaagatcccccagaagggcatcctgatcggcatccagcagagcttcagacccagattcctgggcgtggccgagcagctgcacaacgagggcttcaagctgttcgccaccgaggccaccagcgactggctgaacgccaacaacgtgcccgccacccccgtggcctggcccagccaggagggccagaaccccagcctgagcagcatcagaaagctgatcagagacggcagcatcgacctggtgatcaacctgcccaacaacaacaccaagttcgtgcacgacaactacgtgatcagaagaaccgccgtggacagcggcatccccctgctgaccaacttccaggtgaccaagctgttcgccgaggccgtgcagaagagcagaaaggtggacagcaagagcctgttccactacagacagtacagcgccggcaaggccgcctag

SEQ ID NO: 1785 - DNA, 3150 bp, synthetic construct
  misc_feature 1..3150: note = source = /note="Description of Artificial Sequence: Synthetic coding sequence"
  source 1..3150: mol_type = other DNA
atgaaggaggagaacgtgaagaccgtgctgatgaaccccaacatcgccagcgtgcagaccaacgaggtgggcctgaagcaggccgacaccgtgtacttcctgcccatcaccccccagttcgtgaccgaggtgatcaaggccgagcagcccgacggcctgatcctgggcatgggcggccagaccgccctgaactgcggcgtggagctgttcaagagaggcgtgctgaaggagtacggcgtgaaggtgctgggcaccagcgtggagagcatcatggccaccgaggacagacagctgttcagcgacaagctgaacgagatcaacgagaagatcgcccccagcttcgccgtggagagcatcgaggacgccctgaaggccgccgacaccatcggctaccccgtgatgatcagaagcgcctacgccctgggcggcctgggcagcggcatctgccccaacagagagaccctgatggacctgagcaccaaggccttcgccatgaccaaccagatcctggtggagaagagcgtgaccggctggaaggagatcgagtacgaggtggtgagagacgccgacgacaactgcgtgaccgtgtgcaacatggagaacgtggacgccatgggcgtgcacaccggcgacagcgtggtggtggcccccgcccagaccctgagcaacgccgagttccagatgctgagaagaaccagcatcaacgtggtgagacacctgggcatcgtgggcgagtgcaacatccagttcgccctgcaccccaccagcatggagtactgcatcatcgaggtgaacgccagactgagcagaagcagcgccctggccagcaaggccaccggctaccccctggccttcatcgccgccaagatcgccctgggcatccccctgcccgagatcaagaacgtggtgagcggcaagaccagcgcctgcttcgagcccagcctggactacatggtgaccaagatccccagatgggacctggacagattccacggcaccagcagcagaatcggcagcagcatgaagagcgtgggcgaggtgatggccatcggcagaaccttcgaggagagcttccagaaggccctgagaatgtgccaccccagcatcgagggcttcacccccagactgcccatgaacaaggagtggcccagcaacctggacctgagaaaggagctgagcgagcccagcagcaccagaatctacgccatcgccaaggccatcgacgacaacatgagcctggacgagatcgagaagctgacctacatcgacaagtggttcctgtacaagatgagagacatcctgaacatggagaagaccctgaagggcctgaacagcgagagcatgaccgaggagaccctgaagagagccaaggagatcggcttcagcgacaagcagatcagcaagtgcctgggcctgaccgaggcccagaccagagagctgagactgaagaagaacatccacccctgggtgaagcagatcgacaccctggccgccgagtaccccagcgtgaccaactacctgtacgtgacctacaacggccaggagcacgacgtgaacttcgacgaccacggcatgatggtgctgggctgcggcccctaccacatcggcagcagcgtggagttcgactggtgcgccgtgagcagcatcagaaccctgagacagctgggcaagaagaccgtggtggtgaactgcaaccccgagaccgtgagcaccgacttcgacgagtgcgacaagctgtacttcgaggagctgagcctggagagaatcctggacatctaccaccaggaggcctgcggcggctgcatcatcagcgtgggcggccagatccccaacaacctggccgtgcccctgtacaagaacggcgtgaagatcatgggcaccagccccctgcagatcgacagagccgaggacagaagcatcttcagcgccgtgctggacgagctgaaggtggcccaggccccctggaaggccgtgaacaccctgaacgaggccctggagttcgccaagagcgtggactacccctgcctgctgagacccagctacgtgctgagcggcagcgccatgaacgtggtgttcagcgaggacgagatgaagaagttcctggaggaggccaccagagtgagccaggagcaccccgtggtgctgaccaagttcgtggagggcgccagagaggtggagatggacgccgtgggcaaggacggcagagtgatcagccacgccatcagcgagcacgtggaggacgccggcgtgcacagcggcgacgccaccctgatgctgcccacccagaccatcagccagggcgccatcgagaaggtgaaggacgccaccagaaagatcgccaaggccttcgccatcagcggccccttcaacgtgcagttcctggtgaagggcaacgacgtgctggtgatcgagtgcaacctgagagccagcagaagcttccccttcgtgagcaagaccctgggcgtggacttcatcgacgtggccaccaaggtgatgatcggcgagaacgtggacgagaagcacctgcccaccctggaccaccccatcatccccgccgactacgtggccatcaaggcccccatgttcagctggcccagactgagagacgccgaccccatcctgagatgcgagatggccagcaccggcgaggtggcctgcttcggcgagggcatccacaccgccttcctgaaggccatgctgagcaccggcttcaagatcccccagaagggcatcctgatcggcatccagcagagcttcagacccagattcctgggcgtggccgagcagctgcacaacgagggcttcaagctgttcgccaccgaggccaccagcgactggctgaacgccaacaacgtgcccgccacccccgtggcctggcccagccaggagggccagaaccccagcctgagcagcatcagaaagctgatcagagacggcagcatcgacctggtgatcaacctgcccaacaacaacaccaagttcgtgcacgacaactacgtgatcagaagaaccgccgtggacagcggcatccccctgctgaccaacttccaggtgaccaagctgttcgccgaggccgtgcagaagagcagaaaggtggacagcaagagcctgttccactacagacagtacagcgccggcaaggccgcctag

SEQ ID NO: 1786 - DNA, 366 bp, synthetic construct; identical to SEQ ID NO: 1783
  misc_feature 1..366: note = source = /note="Description of Artificial Sequence: Synthetic coding sequence"
  source 1..366: mol_type = other DNA

SEQ ID NO: 1787 - DNA, 1542 bp, synthetic construct
  misc_feature 1..1542: note = source = /note="Description of Artificial Sequence: Synthetic coding sequence"
  source 1..1542: mol_type = other DNA
atgaccagaatcctgaccgccttcaaggtggtgagaaccctgaagaccggcttcggcttcaccaacgtgaccgcccaccagaagtggaagttcagcagacccggcatcagactgctgagcgtgaaggcccagaccgcccacatcgtgctggaggacggcaccaagatgaagggctacagcttcggccaccccagcagcgtggccggcgaggtggtgttcaacaccggcctgggcggctaccccgaggccatcaccgaccccgcctacaagggccagatcctgaccatggccaaccccatcatcggcaacggcggcgcccccgacaccaccgccctggacgagctgggcctgagcaagtacctggagagcaacggcatcaaggtgagcggcctgctggtgctggactacagcaaggactacaaccactggctggccaccaagagcctgggccagtggctgcaggaggagaaggtgcccgccatctacggcgtggacaccagaatgctgaccaagatcatcagagacaagggcaccatgctgggcaagatcgagttcgagggccagcccgtggacttcgtggaccccaacaagcagaacctgatcgccgaggtgagcaccaaggacgtgaaggtgtacggcaagggcaaccccaccaaggtggtggccgtggactgcggcatcaagaacaacgtgatcagactgctggtgaagagaggcgccgaggtgcacctggtgccctggaaccacgacttcaccaagatggagtacgacggcatcctgatcgccggcggccccggcaaccccgccctggccgagcccctgatccagaacgtgagaaagatcctggagagcgacagaaaggagcccctgttcggcatcagcaccggcaacctgatcaccggcctggccgccggcgccaagacctacaagatgagcatggccaacagaggccagaaccagcccgtgctgaacatcaccaacaagcaggccttcatcaccgcccagaaccacggctacgccctggacaacaccctgcccgccggctggaagcccctgttcgtgaacgtgaacgaccagaccaacgagggcatcatgcacgagagcaagcccttcttcgccgtgcagttccaccccgaggtgacccccggccccatcgacaccgagtacctgttcgacagcttcttcagcctgatcaagaagggcaaggccaccaccatcaccagcgtgctgcccaagcccgccctggtggccagcagagtggaggtgagcaaggtgctgatcctgggcagcggcggcctgagcatcggccaggccggcgagttcgactacagcggcagccaggccgtgaaggccatgaaggaggagaacgtgaagaccgtgctgatgaaccccaacatcgccagcgtgcagaccaacgaggtgggcctgaagcaggccgacaccgtgtacttcctgcccatcaccccccagttcgtgaccgaggtgatcaaggccgagcagcccgacggcctgatcctgggcatgggcgccagacagctgtag

SEQ ID NO: 1788 - DNA, 4527 bp, synthetic construct
  misc_feature 1..4527: note = source = /note="Description of Artificial Sequence: Synthetic coding sequence"
  source 1..4527: mol_type = other DNA
agacccagaccccagatcatcaagatgaccagaatcctgaccgccttcaaggtggtgagaaccctgaagaccggcttcggcttcaccaacgtgaccgcccaccagaagtggaagttcagcagacccggcatcagactgctgagcgtgaaggcccagaccgcccacatcgtgctggaggacggcaccaagatgaagggctacagcttcggccaccccagcagcgtggccggcgaggtggtgttcaacaccggcctgggcggctaccccgaggccatcaccgaccccgcctacaagggccagatcctgaccatggccaaccccatcatcggcaacggcggcgcccccgacaccaccgccctggacgagctgggcctgagcaagtacctggagagcaacggcatcaaggtgagcggcctgctggtgctggactacagcaaggactacaaccactggctggccaccaagagcctgggccagtggctgcaggaggagaaggtgcccgccatctacggcgtggacaccagaatgctgaccaagatcatcagagacaagggcaccatgctgggcaagatcgagttcgagggccagcccgtggacttcgtggaccccaacaagcagaacctgatcgccgaggtgagcaccaaggacgtgaaggtgtacggcaagggcaaccccaccaaggtggtggccgtggactgcggcatcaagaacaacgtgatcagactgctggtgaagagaggcgccgaggtgcacctggtgccctggaaccacgacttcaccaagatggagtacgacggcatcctgatcgccggcggccccggcaaccccgccctggccgagcccctgatccagaacgtgagaaagatcctggagagcgacagaaaggagcccctgttcggcatcagcaccggcaacctgatcaccggcctggccgccggcgccaagacctacaagatgagcatggccaacagaggccagaaccagcccgtgctgaacatcaccaacaagcaggccttcatcaccgcccagaaccacggctacgccctggacaacaccctgcccgccggctggaagcccctgttcgtgaacgtgaacgaccagaccaacgagggcatcatgcacgagagcaagcccttcttcgccgtgcagttccaccccgaggtgacccccggccccatcgacaccgagtacctgttcgacagcttcttcagcctgatcaagaagggcaaggccaccaccatcaccagcgtgctgcccaagcccgccctggtggccagcagagtggaggtgagcaaggtgctgatcctgggcagcggcggcctgagcatcggccaggccggcgagttcgactacagcggcagccaggccgtgaaggccatgaaggaggagaacgtgaagaccgtgctgatgaaccccaacatcgccagcgtgcagaccaacgaggtgggcctgaagcaggccgacaccgtgtacttcctgcccatcaccccccagttcgtgaccgaggtgatcaaggccgagcagcccgacggcctgatcctgggcatgggcggccagaccgccctgaactgcggcgtggagctgttcaagagaggcgtgctgaaggagtacggcgtgaaggtgctgggcaccagcgtggagagcatcatggccaccgaggacagacagctgttcagcgacaagctgaacgagatcaacgagaagatcgcccccagcttcgccgtggagagcatcgaggacgccctgaaggccgccgacaccatcggctaccccgtgatgatcagaagcgcctacgccctgggcggcctgggcagcggcatctgccccaacagagagaccctgatggacctgagcaccaaggccttcgccatgaccaaccagatcctggtggagaagagcgtgaccggctggaaggagatcgagtacgaggtggtgagagacgccgacgacaactgcgtgaccgtgtgcaacatggagaacgtggacgccatgggcgtgcacaccggcgacagcgtggtggtggcccccgcccagaccctgagcaacgccgagttccagatgctgagaagaaccagcatcaacgtggtgagacacctgggcatcgtgggcgagtgcaacatccagttcgccctgcaccccaccagcatggagtactgcatcatcgaggtgaacgccagactgagcagaagcagcgccctggccagcaaggccaccggctaccccctggccttcatcgccgccaagatcgccctgggcatccccctgcccgagatcaagaacgtggtgagcggcaagaccagcgcctgcttcgagcccagcctggactacatggtgaccaagatccccagatgggacctggacagattccacggcaccagcagcagaatcggcagcagcatgaagagcgtgggcgaggtgatggccatcggcagaaccttcgaggagagcttccagaaggccctgagaatgtgccaccccagcatcgagggcttcacccccagactgcccatgaacaaggagtggcccagcaacctggacctgagaaaggagctgagcgagcccagcagcaccagaatctacgccatcgccaaggccatcgacgacaacatgagcctggacgagatcgagaagctgacctacatcgacaagtggttcctgtacaagatgagagacatcctgaacatggagaagaccctgaagggcctgaacagcgagagcatgaccgaggagaccctgaagagagccaaggagatcggcttcagcgacaagcagatcagcaagtgcctgggcctgaccgaggcccagaccagagagctgagactgaagaagaacatccacccctgggtgaagcagatcgacaccctggccgccgagtaccccagcgtgaccaactacctgtacgtgacctacaacggccaggagcacgacgtgaacttcgacgaccacggcatgatggtgctgggctgcggcccctaccacatcggcagcagcgtggagttcgactggtgcgccgtgagcagcatcagaaccctgagacagctgggcaagaagaccgtggtggtgaactgcaaccccgagaccgtgagcaccgacttcgacgagtgcgacaagctgtacttcgaggagctgagcctggagagaatcctggacatctaccaccaggaggcctgcggcggctgcatcatcagcgtgggcggccagatccccaacaacctggccgtgcccctgtacaagaacggcgtgaagatcatgggcaccagccccctgcagatcgacagagccgaggacagaagcatcttcagcgccgtgctggacgagctgaaggtggcccaggccccctggaaggccgtgaacaccctgaacgaggccctggagttcgccaagagcgtggactacccctgcctgctgagacccagctacgtgctgagcggcagcgccatgaacgtggtgttcagcgaggacgagatgaagaagttcctggaggaggccaccagagtgagccaggagcaccccgtggtgctgaccaagttcgtggagggcgccagagaggtggagatggacgccgtgggcaaggacggcagagtgatcagccacgccatcagcgagcacgtggaggacgccggcgtgcacagcggcgacgccaccctgatgctgcccacccagaccatcagccagggcgccatcgagaaggtgaaggacgccaccagaaagatcgccaaggccttcgccatcagcggccccttcaacgtgcagttcctggtgaagggcaacgacgtgctggtgatcgagtgcaacctgagagccagcagaagcttccccttcgtgagcaagaccctgggcgtggacttcatcgacgtggccaccaaggtgatgatcggcgagaacgtggacgagaagcacctgcccaccctggaccaccccatcatccccgccgactacgtggccatcaaggcccccatgttcagctggcccagactgagagacgccgaccccatcctgagatgcgagatggccagcaccggcgaggtggcctgcttcggcgagggcatccacaccgccttcctgaaggccatgctgagcaccggcttcaagatcccccagaagggcatcctgatcggcatccagcagagcttcagacccagattcctgggcgtggccgagcagctgcacaacgagggcttcaagctgttcgccaccgaggccaccagcgactggctgaacgccaacaacgtgcccgccacccccgtggcctggcccagccaggagggccagaaccccagcctgagcagcatcagaaagctgatcagagacggcagcatcgacctggtgatcaacctgcccaacaacaacaccaagttcgtgcacgacaactacgtgatcagaagaaccgccgtggacagcggcatccccctgctgaccaacttccaggtgaccaagctgttcgccgaggccgtgcagaagagcagaaaggtggacagcaagagcctgttccactacagacagtacagcgccggcaaggccgcctag

SEQ ID NO: 1789 - DNA, 213 bp, synthetic construct
  misc_feature 1..213: note = source = /note="Description of Artificial Sequence: Synthetic coding sequence"
  source 1..213: mol_type = other DNA
atgaccagaatcctgaccgccttcaaggtggtgagaaccctgaagaccggcttcggcttcaccaacgtgaccgcccaccagaagtggaagttcagcagacccggcatcagactgctgagcgtgaaggcccagaccgcccacatcgtgctggaggacagagacgccgacacccccgcccccctgctgaaccagcccgagccccacgtgatctag

SEQ ID NO: 1790 - DNA, 606 bp, synthetic construct
  misc_feature 1..606: note = source = /note="Description of Artificial Sequence: Synthetic coding sequence"
  source 1..606: mol_type = other DNA
atgagcagaagagagggcagcctggaggacccccagaccgacagcagcgtgagcctgctgccccacctggaggccaagatcagacagacccacagcctggcccacctgctgaccaagtacgccgagcagctgctgcaggagtacgtgcagctgcagggcgaccccttcggcctgcccagcttcagcccccccagactgcccgtggccggcctgagcgcccccgcccccagccacgccggcctgcccgtgcacgagagactgagactggacgccgccgccctggccgccctgccccccctgctggacgccgtgtgcagaagacaggccgagctgaaccccagagcccccagactgctgagaagactggaggacgccgccagacaggccagagccctgggcgccgccgtggaggccctgctggccgccctgggcgccgccaacagaggccccagagccgagccccccgccgccaccgccagcgccgccagcgccaccggcgtgttccccgccaaggtgctgggcctgagagtgtgcggcctgtacagagagtggctgagcagaaccgagggcgacctgggccagctgctgcccggcggcagcgcctag

SEQ ID NO: 1791 - DNA, 603 bp, synthetic construct
  misc_feature 1..603: note = source = /note="Description of Artificial Sequence: Synthetic coding sequence"
  source 1..603: mol_type = other DNA
atgagcagaagagagggcagcctggacccccagaccgacagcagcgtgagcctgctgccccacctggaggccaagatcagacagacccacagcctggcccacctgctgaccaagtacgccgagcagctgctgcaggagtacgtgcagctgcagggcgaccccttcggcctgcccagcttcagcccccccagactgcccgtggccggcctgagcgcccccgcccccagccacgccggcctgcccgtgcacgagagactgagactggacgccgccgccctggccgccctgccccccctgctggacgccgtgtgcagaagacaggccgagctgaaccccagagcccccagactgctgagaagactggaggacgccgccagacaggccagagccctgggcgccgccgtggaggccctgctggccgccctgggcgccgccaacagaggccccagagccgagccccccgccgccaccgccagcgccgccagcgccaccggcgtgttccccgccaaggtgctgggcctgagagtgtgcggcctgtacagagagtggctgagcagaaccgagggcgacctgggccagctgctgcccggcggcagcgcctag

SEQ ID NO: 1792 - DNA, 513 bp, synthetic construct
  misc_feature 1..513: note = source = /note="Description of Artificial Sequence: Synthetic coding sequence"
  source 1..513: mol_type = other DNA
atgaagacccagagagacggccacagcctgggcagatggagcctggtgctgctgctgctgggcctggtgatgcccctggccatcatcgcccaggtgctgagctacaaggaggccgtgctgagagccatcgacggcatcaaccagagaagcagcgacgccaacctgtacagactgctggacctggaccccagacccaccatggacggcgaccccgacacccccaagcccgtgagcttcaccgtgaaggagaccgtgtgccccagaaccacccagcagagccccgaggactgcgacttcaagaaggacggcctggtgaagagatgcatgggcaccgtgaccctgaaccaggccagaggcagcttcgacatcagctgcgacaaggacaacaagagattcgccctgctgggcgacttcttcagaaagagcaaggagaagatcggcaaggagttcaagagaatcgtgcagagaatcaaggacttcctgagaaacctggtgcccagaaccgagagctag

SEQ ID NO: 1793 - DNA, 1692 bp, synthetic construct
  misc_feature 1..1692: note = source = /note="Description of Artificial Sequence: Synthetic coding sequence"
  source 1..1692: mol_type = other DNA
gcctgctgctgcggcggcggctgcacctgctgcggctgcacctgcaccaccggctgctgcaccacctgcacctgctgcgcctgcgcctgcaccaccggcaccaccaccggcgccggcgcctgctgcaccggcggctgcgccgccggcggcaccggctgcggcggcgccggctgctgctgcacctgctgcgccggcgccgccggcaccggctgcggcggcacctgcgccgccggctgcggcggctgcgccggctgcggcggcgccggcgcctgcggcggctgcggcgccggctgctgcgccggcggcgccgcctgctgcacctgctgctgctgctgctgcggctgcggcacctgctgctgctgcgccggctgcaccacctgctgctgcgccggctgcggcaccggcggctgcggcggctgcggcggcgccgcctgctgctgctgctgcggcggcgccggcgccgccgccggcgccgccaccgccgccgccggcgcctgcaccggcggcgccaccgcctgcgccggcggcacctgctgcgccaccaccgcctgcggcacctgcgccaccacctgcaccggctgcgccggcggctgctgcgccgccaccaccaccgccaccggcgccggcggcgccgccacctgctgcgccgccggcgccaccggcgccgccaccaccaccggcggcgccggctgcgccggcggcgccggcgccggcggctgctgcggcaccaccaccggcacctgcaccggctgcgccggcaccggctgctgctgctgcgccggcggctgcaccggctgcacctgctgctgcgccggctgcggctgcaccacctgctgctgcgccgcctgcgccggcgccggcggcgcctgctgcgccacctgcaccggcgccaccggcgccaccacctgcgccaccgccggcggctgcgcctgcgccgccgcctgcgccaccggcgccgccgccaccggcgcctgcaccaccaccggcgccgccggcaccaccacctgctgcaccacctgcgccgccaccgccgccgccgccgcctgcgccggcgcctgcgccgccaccgccaccggcaccaccgccacctgcgccggcgccacctgcgccgccgcctgcacctgctgcggcgcctgctgctgctgcgccgcctgcggcgccggcgccaccacctgctgcaccggcgccgccggcgccgcctgcaccggctgcggcgccggcggcgccggcggcaccggcggcggctgctgcacctgcaccacctgcgccggctgcggcgccggctgcaccggcggcgcctgcaccggctgcacctgctgctgcaccggcggcgccggctgcgcctgcggcgccggcaccacctgcgccggcggcgccgccggcggctgcacctgcgccggcggcgccgccggcgccggcggcgccggcgccggctgcgccggctgcgccgccggctgcggcggcgccgccaccgccacctgcacctgcggcgccaccggctgcgccaccgccgccaccggctgcgccggcaccaccggcggcaccggcggcggcggctgctgcgccaccggcgcctgcggcggcggcggctgctgctgcggcggcgccgcctgcacctgcgcctgctgcgccggctgcaccaccgccggctgcgccggctgcggctgcacctgcggcggctgcaccggctag

SEQ ID NO: 1794 - DNA, 555 bp, synthetic construct
  misc_feature 1..555: note = source = /note="Description of Artificial Sequence: Synthetic coding sequence"
  source 1..555: mol_type = other DNA
atggccgaccacctgatgctggccgagggctacagactggtgcagagaccccccagcgccgccgccgcccacggcccccacgccctgagaaccctgcccccctacgccggccccggcctggacagcggcctgagacccagaggcgcccccctgggcccccccccccccagacagcccggcgccctggcctacggcgccttcggcccccccagcagcttccagcccttccccgccgtgcccccccccgccgccggcatcgcccacctgcagcccgtggccaccccctaccccggcagagccgccgccccccccaacgcccccggcggcccccccggcccccagcccgcccccagcgccgccgccccccccccccccgcccacgccctgggcggcatggacgccgagctgatcgacgaggaggccctgaccagcctggagctggagctgggcctgcacagagtgagagagctgcccgagctgttcctgggccagagcgagttcgactgcttcagcgacctgggcagcgccccccccgccggcagcgtgagctgctag

SEQ ID NO: 1795 - DNA, 3198 bp, synthetic construct
  misc_feature 1..3198: note = source = /note="Description of Artificial Sequence: Synthetic coding sequence"
  source 1..3198: mol_type = other DNA
atgaagatcctgatcctgggcatcttcctgttcctgtgcagcacccccgcctgggccaaggagaagcactactacatcggcatcatcgagaccacctgggactacgccagcgaccacggcgagaagaagctgatcagcgtggacaccgagcacagcaacatctacctgcagaacggccccgacagaatcggcagactgtacaagaaggccctgtacctgcagtacaccgacgagaccttcagaaccaccatcgagaagcccgtgtggctgggcttcctgggccccatcatcaaggccgagaccggcgacaaggtgtacgtgcacctgaagaacctggccagcagaccctacaccttccacagccacggcatcacctactacaaggagcacgagggcgccatctaccccgacaacaccaccgacttccagagagccgacgacaaggtgtaccccggcgagcagtacacctacatgctgctggccaccgaggagcagagccccggcgagggcgacggcaactgcgtgaccagaatctaccacagccacatcgacgcccccaaggacatcgccagcggcctgatcggccccctgatcatctgcaagaaggacagcctggacaaggagaaggagaagcacatcgacagagagttcgtggtgatgttcagcgtggtggacgagaacttcagctggtacctggaggacaacatcaagacctactgcagcgagcccgagaaggtggacaaggacaacgaggacttccaggagagcaacagaatgtacagcgtgaacggctacaccttcggcagcctgcccggcctgagcatgtgcgccgaggacagagtgaagtggtacctgttcggcatgggcaacgaggtggacgtgcacgccgccttcttccacggccaggccctgaccaacaagaactacagaatcgacaccatcaacctgttccccgccaccctgttcgacgcctacatggtggcccagaaccccggcgagtggatgctgagctgccagaacctgaaccacctgaaggccggcctgcaggccttcttccaggtgcaggagtgcaacaagagcagcagcaaggacaacatcagaggcaagcacgtgagacactactacatcgccgccgaggagatcatctggaactacgcccccagcggcatcgacatcttcaccaaggagaacctgaccgcccccggcagcgacagcgccgtgttcttcgagcagggcaccaccagaatcggcggcagctacaagaagctggtgtacagagagtacaccgacgccagcttcaccaacagaaaggagagaggccccgaggaggagcacctgggcatcctgggccccgtgatctgggccgaggtgggcgacaccatcagagtgaccttccacaacaagggcgcctaccccctgagcatcgagcccatcggcgtgagattcaacaagaacaacgagggcacctactacagccccaactacaacccccagagcagaagcgtgccccccagcgccagccacgtggcccccaccgagaccttcacctacgagtggaccgtgcccaaggaggtgggccccaccaacgccgaccccgtgtgcctggccaagatgtactacagcgccgtggagcccaccaaggacatcttcaccggcctgatcggccccatgaagatctgcaagaagggcagcctgcacgccaacggcagacagaaggacgtggacaaggagttctacctgttccccaccgtgttcgacgagaacgagagcctgctgctggaggacaacatcagaatgttcaccaccgcccccgaccaggtggacaaggaggacgaggacttccaggagagcaacaagatgcacagcatgaacggcttcatgtacggcaaccagcccggcctgaccatgtgcaagggcgacagcgtggtgtggtacctgttcagcgccggcaacgaggccgacgtgcacggcatctacttcagcggcaacacctacctgtggagaggcgagagaagagacaccgccaacctgttcccccagaccagcctgaccctgcacatgtggcccgacaccgagggcaccttcaacgtggagtgcctgaccaccgaccactacaccggcggcatgaagcagaagtacaccgtgaaccagtgcagaagacagagcgaggacagcaccttctacctgggcgagagaacctactacatcgccgccgtggaggtggagtgggactacagcccccagagagagtgggagaaggagctgcaccacctgcaggagcagaacgtgagcaacgccttcctggacaagggcgagttctacatcggcagcaagtacaagaaggtggtgtacagacagtacaccgacagcaccttcagagtgcccgtggagagaaaggccgaggaggagcacctgggcatcctgggcccccagctgcacgccgacgtgggcgacaaggtgaagatcatcttcaagaacatggccaccagaccctacagcatccacgcccacggcgtgcagaccgagagcagcaccgtgacccccaccctgcccggcgagaccctgacctacgtgtggaagatccccgagagaagcggcgccggcaccgaggacagcgcctgcatcccctgggcctactacagcaccgtggaccaggtgaaggacctgtacagcggcctgatcggccccctgatcgtgtgcagaagaccctacctgaaggtgttcaaccccagaagaaagctggagttcgccctgctgttcctggtgttcgacgagaacgagagctggtacctggacgacaacatcaagacctacagcgaccaccccgagaaggtgaacaaggacgacgaggagttcatcgagagcaacaagatgcacgccatcaacggcagaatgttcggcaacctgcagggcctgaccatgcacgtgggcgacgaggtgaactggtacctgatgggcatgggcaacgagatcgacctgcacaccgtgcacttccacggccacagcttccagtacaagcacagaggcgtgtacagcagcgacgtgttcgacatcttccccggcacctaccagaccctggagatgttccccagaacccccggcatctggctgctgcactgccacgtgaccgaccacatccacgccggcatggagaccacctacaccgtgctgcagaacgaggacaccaagagcggctag

SEQ ID NO: 1796 - DNA, 603 bp, synthetic construct
  misc_feature 1..603: note = source = /note="Description of Artificial Sequence: Synthetic coding sequence"
  source 1..603: mol_type = other DNA
atggccttcaccgagcacagccccctgaccccccacagaagagacctgtgcagcagaagcatctggctggccagaaagatcagaagcgacctgaccgccctgaccgagagctacgtgaagcaccagggcctgaacaagaacatcaacctggacagcgccgacggcatgcccgtggccagcaccgaccagtggagcgagctgaccgaggccgagagactgcaggagaacctgcaggcctacagaaccttccacgtgctgctggccagactgctggaggaccagcaggtgcacttcacccccaccgagggcgacttccaccaggccatccacaccctgctgctgcaggtggccgccttcgcctaccagatcgaggagctgatgatcctgctggagtacaagatccccagaaacgaggccgacggcatgcccatcaacgtgggcgacggcggcctgttcgagaagaagctgtggggcctgaaggtgctgcaggagctgagccagtggaccgtgagaagcatccacgacctgagattcatcagcagccaccagaccggcatccccgccagaggcagccactacatcgccaacaacaagaagatgtag

SEQ ID NO: 1797 - DNA, 1869 bp, synthetic construct
  misc_feature 1..1869: note = source = /note="Description of Artificial Sequence: Synthetic coding sequence"
  source 1..1869: mol_type = other DNA
atggcccacgtgagaggcctgcagctgcccggctgcctggccctggccgccctgtgcagcctggtgcacagccagcacgtgttcctggccccccagcaggccagaagcctgctgcagagagtgagaagagccaacaccttcctggaggaggtgagaaagggcaacctggagagagagtgcgtggaggagacctgcagctacgaggaggccttcgaggccctggagagcagcaccgccaccgacgtgttctgggccaagtacaccgcctgcgagaccgccagaacccccagagacaagctggccgcctgcctggagggcaactgcgccgagggcctgggcaccaactacagaggccacgtgaacatcaccagaagcggcatcgagtgccagctgtggagaagcagatacccccacaagcccgagatcaacagcaccacccaccccggcgccgacctgcaggagaacttctgcagaaaccccgacagcagcaccaccggcccctggtgctacaccaccgaccccaccgtgagaagacaggagtgcagcatccccgtgtgcggccaggaccaggtgaccgtggccatgacccccagaagcgagggcagcagcgtgaacctgagcccccccctggagcagtgcgtgcccgacagaggccagcagtaccagggcagactggccgtgaccacccacggcctgccctgcctggcctgggccagcgcccaggccaaggccctgagcaagcaccaggacttcaacagcgccgtgcagctggtggagaacttctgcagaaaccccgacggcgacgaggagggcgtgtggtgctacgtggccggcaagcccggcgacttcggctactgcgacctgaactactgcgaggaggccgtggaggaggagaccggcgacggcctggacgaggacagcgacagagccatcgagggcagaaccgccaccagcgagtaccagaccttcttcaaccccagaaccttcggcagcggcgaggccgactgcggcctgagacccctgttcgagaagaagagcctggaggacaagaccgagagagagctgctggagagctacatcgacggcagaatcgtggagggcagcgacgccgagatcggcatgagcccctggcaggtgatgctgttcagaaagagcccccaggagctgctgtgcggcgccagcctgatcagcgacagatgggtgctgaccgccgcccactgcctgctgtaccccccctgggacaagaacttcaccgagaacgacctgctggtgagaatcggcaagcacagcagaaccagatacgagagaaacatcgagaagatcagcatgctggagaagatctacatccaccccagatacaactggagagagaacctggacagagacatcgccctgatgaagctgaagaagcccgtggccttcagcgactacatccaccccgtgtgcctgcccgacagagagaccgccgccagcctgctgcaggccggctacaagggcagagtgaccggctggggcaacctgaaggagacctggaccgccaacgtgggcaagggccagcccagcgtgctgcaggtggtgaacctgcccatcgtggagagacccgtgtgcaaggacagcaccagaatcagaatcaccgacaacatgttctgcgccggctacaagcccgacgagggcaagagaggcgacgcctgcgagggcgacagcggcggccccttcgtgatgaagagccccttcaacaacagatggtaccagatgggcatcgtgagctggggcgagggctgcgacagagacggcaagtacggcttctacacccacgtgttcagactgaagaagtggatccagaaggtgatcgaccagttcggcgagtag

SEQ ID NO: 1798 - DNA, 195 bp, synthetic construct
  misc_feature 1..195: note = source = /note="Description of Artificial Sequence: Synthetic coding sequence"
  source 1..195: mol_type = other DNA
ctgcagggcgagttcctgccccagcccagacagcagcaccacggcaccctggtgctgcactacagaccccacagagaggaggccggcatgcagcacccctgcctgtggcccggcagcagccactgcagcgacgacagcaccctgagaagactgcagtgcgagagcgtgaccagcatcggcgccgtgtgcccctag

SEQ ID NO: 1799 - DNA, 1752 bp, synthetic construct
  misc_feature 1..1752: note = source = /note="Description of Artificial Sequence: Synthetic coding sequence"
  source 1..1752: mol_type = other DNA
atggcccacgtgagaggcctgcagctgcccggctgcctggccctggccgccctgtgcagcctggtgcacagccagcacgtgttcctggccccccagcaggccagaagcctgctgcagagagtgagaagagccaacaccttcctggaggaggtgagaaagggcaacctggagagagagtgcgtggaggagacctgcagctacgaggaggccttcgaggccctggagagcagcaccgccaccgacgtgttctgggccaagtacaccgcctgcgagaccgccagaacccccagagacaagctggccgcctgcctggagggcaactgcgccgagggcctgggcaccaactacagaggccacgtgaacatcaccagaagcggcatcgagtgccagctgtggagaagcagatacccccacaagcccgagatcaacagcaccacccaccccggcgccgacctgcaggagaacttctgcagaaaccccgacagcagcaccaccggcccctggtgctacaccaccgaccccaccgtgagaagacaggagtgcagcatccccgtgtgcggccaggaccaggtgaccgtggccatgacccccagaagcgagggcagcagcgtgaacctgagcccccccctggagcagtgcgtgcccgacagaggccagcagtaccagggcagactggccgtgaccacccacggcctgccctgcctggcctgggccagcgcccaggccaaggccctgagcaagcaccaggacttcaacagcgccgtgcagctggtggagaacttctgcagaaaccccgacggcgacgaggagggcgtgtggtgctacgtggccggcaagcccggcgacttcggctactgcgacctgaactactgcgaggaggccgtggaggaggagaccggcgacggcctggacgaggacagcgacagagccatcgagggcagaaccgccaccagcgagtaccagaccttcttcaaccccagaaccttcggcagcggcgaggccgactgcggcctgagacccctgttcgagaagaagagcctggaggacaagaccgagagagagctgctggagagctacatcgacggcagaatcgtggagggcagcgacgccgagatcggcatgagcccctggcaggtgatgctgttcagaaagagcccccaggagctgctgtgcggcgccagcctgatcagcgacagatgggtgctgaccgccgcccactgcctgctgtaccccccctgggacaagaacttcaccgagaacgacctgctggtgagaatcggcaagcacagcagaaccagatacgagagaaacatcgagaagatcagcatgctggagaagatctacatccaccccagcctgctgcaggccggctacaagggcagagtgaccggctggggcaacctgaaggagacctggaccgccaacgtgggcaagggccagcccagcgtgctgcaggtggtgaacctgcccatcgtggagagacccgtgtgcaaggacagcaccagaatcagaatcaccgacaacatgttctgcgccggctacaagcccgacgagggcaagagaggcgacgcctgcgagggcgacagcggcggccccttcgtgatgaagagccccttcaacaacagatggtaccagatgggcatcgtgagctggggcgagggctgcgacagagacggcaagtacggcttctacacccacgtgttcagactgaagaagtggatccagaaggtgatcgaccagttcggcgagtag

SEQ ID NO: 1800 - DNA, 888 bp, synthetic construct
  misc_feature 1..888: note = source = /note="Description of Artificial Sequence: Synthetic coding sequence"
  source 1..888: mol_type = other DNA
atggagacccccgcctggcccagagtgcccagacccgagaccgccgtggccagaaccctgctgctgggctgggtgttcgcccaggtggccggcgccagcggcaccaccaacaccgtggccgcctacaacctgacctggaagagcaccaacttcaagaccatcctggagtgggagcccaagcccgtgaaccaggtgtacaccgtgcagatcagcaccaagagcggcgactggaagagcaagtgcttctacaccaccgacaccgagtgcgacctgaccgacgagatcgtgaaggacgtgaagcagacctacctggccagagtgttcagctaccccgccggcaacgtggagagcaccggcagcgccggcgagcccctgtacgagaacagccccgagttcaccccctacctggagaccaacctgggccagcccaccatccagagcttcgagcaggtgggcaccaaggtgaacgtgaccgtggaggacgagagaaccctggtgagaagaaacaacaccttcctgagcctgagagacgtgttcggcaaggacctgatctacaccctgtactactggaagagcagcagcagcggcaagaagaccgccaagaccaacaccaacgagttcctgatcgacgtggacaagggcgagaactactgcttcagcgtgcaggccgtgatccccagcagaaccgtgaacagaaagagcaccgacagccccgtggagtgcatgggccaggagaagggcgagttcagagagatcttctacatcatcggcgccgtggtgttcgtggtgatcatcctggtgatcatcctggccatcagcctgcacaagtgcagaaaggccggcgtgggccagagctggaaggagaacagccccctgaacgtgagctag

SEQ ID NO: 1801 - DNA, 717 bp, synthetic construct
  misc_feature 1..717: note = source = /note="Description of Artificial Sequence: Synthetic coding sequence"
  source 1..717: mol_type = other DNA
atggagacccccgcctggcccagagtgcccagacccgagaccgccgtggccagaaccctgctgctgggctgggtgttcgcccaggtggccggcgccagcggcaccaccaacaccgtggccgcctacaacctgacctggaagagcaccaacttcaagaccatcctggagtgggagcccaagcccgtgaaccaggtgtacaccgtgcagatcagcaccaagagcggcgactggaagagcaagtgcttctacaccaccgacaccgagtgcgacctgaccgacgagatcgtgaaggacgtgaagcagacctacctggccagagtgttcagctaccccgccggcaacgtggagagcaccggcagcgccggcgagcccctgtacgagaacagccccgagttcaccccctacctggagaccaacctgggccagcccaccatccagagcttcgagcaggtgggcaccaaggtgaacgtgaccgtggaggacgagagaaccctggtgagaagaaacaacaccttcctgagcctgagagacgtgttcggcaaggacctgatctacaccctgtactactggaagagcagcagcagcggcaagaagtacagcaccagcctggagctgtggtacctgtggagcagcagcctgagcagcagctggctgtacctgtacaccagcgtggagagacaggagtggggcagagccggcagaagaaccccccactag

SEQ ID NO: 1802 - DNA, 3807 bp, synthetic construct
  misc_feature 1..3807: note = source = /note="Description of Artificial Sequence: Synthetic coding sequence"
  source 1..3807: mol_type = other DNA
atgatcgccgcccccgagatccccaccgacttcaacctgctgcaggagagcgagacccacttcagcagcgacaccgacttcgaggacatcgagggcaagaaccagaagcagggcaagggcaagacctgcaagaagggcaagaagggccccgccgagaagggcaagggcggcaacggcggcggcaagccccccagcggccccaacagaatgaacggccaccaccagcagaacggcgtggagaacatgatgctgttcgaggtggtgaagatgggcaagagcgccatgcagagcgtggtggacgactggatcgagagctacaagcacgacagagacatcgccctgctggacctgatcaacttcttcatccagtgcagcggctgcaagggcgtggtgaccgccgagatgttcagacacatgcagaacagcgagatcatcagaaagatgaccgaggagttcgacgaggacagcggcgactaccccctgaccatggccggcccccagtggaagaagttcaagagcagcttctgcgagttcatcggcgtgctggtgagacagtgccagtacagcatcatctacgacgagtacatgatggacaccgtgatcagcctgctgaccggcctgagcgacagccaggtgagagccttcagacacaccagcaccctggccgccatgaagctgatgaccgccctggtgaacgtggccctgaacctgagcatcaacatggacaacacccagagacagtacgaggccgagagaaacaagatgatcggcaagagagccaacgagagactggagctgctgctgcagaagagaaaggagctgcaggagaaccaggacgagatcgagaacatgatgaacgccatcttcaagggcgtgttcgtgcacagatacagagacgccatcgccgagatcagagccatctgcatcgaggagatcggcatctggatgaagatgtacagcgacgccttcctgaacgacagctacctgaagtacgtgggctggaccatgcacgacaagcagggcgaggtgagactgaagtgcctgaccgccctgcagggcctgtactacaacaaggagctgaacagcaagctggagctgttcaccagcagattcaaggacagaatcgtgagcatgaccctggacaaggagtacgacgtggccgtgcaggccatcaagctgctgaccctggtgctgcagagcagcgaggaggtgctgaccgccgaggactgcgagaacgtgtaccacctggtgtacagcgcccacagacccgtggccgtggccgccggcgagttcctgtacaagaagctgttcagcagaagagaccccgaggaggacggcatgatgaagagaagaggcagacagggccccaacgccaacctggtgaagaccctggtgttcttcttcctggagagcgagctgcacgagcacgccgcctacctggtggacagcatgtgggactgcgccaccgagctgctgaaggactgggagtgcatgaacagcctgctgctggaggagcccctgagcggcgaggaggccctgaccgacagacaggagagcgccctgatcgagatcatgctgtgcaccatcagacaggccgccgagtgccacccccccgtgggcagaggcaccggcaagagagtgctgaccgccaaggagaagaagacccagctggacgacagaaccaagatcaccgagctgttcgccgtggccctgccccagctgctggccaagtacagcgtggacgccgagaaggtgaccaacctgctgcagctgccccagtacttcgacctggagatctacaccaccggcagactggagaagcacctggacgccctgctgagacagatcagaaacatcgtggagaagcacaccgacaccgacgtgctggaggcctgcagcaagacctaccacgccctgtgcaacgaggagttcaccatcttcaacagagtggacatcagcagaagccagctgatcgacgagctggccgacaagttcaacagactgctggaggacttcctgcaggagggcgaggagcccgacgaggacgacgcctaccaggtgctgagcaccctgaagagaatcaccgccttccacaacgcccacgacctgagcaagtgggacctgttcgcctgcaactacaagctgctgaagaccggcatcgagaacggcgacatgcccgagcagatcgtgatccacgccctgcagtgcacccactacgtgatcctgtggcagctggccaagatcaccgagagcagcagcaccaaggaggacctgctgagactgaagaagcagatgagagtgttctgccagatctgccagcactacctgaccaacgtgaacaccaccgtgaaggagcaggccttcaccatcctgtgcgacatcctgatgatcttcagccaccagatcatgagcggcggcagagacatgctggagcccctggtgtacacccccgacagcagcctgcagagcgagctgctgagcttcatcctggaccacgtgttcatcgagcaggacgacgacaacaacagcgccgacggccagcaggaggacgaggccagcaagatcgaggccctgcacaagagaagaaacctgctggccgccttctgcaagctgatcgtgtacaccgtggtggagatgaacaccgccgccgacatcttcaagcagtacatgaagtactacaacgactacggcgacatcatcaaggagaccatgagcaagaccagacagatcgacaagatccagtgcgccaagaccctgatcctgagcctgcagcagctgttcaacgagatgatccaggagaacggctacaacttcgacagaagcagcagcaccttcagcggcatcaaggagctggccagaagattcgccctgaccttcggcctggaccagctgaagaccagagaggccatcgccatgctgcacaaggacggcatcgagttcgccttcaaggagcccaacccccagggcgagagccacccccccctgaacctggccttcctggacatcctgagcgagttcagcagcaagctgctgagacaggacaagagaaccgtgtacgtgtacctggagaagttcatgaccttccagatgagcctgagaagagaggacgtgtggctgcccctgatgagctacagaaacagcctgctggccggcggcgacgacgacaccatgagcgtgatcagcggcatcagcagcagaggcagcaccgtgagaagcaagaagagcaagcccagcaccggcaagagaaaggtggtggagggcatgcagctgagcctgaccgaggagagcagcagcagcgacagcatgtggctgagcagagagcagaccctgcacacccccgtgatgatgcagaccccccagctgaccagcaccatcatgagagagcccaagagactgagacccgaggacagcttcatgagcgtgtaccccatgcagaccgagcaccaccagacccccctggactacaacacccaggtgacctggatgctggcccagagacagcaggaggaggccagacagcagcaggagagagccgccatgagctacgtgaagctgagaaccaacctgcagcacgccatcagaagaggcaccagcctgatggaggacgacgaggagcccatcgtggaggacgtgatgatgagcagcgagggcagaatcgaggacctgaacgagggcatggacttcgacaccatggacatcgacctgccccccagcaagaacagaagagagagaaccgagctgaagcccgacttcttcgaccccgccagcatcatggacgagagcgtgctgggcgtgagcatgttctag

SEQ ID NO: 1803 - DNA, 1272 bp, synthetic construct
  misc_feature 1..1272: note = source = /note="Description of Artificial Sequence: Synthetic coding sequence"
  source 1..1272: mol_type = other DNA
atgcagagagtgaacatgatcatggccgagagccccggcctgatcaccatctgcctgctgggctacctgctgagcgccgagtgcaccgtgttcctggaccacgagaacgccaacaagatcctgaacagacccaagagatacaacagcggcaagctggaggagttcgtgcagggcaacctggagagagagtgcatggaggagaagtgcagcttcgaggaggccagagaggtgttcgagaacaccgagagaaccaccgagttctggaagcagtacgtggacgtgacctgcaacatcaagaacggcagatgcgagcagttctgcaagaacagcgccgacaacaaggtggtgtgcagctgcaccgagggctacagactggccgagaaccagaagagctgcgagcccgccgtgcccttcccctgcggcagagtgagcgtgagccagaccagcaagctgaccagagccgagaccgtgttccccgacgtggactacgtgaacagcaccgaggccgagaccatcctggacaacatcacccagagcacccagagcttcaacgacttcaccagagtggtgggcggcgaggacgccaagcccggccagttcccctggcaggtggtgctgaacggcaaggtggacgccttctgcggcggcagcatcgtgaacgagaagtggatcgtgaccgccgcccactgcgtggagaccggcgtgaagatcaccgtggtggccggcgagcacaacatcgaggagaccgagcacaccgagcagaagagaaacgtgatcagaatcatcccccaccacaactacaacgccgccatcaacaagtacaaccacgacatcgccctgctggagctggacgagcccctggtgctgaacagctacgtgacccccatctgcatcgccgacaaggagtacaccaacatcttcctgaagttcggcagcggctacgtgagcggctggggcagagtgttccacaagggcagaagcgccctggtgctgcagtacctgagagtgcccctggtggacagagccacctgcctgagaagcaccaagttcaccatctacaacaacatgttctgcgccggcttccacgagggcggcagagacagctgccagggcgacagcggcggcccccacgtgaccgaggtggagggcaccagcttcctgaccggcatcatcagctggggcgaggagtgcgccatgaagggcaagtacggcatctacaccaaggtgagcagatacgtgaactggatcaaggagaagaccaagctgacctag

SEQ ID NO: 1804 - DNA, 6690 bp, synthetic construct
  misc_feature 1..6690: note = source = /note="Description of Artificial Sequence: Synthetic coding sequence"
  source 1..6690: mol_type = other DNA
atgttccccggctgccccagactgtgggtgctggtggtgctgggcaccagctgggtgggctggggcagccagggcaccgaggccgcccagctgagacagttctacgtggccgcccagggcatcagctggagctacagacccgagcccaccaacagcagcctgaacctgagcgtgaccagcttcaagaagatcgtgtacagagagtacgagccctacttcaagaaggagaagccccagagcaccatcagcggcctgctgggccccaccctgtacgccgaggtgggcgacatcatcaaggtgcacttcaagaacaaggccgacaagcccctgagcatccacccccagggcatcagatacagcaagctgagcgagggcgccagctacctggaccacaccttccccgccgagaagatggacgacgccgtggcccccggcagagagtacacctacgagtggagcatcagcgaggacagcggccccacccacgacgaccccccctgcctgacccacatctactacagccacgagaacctgatcgaggacttcaacagcggcctgatcggccccctgctgatctgcaagaagggcaccctgaccgagggcggcacccagaagaccttcgacaagcagatcgtgctgctgttcgccgtgttcgacgagagcaagagctggagccagagcagcagcctgatgtacaccgtgaacggctacgtgaacggcaccatgcccgacatcaccgtgtgcgcccacgaccacatcagctggcacctgctgggcatgagcagcggccccgagctgttcagcatccacttcaacggccaggtgctggagcagaaccaccacaaggtgagcgccatcaccctggtgagcgccaccagcaccaccgccaacatgaccgtgggccccgagggcaagtggatcatcagcagcctgacccccaagcacctgcaggccggcatgcaggcctacatcgacatcaagaactgccccaagaagaccagaaacctgaagaagatcaccagagagcagagaagacacatgaagagatgggagtacttcatcgccgccgaggaggtgatctgggactacgcccccgtgatccccgccaacatggacaagaagtacagaagccagcacctggacaacttcagcaaccagatcggcaagcactacaagaaggtgatgtacacccagtacgaggacgagagcttcaccaagcacaccgtgaaccccaacatgaaggaggacggcatcctgggccccatcatcagagcccaggtgagagacaccctgaagatcgtgttcaagaacatggccagcagaccctacagcatctacccccacggcgtgaccttcagcccctacgaggacgaggtgaacagcagcttcaccagcggcagaaacaacaccatgatcagagccgtgcagcccggcgagacctacacctacaagtggaacatcctggagttcgacgagcccaccgagaacgacgcccagtgcctgaccagaccctactacagcgacgtggacatcatgagagacatcgccagcggcctgatcggcctgctgctgatctgcaagagcagaagcctggacagacagggcatccagagagccgccgacatcgagcagcaggccgtgttcgccgtgttcgacgagaacaagagctggtacctggaggacaacatcaacaagttctgcgagaaccccgacgaggtgaagagagacgaccccaagttctacgagagcaacatcatgagcaacttcaccctgagcgccatcaacggctacgtgcccgagagcatcaccaccctgggcttctgcttcgacgacaccgtgcagtggcacttctgcagcgtgggcacccagaacgagatcctgaccatccacttcaccggccacagcttcatctacggcaagagacacgaggacaccctgaccctgttccccatgagaggcgagagcgtgaccgtgaccatggacaacgtgggcacctggatgctgaccagcatgaacagcagccccagaagcaagaagctgagactgaagttcagagacgtgaagtgcatccccgacgacgacgaggacagctacgagatcttcgagccccccgagagcaccgtgatggccaccagaaagatgcacgacagactggagcccgaggacgaggagagcgacgccgactacgactaccagaacagactggccgccgccctgggcatcagaagcttcagaaacagcagcctgaaccaggaggaggaggagttcaacctgaccgccctggccctggagaacggcaccgagttcgtgagcagcaacaccgacatcatcgtgggcagcaactacagcagccccagcaacatcagcaagttcaccgtgaacaacctggccgagccccagaaggcccccagccaccagcaggccaccaccgccggcagccccctgagacacctgatcggcaagaacagcgtgctgaacagcagcaccgccgagcacagcagcccctacagcgaggaccccatcgaggaccccctgcagcccgacgtgaccggcatcagactgctgagcctgggcgccggcgagttcaagagccaggagcacgccaagcacaagggccccaaggtggagagagaccaggccgccaagcacagattcagctggatgaagctgctggcccacaaggtgggcagacacctgagccaggacaccggcagccccagcggcatgagaccctgggaggacctgcccagccaggacaccggcagccccagcagaatgagaccctggaaggacccccccagcgacctgctgctgctgaagcagagcaacagcagcaagatcctggtgggcagatggcacctggccagcgagaagggcagctacgagatcatccaggacaccgacgaggacaccgccgtgaacaactggctgatcagcccccagaacgccagcagagcctggggcgagagcacccccctggccaacaagcccggcaagcagagcggccaccccaagttccccagagtgagacacaagagcctgcaggtgagacaggacggcggcaagagcagactgaagaagagccagttcctgatcaagaccagaaagaagaagaaggagaagcacacccaccacgcccccctgagccccagaaccttccaccccctgagaagcgaggcctacaacaccttcagcgagagaagactgaagcacagcctggtgctgcacaagagcaacgagaccagcctgcccaccgacctgaaccagaccctgcccagcatggacttcggctggatcgccagcctgcccgaccacaaccagaacagcagcaacgacaccggccaggccagctgcccccccggcctgtaccagaccgtgccccccgaggagcactaccagaccttccccatccaggaccccgaccagatgcacagcaccagcgaccccagccacagaagcagcagccccgagctgagcgagatgctggagtacgacagaagccacaagagcttccccaccgacatcagccagatgagccccagcagcgagcacgaggtgtggcagaccgtgatcagccccgacctgagccaggtgaccctgagccccgagctgagccagaccaacctgagccccgacctgagccacaccaccctgagccccgagctgatccagagaaacctgagccccgccctgggccagatgcccatcagccccgacctgagccacaccaccctgagccccgacctgagccacaccaccctgagcctggacctgagccagaccaacctgagccccgagctgagccagaccaacctgagccccgccctgggccagatgcccctgagccccgacctgagccacaccaccctgagcctggacttcagccagaccaacctgagccccgagctgagccacatgaccctgagccccgagctgagccagaccaacctgagccccgccctgggccagatgcccatcagccccgacctgagccacaccaccctgagcctggacttcagccagaccaacctgagccccgagctgagccagaccaacctgagccccgccctgggccagatgcccctgagccccgaccccagccacaccaccctgagcctggacctgagccagaccaacctgagccccgagctgagccagaccaacctgagccccgacctgagcgagatgcccctgttcgccgacctgagccagatccccctgacccccgacctggaccagatgaccctgagccccgacctgggcgagaccgacctgagccccaacttcggccagatgagcctgagccccgacctgagccaggtgaccctgagccccgacatcagcgacaccaccctgctgcccgacctgagccagatcagccccccccccgacctggaccagatcttctaccccagcgagagcagccagagcctgctgctgcaggagttcaacgagagcttcccctaccccgacctgggccagatgcccagccccagcagccccaccctgaacgacaccttcctgagcaaggagttcaaccccctggtgatcgtgggcctgagcaaggacggcaccgactacatcgagatcatccccaaggaggaggtgcagagcagcgaggacgactacgccgagatcgactacgtgccctacgacgacccctacaagaccgacgtgagaaccaacatcaacagcagcagagaccccgacaacatcgccgcctggtacctgagaagcaacaacggcaacagaagaaactactacatcgccgccgaggagatcagctgggactacagcgagttcgtgcagagagagaccgacatcgaggacagcgacgacatccccgaggacaccacctacaagaaggtggtgttcagaaagtacctggacagcaccttcaccaagagagaccccagaggcgagtacgaggagcacctgggcatcctgggccccatcatcagagccgaggtggacgacgtgatccaggtgagattcaagaacctggccagcagaccctacagcctgcacgcccacggcctgagctacgagaagagcagcgagggcaagacctacgaggacgacagccccgagtggttcaaggaggacaacgccgtgcagcccaacagcagctacacctacgtgtggcacgccaccgagagaagcggccccgagagccccggcagcgcctgcagagcctgggcctactacagcgccgtgaaccccgagaaggacatccacagcggcctgatcggccccctgctgatctgccagaagggcatcctgcacaaggacagcaacatgcccatggacatgagagagttcgtgctgctgttcatgaccttcgacgagaagaagagctggtactacgagaagaagagcagaagcagctggagactgaccagcagcgagatgaagaagagccacgagttccacgccatcaacggcatgatctacagcctgcccggcctgaagatgtacgagcaggagtgggtgagactgcacctgctgaacatcggcggcagccaggacatccacgtggtgcacttccacggccagaccctgctggagaacggcaacaagcagcaccagctgggcgtgtggcccctgctgcccggcagcttcaagaccctggagatgaaggccagcaagcccggctggtggctgctgaacaccgaggtgggcgagaaccagagagccggcatgcagacccccttcctgatcatggacagagactgcagaatgcccatgggcctgagcaccggcatcatcagcgacagccagatcaaggccagcgagttcctgggctactgggagcccagactggccagactgaacaacggcggcagctacaacgcctggagcgtggagaagctggccgccgagttcgccagcaagccctggatccaggtggacatgcagaaggaggtgatcatcaccggcatccagacccagggcgccaagcactacctgaagagctgctacaccaccgagttctacgtggcctacagcagcaaccagatcaactggcagatcttcaagggcaacagcaccagaaacgtgatgtacttcaacggcaacagcgacgccagcaccatcaaggagaaccagttcgacccccccatcgtggccagatacatcagaatcagccccaccagagcctacaacagacccaccctgagactggagctgcagggctgcgaggtgaacggctgcagcacccccctgggcatggagaacggcaagatcgagaacaagcagatcaccgccagcagcttcaagaagagctggtggggcgactactgggagcccttcagagccagactgaacgcccagggcagagtgaacgcctggcaggccaaggccaacaacaacaagcagtggctggagatcgacctgctgaagatcaagaagatcaccgccatcatcacccagggctgcaagagcctgagcagcgagatgtacgtgaagagctacaccatccactacagcgagcagggcgtggagtggaagccctacagactgaagagcagcatggtggacaagatcttcgagggcaacaccaacaccaagggccacgtgaagaacttcttcaacccccccatcatcagcagattcatcagagtgatccccaagacctggaaccagagcatcgccctgagactggagctgttcggctgcgacatctactag

SEQ ID NO: 1805 - DNA, 6675 bp, synthetic construct
  misc_feature 1..6675: note = source = /note="Description of Artificial Sequence: Synthetic coding sequence"
  source 1..6675: mol_type = other DNA
atgttccccggctgccccagactgtgggtgctggtggtgctgggcaccagctgggtgggctggggcagccagggcaccgaggccgcccagctgagacagttctacgtggccgcccagggcatcagctggagctacagacccgagcccaccaacagcagcctgaacctgagcgtgaccagcttcaagaagatcgtgtacagagagtacgagccctacttcaagaaggagaagccccagagcaccatcagcggcctgctgggccccaccctgtacgccgaggtgggcgacatcatcaaggtgcacttcaagaacaaggccgacaagcccctgagcatccacccccagggcatcagatacagcaagctgagcgagggcgccagctacctggaccacaccttccccgccgagaagatggacgacgccgtggcccccggcagagagtacacctacgagtggagcatcagcgaggacagcggccccacccacgacgaccccccctgcctgacccacatctactacagccacgagaacctgatcgaggacttcaacagcggcctgatcggccccctgctgatctgcaagaagggcaccctgaccgagggcggcacccagaagaccttcgacaagcagatcgtgctgctgttcgccgtgttcgacgagagcaagagctggagccagagcagcagcctgatgtacaccgtgaacggctacgtgaacggcaccatgcccgacatcaccgtgtgcgcccacgaccacatcagctggcacctgctgggcatgagcagcggccccgagctgttcagcatccacttcaacggccaggtgctggagcagaaccaccacaaggtgagcgccatcaccctggtgagcgccaccagcaccaccgccaacatgaccgtgggccccgagggcaagtggatcatcagcagcctgacccccaagcacctgcaggccggcatgcaggcctacatcgacatcaagaactgccccaagaagaccagaaacctgaagaagatcaccagagagcagagaagacacatgaagagatgggagtacttcatcgccgccgaggaggtgatctgggactacgcccccgtgatccccgccaacatggacaagaagtacagaagccagcacctggacaacttcagcaaccagatcggcaagcactacaagaaggtgatgtacacccagtacgaggacgagagcttcaccaagcacaccgtgaaccccaacatgaaggaggacggcatcctgggccccatcatcagagcccaggtgagagacaccctgaagatcgtgttcaagaacatggccagcagaccctacagcatctacccccacggcgtgaccttcagcccctacgaggacgaggtgaacagcagcttcaccagcggcagaaacaacaccatgatcagagccgtgcagcccggcgagacctacacctacaagtggaacatcctggagttcgacgagcccaccgagaacgacgcccagtgcctgaccagaccctactacagcgacgtggacatcatgagagacatcgccagcggcctgatcggcctgctgctgatctgcaagagcagaagcctggacagacagggcatccagagagccgccgacatcgagcagcaggccgtgttcgccgtgttcgacgagaacaagagctggtacctggaggacaacatcaacaagttctgcgagaaccccgacgaggtgaagagagacgaccccaagttctacgagagcaacatcatgagcaccatcaacggctacgtgcccgagagcatcaccaccctgggcttctgcttcgacgacaccgtgcagtggcacttctgcagcgtgggcacccagaacgagatcctgaccatccacttcaccggccacagcttcatctacggcaagagacacgaggacaccctgaccctgttccccatgagaggcgagagcgtgaccgtgaccatggacaacgtgggcacctggatgctgaccagcatgaacagcagccccagaagcaagaagctgagactgaagttcagagacgtgaagtgcatccccgacgacgacgaggacagctacgagatcttcgagccccccgagagcaccgtgatggccaccagaaagatgcacgacagactggagcccgaggacgaggagagcgacgccgactacgactaccagaacagactggccgccgccctgggcatcagaagcttcagaaacagcagcctgaaccaggaggaggaggagttcaacctgaccgccctggccctggagaacggcaccgagttcgtgagcagcaacaccgacatcatcgtgggcagcaactacagcagccccagcaacatcagcaagttcaccgtgaacaacctggccgagccccagaaggcccccagccaccagcaggccaccaccgccggcagccccctgagacacctgatcggcaagaacagcgtgctgaacagcagcaccgccgagcacagcagcccctacagcgaggaccccatcgaggaccccctgcagcccgacgtgaccggcatcagactgctgagcctgggcgccggcgagttcaagagccaggagcacgccaagcacaagggccccaaggtggagagagaccaggccgccaagcacagattcagctggatgaagctgctggcccacaaggtgggcagacacctgagccaggacaccggcagccccagcggcatgagaccctgggaggacctgcccagccaggacaccggcagccccagcagaatgagaccctggaaggacccccccagcgacctgctgctgctgaagcagagcaacagcagcaagatcctggtgggcagatggcacctggccagcgagaagggcagctacgagatcatccaggacaccgacgaggacaccgccgtgaacaactggctgatcagcccccagaacgccagcagagcctggggcgagagcacccccctggccaacaagcccggcaagcagagcggccaccccaagttccccagagtgagacacaagagcctgcaggtgagacaggacggcggcaagagcagactgaagaagagccagttcctgatcaagaccagaaagaagaagaaggagaagcacacccaccacgcccccctgagccccagaaccttccaccccctgagaagcgaggcctacaacaccttcagcgagagaagactgaagcacagcctggtgctgcacaagagcaacgagaccagcctgcccaccgacctgaaccagaccctgcccagcatggacttcggctggatcgccagcctgcccgaccacaaccagaacagcagcaacgacaccggccaggccagctgcccccccggcctgtaccagaccgtgccccccgaggagcactaccagaccttccccatccaggaccccgaccagatgcacagcaccagcgaccccagccacagaagcagcagccccgagctgagcgagatgctggagtacgacagaagccacaagagcttccccaccgacatcagccagatgagccccagcagcgagcacgaggtgtggcagaccgtgatcagccccgacctgagccaggtgaccctgagccccgagctgagccagaccaacctgagccccgacctgagccacaccaccctgagccccgagctgatccagagaaacctgagccccgccctgggccagatgcccatcagccccgacctgagccacaccaccctgagccccgacctgagccacaccaccctgagcctggacctgagccagaccaacctgagccccgagctgagccagaccaacctgagccccgccctgggccagatgcccctgagccccgacctgagccacaccaccctgagcctggacttcagccagaccaacctgagccccgagctgagccacatgaccctgagccccgagctgagccagaccaacctgagccccgccctgggccagatgcccatcagccccgacctgagccacaccaccctgagcctggacttcagccagaccaacctgagccccgagctgagccagaccaacctgagccccgccctgggccagatgcccctgagccccgaccccagccacaccaccctgagcctggacctgagccagaccaacctgagccccgagctgagccagaccaacctgagccccgacctgagcgagatgcccctgttcgccgacctgagccagatccccctgacccccgacctggaccagatgaccctgagccccgacctgggcgagaccgacctgagccccaacttcggccagatgagcctgagccccgacctgagccaggtgaccctgagccccgacatcagcgacaccaccctgctgcccgacctgagccagatcagccccccccccgacctggaccagatcttctaccccagcgagagcagccagagcctgctgctgcaggagttcaacgagagcttcccctaccccgacctgggccagatgcccagccccagcagccccaccctgaacgacaccttcctgagcaaggagttcaaccccctggtgatcgtgggcctgagcaaggacggcaccgactacatcgagatcatccccaaggaggaggtgcagagcagcgaggacgactacgccgagatcgactacgtgccctacgacgacccctacaagaccgacgtgagaaccaacatcaacagcagcagagaccccgacaacatcgccgcctggtacctgagaagcaacaacggcaacagaagaaactactacatcgccgccgaggagatcagctgggactacagcgagttcgtgcagagagagaccgacatcgaggacagcgacgacatccccgaggacaccacctacaagaaggtggtgttcagaaagtacctggacagcaccttcaccaagagagaccccagaggcgagtacgaggagcacctgggcatcctgggccccatcatcagagccgaggtggacgacgtgatccaggtgagattcaagaacctggccagcagaccctacagcctgcacgcccacggcctgagctacgagaagagcagcgagggcaagacctacgaggacgacagccccgagtggttcaaggaggacaacgccgtgcagcccaacagcagctacacctacgtgtggcacgccaccgagagaagcggccccgagagccccggcagcgcctgcagagcctgggcctactacagcgccgtgaaccccgagaaggacatccacagcggcctgatcggccccctgctgatctgccagaagggcatcctgcacaaggacagcaacatgcccatggacatgagagagttcgtgctgctgttcatgaccttcgacgagaagaagagctggtactacgagaagaagagcagaagcagctggagactgaccagcagcgagatgaagaagagccacgagttccacgccatcaacggcatgatctacagcctgcccggcctgaagatgtacgagcaggagtgggtgagactgcacctgctgaacatcggcggcagccaggacatccacgtggtgcacttccacggccagaccctgctggagaacggcaacaagcagcaccagctgggcgtgtggcccctgctgcccggcagcttcaagaccctggagatgaaggccagcaagcccggctggtggctgctgaacaccgaggtgggcgagaaccagagagccggcatgcagacccccttcctgatcatggacagagactgcagaatgcccatgggcctgagcaccggcatcatcagcgacagccagatcaaggccagcgagttcctgggctactgggagcccagactggccagactgaacaacggcggcagctacaacgcctggagcgtggagaagctggccgccgagttcgccagcaagccctggatccaggtggacatgcagaaggaggtgatcatcaccggcatccagacccagggcgccaagcactacctgaagagctgctacaccaccgagttctacgtggcctacagcagcaaccagatcaactggcagatcttcaagggcaacagcaccagaaacgtgatgtacttcaacggcaacagcgacgccagcaccatcaaggagaaccagttcgacccccccatcgtggccagatacatcagaatcagccccaccagagcctacaacagacccaccctgagactggagctgcagggctgcgaggtgaacggctgcagcacccccctgggcatggagaacggcaagatcgagaacaagcagatcaccgccagcagcttcaagaagagctggtggggcgactactgggagcccttcagagccagactgaacgcccagggcagagtgaacgcctggcaggccaaggccaacaacaacaagcagtggctggagatcgacctgctgaagatcaagaagatcaccgccatcatcacccagggctgcaagagcctgagcagcgagatgtacgtgaagagctacaccatccactacagcgagcagggcgtggagtggaagccctacagactgaagagcagcatggtggacaagatcttcgagggcaacaccaacaccaagggccacgtgaagaacttcttcaacccccccatcatcagcagattcatcagagtgatccccaagacctggaaccagagcatcgccctgagactggagctgttcggctgcgacatctactag

SEQ ID NO: 1806 - DNA, 999 bp, synthetic construct
  misc_feature 1..999: note = source = /note="Description of Artificial Sequence: Synthetic coding sequence"
  source 1..999: mol_type = other DNA
atggacgacgccgtggcccccggcagagagtacacctacgagtggagcatcagcgaggacagcggccccacccacgacgaccccccctgcctgacccacatctactacagccacgagaacctgatcgaggacttcaacagcggcctgatcggccccctgctgatctgcaagaagggcaccctgaccgagggcggcacccagaagaccttcgacaagcagatcgtgctgctgttcgccgtgttcgacgagagcaagagctggagccagagcagcagcctgatgtacaccgtgaacggctacgtgaacggcaccatgcccgacatcaccgtgtgcgcccacgaccacatcagctggcacctgctgggcatgagcagcggccccgagctgttcagcatccacttcaacggccaggtgctggagcagaaccaccacaaggtgagcgccatcaccctggtgagcgccaccagcaccaccgccaacatgaccgtgggccccgagggcaagtggatcatcagcagcctgacccccaagcacctgcaggccggcatgcaggcctacatcgacatcaagaactgccccaagaagaccagaaacctgaagaagatcaccagagagcagagaagacacatgaagagatgggagtacttcatcgccgccgaggaggtgatctgggactacgcccccgtgatccccgccaacatggacaagaagtacagaagccagcacctggacaacttcagcaaccagatcggcaagcactacaagaaggtgatgtacacccagtacgaggacgagagcttcaccaagcacaccgtgaaccccaacatgaaggaggacggcatcctgggccccatcatcagagcccaggtgagagacaccctgaagatcgtgttcaagaacatggccagcagaccctacagcatctacccccacggcgtgaccttcagcccctacgaggacgaggtgaacagcagcttcaccagcggcaccaccccctag

SEQ ID NO: 1807 - DNA, 1335 bp, synthetic construct
  misc_feature 1..1335: note = source = /note="Description of Artificial Sequence: Synthetic coding sequence"
  source 1..1335: mol_type = other DNA
atggtgagccaggccctgagactgctgtgcctgctgctgggcctgcagggctgcctggccgccgtgttcgtgacccaggaggaggcccacggcgtgctgcacagaagaagaagagccaacgccttcctggaggagctgagacccggcagcctggagagagagtgcaaggaggagcagtgcagcttcgaggaggccagagagatcttcaaggacgccgagagaaccaagctgttctggatcagctacagcgacggcgaccagtgcgccagcagcccctgccagaacggcggcagctgcaaggaccagctgcagagctacatctgcttctgcctgcccgccttcgagggcagaaactgcgagacccacaaggacgaccagctgatctgcgtgaacgagaacggcggctgcgagcagtactgcagcgaccacaccggcaccaagagaagctgcagatgccacgagggctacagcctgctggccgacggcgtgagctgcacccccaccgtggagtacccctgcggcaagatccccatcctggagaagagaaacgccagcaagccccagggcagaatcgtgggcggcaaggtgtgccccaagggcgagtgcccctggcaggtgctgctgctggtgaacggcgcccagctgtgcggcggcaccctgatcaacaccatctgggtggtgagcgccgcccactgcttcgacaagatcaagaactggagaaacctgatcgccgtgctgggcgagcacgacctgagcgagcacgacggcgacgagcagagcagaagagtggcccaggtgatcatccccagcacctacgtgcccggcaccaccaaccacgacatcgccctgctgagactgcaccagcccgtggtgctgaccgaccacgtggtgcccctgtgcctgcccgagagaaccttcagcgagagaaccctggccttcgtgagattcagcctggtgagcggctggggccagctgctggacagaggcgccaccgccctggagctgatggtgctgaacgtgcccagactgatgacccaggactgcctgcagcagagcagaaaggtgggcgacagccccaacatcaccgagtacatgttctgcgccggctacagcgacggcagcaaggacagctgcaagggcgacagcggcggcccccacgccacccactacagaggcacctggtacctgaccggcatcgtgagctggggccagggctgcgccaccgtgggccacttcggcgtgtacaccagagtgagccagtacatcgagtggctgcagaagctgatgagaagcgagcccagacccggcgtgctgctgagagcccccttcccctag

SEQ ID NO: 1808 - DNA, 1401 bp, synthetic construct
  misc_feature 1..1401: note = source = /note="Description of Artificial Sequence: Synthetic coding sequence"
  source 1..1401: mol_type = other DNA
atggtgagccaggccctgagactgctgtgcctgctgctgggcctgcagggctgcctggccgccggcggcgtggccaaggccagcggcggcgagaccagagacatgccctggaagcccggcccccacagagtgttcgtgacccaggaggaggcccacggcgtgctgcacagaagaagaagagccaacgccttcctggaggagctgagacccggcagcctggagagagagtgcaaggaggagcagtgcagcttcgaggaggccagagagatcttcaaggacgccgagagaaccaagctgttctggatcagctacagcgacggcgaccagtgcgccagcagcccctgccagaacggcggcagctgcaaggaccagctgcagagctacatctgcttctgcctgcccgccttcgagggcagaaactgcgagacccacaaggacgaccagctgatctgcgtgaacgagaacggcggctgcgagcagtactgcagcgaccacaccggcaccaagagaagctgcagatgccacgagggctacagcctgctggccgacggcgtgagctgcacccccaccgtggagtacccctgcggcaagatccccatcctggagaagagaaacgccagcaagccccagggcagaatcgtgggcggcaaggtgtgccccaagggcgagtgcccctggcaggtgctgctgctggtgaacggcgcccagctgtgcggcggcaccctgatcaacaccatctgggtggtgagcgccgcccactgcttcgacaagatcaagaactggagaaacctgatcgccgtgctgggcgagcacgacctgagcgagcacgacggcgacgagcagagcagaagagtggcccaggtgatcatccccagcacctacgtgcccggcaccaccaaccacgacatcgccctgctgagactgcaccagcccgtggtgctgaccgaccacgtggtgcccctgtgcctgcccgagagaaccttcagcgagagaaccctggccttcgtgagattcagcctggtgagcggctggggccagctgctggacagaggcgccaccgccctggagctgatggtgctgaacgtgcccagactgatgacccaggactgcctgcagcagagcagaaaggtgggcgacagccccaacatcaccgagtacatgttctgcgccggctacagcgacggcagcaaggacagctgcaagggcgacagcggcggcccccacgccacccactacagaggcacctggtacctgaccggcatcgtgagctggggccagggctgcgccaccgtgggccacttcggcgtgtacaccagagtgagccagtacatcgagtggctgcagaagctgatgagaagcgagcccagacccggcgtgctgctgagagcccccttcccctag

SEQ ID NO: 1809 - DNA, 1194 bp, synthetic construct
  misc_feature 1..1194: note = source = /note="Description of Artificial Sequence: Synthetic coding sequence"
  source 1..1194: mol_type = other DNA
atgggcaacgtgaacagacagggccagcactgcagagacttcatcatggtgagccaggccctgagactgctgtgcctgctgctgggcctgcagggctgcctggccgccgacggcgaccagtgcgccagcagcccctgccagaacggcggcagctgcaaggaccagctgcagagctacatctgcttctgcctgcccgccttcgagggcagaaactgcgagacccacaaggacgaccagctgatctgcgtgaacgagaacggcggctgcgagcagtactgcagcgaccacaccggcaccaagagaagctgcagatgccacgagggctacagcctgctggccgacggcgtgagctgcacccccaccgtggagtacccctgcggcaagatccccatcctggagaagagaaacgccagcaagccccagggcagaatcgtgggcggcaaggtgtgccccaagggcgagtgcccctggcaggtgctgctgctggtgaacggcgcccagctgtgcggcggcaccctgatcaacaccatctgggtggtgagcgccgcccactgcttcgacaagatcaagaactggagaaacctgatcgccgtgctgggcgagcacgacctgagcgagcacgacggcgacgagcagagcagaagagtggcccaggtgatcatccccagcacctacgtgcccggcaccaccaaccacgacatcgccctgctgagactgcaccagcccgtggtgctgaccgaccacgtggtgcccctgtgcctgcccgagagaaccttcagcgagagaaccctggccttcgtgagattcagcctggtgagcggctggggccagctgctggacagaggcgccaccgccctggagctgatggtgctgaacgtgcccagactgatgacccaggactgcctgcagcagagcagaaaggtgggcgacagccccaacatcaccgagtacatgttctgcgccggctacagcgacggcagcaaggacagctgcaagggcgacagcggcggcccccacgccacccactacagaggcacctggtacctgaccggcatcgtgagctggggccagggctgcgccaccgtgggccacttcggcgtgtacaccagagtgagccagtacatcgagtggctgcagaagctgatgagaagcgagcccagacccggcgtgctgctgagagcccccttcccctag

SEQ ID NO: 1810 - DNA, 651 bp, synthetic construct
  misc_feature 1..651: note = source = /note="Description of Artificial Sequence: Synthetic coding sequence"
  source 1..651: mol_type = other DNA
atgagaatccaggaccccggcaaggtgttcttcggcaacgtggacagcagcggcatcaagcacaacatcttcaacccccccatcatcgccagatacatcagactgcaccccacccactacagcatcagaagcaccctgagaatggagctgatgggctgcgacctgaacagctgcagcatgcccctgggcatggagagcaaggccatcagcgacgcccagatcaccgccagcagctacttcaccaacatgttcgccacctggagccccagcaaggccagactgcacctgcagggcagaagcaacgcctggagaccccaggtgaacaaccccaaggagtggctgcaggtggacttccagaagaccatgaaggtgaccggcgtgaccacccagggcgtgaagagcctgctgaccagcatgtacgtgaaggagttcctgatcagcagcagccaggacggccaccagtggaccctgttcttccagaacggcaaggtgaaggtgttccagggcaaccaggacagcttcacccccgtggtgaacagcctggacccccccctgctgaccagatacctgagaatccacccccagagctgggtgcaccagatcgccctgagaatggaggtgctgggctgcgaggcccaggacctgtactag

SEQ ID NO: 1811 - DNA, 7056 bp, synthetic construct
  misc_feature 1..7056: note = source = /note="Description of Artificial Sequence: Synthetic coding sequence"
  source 1..7056: mol_type = other DNA
atgcagatcgagctgagcacctgcttcttcctgtgcctgctgagattctgcttcagcgccaccagaagatactacctgggcgccgtggagctgagctgggactacatgcagagcgacctgggcgagctgcccgtggacgccagattcccccccagagtgcccaagagcttccccttcaacaccagcgtggtgtacaagaagaccctgttcgtggagttcaccgaccacctgttcaacatcgccaagcccagacccccctggatgggcctgctgggccccaccatccaggccgaggtgtacgacaccgtggtgatcaccctgaagaacatggccagccaccccgtgagcctgcacgccgtgggcgtgagctactggaaggccagcgagggcgccgagtacgacgaccagaccagccagagagagaaggaggacgacaaggtgttccccggcggcagccacacctacgtgtggcaggtgctgaaggagaacggccccatggccagcgaccccctgtgcctgacctacagctacctgagccacgtggacctggtgaaggacctgaacagcggcctgatcggcgccctgctggtgtgcagagagggcagcctggccaaggagaagacccagaccctgcacaagttcatcctgctgttcgccgtgttcgacgagggcaagagctggcacagcgagaccaagaacagcctgatgcaggacagagacgccgccagcgccagagcctggcccaagatgcacaccgtgaacggctacgtgaacagaagcctgcccggcctgatcggctgccacagaaagagcgtgtactggcacgtgatcggcatgggcaccacccccgaggtgcacagcatcttcctggagggccacaccttcctggtgagaaaccacagacaggccagcctggagatcagccccatcaccttcctgaccgcccagaccctgctgatggacctgggccagttcctgctgttctgccacatcagcagccaccagcacgacggcatggaggcctacgtgaaggtggacagctgccccgaggagccccagctgagaatgaagaacaacgaggaggccgaggactacgacgacgacctgaccgacagcgagatggacgtggtgagattcgacgacgacaacagccccagcttcatccagatcagaagcgtggccaagaagcaccccaagacctgggtgcactacatcgccgccgaggaggaggactgggactacgcccccctggtgctggcccccgacgacagaagctacaagagccagtacctgaacaacggcccccagagaatcggcagaaagtacaagaaggtgagattcatggcctacaccgacgagaccttcaagaccagagaggccatccagcacgagagcggcatcctgggccccctgctgtacggcgaggtgggcgacaccctgctgatcatcttcaagaaccaggccagcagaccctacaacatctacccccacggcatcaccgacgtgagacccctgtacagcagaagactgcccaagggcgtgaagcacctgaaggacttccccatcctgcccggcgagatcttcaagtacaagtggaccgtgaccgtggaggacggccccaccaagagcgaccccagatgcctgaccagatactacagcagcttcgtgaacatggagagagacctggccagcggcctgatcggccccctgctgatctgctacaaggagagcgtggaccagagaggcaaccagatcatgagcgacaagagaaacgtgatcctgttcagcgtgttcgacgagaacagaagctggtacctgaccgagaacatccagagattcctgcccaaccccgccggcgtgcagctggaggaccccgagttccaggccagcaacatcatgcacagcatcaacggctacgtgttcgacagcctgcagctgagcgtgtgcctgcacgaggtggcctactggtacatcctgagcatcggcgcccagaccgacttcctgagcgtgttcttcagcggctacaccttcaagcacaagatggtgtacgaggacaccctgaccctgttccccttcagcggcgagaccgtgttcatgagcatggagaaccccggcctgtggatcctgggctgccacaacagcgacttcagaaacagaggcatgaccgccctgctgaaggtgagcagctgcgacaagaacaccggcgactactacgaggacagctacgaggacatcagcgcctacctgctgagcaagaacaacgccatcgagcccagaagcttcagccagaacagcagacaccccagcaccagacagaagcagttcaacgccaccaccatccccgagaacgacatcgagaagaccgacccctggttcgcccacagaacccccatgcccaagatccagaacgtgagcagcagcgacctgctgatgctgctgagacagagccccaccccccacggcctgagcctgagcgacctgcaggaggccaagtacgagaccttcagcgacgaccccagccccggcgccatcgacagcaacaacagcctgagcgagatgacccacttcagaccccagctgcaccacagcggcgacatggtgttcacccccgagagcggcctgcagctgagactgaacgagaagctgggcaccaccgccgccaccgagctgaagaagctggacttcaaggtgagcagcaccagcaacaacctgatcagcaccatccccagcgacaacctggccgccggcaccgacaacaccagcagcctgggcccccccagcatgcccgtgcactacgacagccagctggacaccaccctgttcggcaagaagagcagccccctgaccgagagcggcggccccctgagcctgagcgaggagaacaacgacagcaagctgctggagagcggcctgatgaacagccaggagagcagctggggcaagaacgtgagcagcaccgagagcggcagactgttcaagggcaagagagcccacggccccgccctgctgaccaaggacaacgccctgttcaaggtgagcatcagcctgctgaagaccaacaagaccagcaacaacagcgccaccaacagaaagacccacatcgacggccccagcctgctgatcgagaacagccccagcgtgtggcagaacatcctggagagcgacaccgagttcaagaaggtgacccccctgatccacgacagaatgctgatggacaagaacgccaccgccctgagactgaaccacatgagcaacaagaccaccagcagcaagaacatggagatggtgcagcagaagaaggagggccccatcccccccgacgcccagaaccccgacatgagcttcttcaagatgctgttcctgcccgagagcgccagatggatccagagaacccacggcaagaacagcctgaacagcggccagggccccagccccaagcagctggtgagcctgggccccgagaagagcgtggagggccagaacttcctgagcgagaagaacaaggtggtggtgggcaagggcgagttcaccaaggacgtgggcctgaaggagatggtgttccccagcagcagaaacctgttcctgaccaacctggacaacctgcacgagaacaacacccacaaccaggagaagaagatccaggaggagatcgagaagaaggagaccctgatccaggagaacgtggtgctgccccagatccacaccgtgaccggcaccaagaacttcatgaagaacctgttcctgctgagcaccagacagaacgtggagggcagctacgacggcgcctacgcccccgtgctgcaggacttcagaagcctgaacgacagcaccaacagaaccaagaagcacaccgcccacttcagcaagaagggcgaggaggagaacctggagggcctgggcaaccagaccaagcagatcgtggagaagtacgcctgcaccaccagaatcagccccaacaccagccagcagaacttcgtgacccagagaagcaagagagccctgaagcagttcagactgcccctggaggagaccgagctggagaagagaatcatcgtggacgacaccagcacccagtggagcaagaacatgaagcacctgacccccagcaccctgacccagatcgactacaacgagaaggagaagggcgccatcacccagagccccctgagcgactgcctgaccagaagccacagcatcccccaggccaacagaagccccctgcccatcgccaaggtgagcagcttccccagcatcagacccatctacctgaccagagtgctgttccaggacaacagcagccacctgcccgccgccagctacagaaagaaggacagcggcgtgcaggagagcagccacttcctgcagggcgccaagaagaacaacctgagcctggccatcctgaccctggagatgaccggcgaccagagagaggtgggcagcctgggcaccagcgccaccaacagcgtgacctacaagaaggtggagaacaccgtgctgcccaagcccgacctgcccaagaccagcggcaaggtggagctgctgcccaaggtgcacatctaccagaaggacctgttccccaccgagaccagcaacggcagccccggccacctggacctggtggagggcagcctgctgcagggcaccgagggcgccatcaagtggaacgaggccaacagacccggcaaggtgcccttcctgagagtggccaccgagagcagcgccaagacccccagcaagctgctggaccccctggcctgggacaaccactacggcacccagatccccaaggaggagtggaagagccaggagaagagccccgagaagaccgccttcaagaagaaggacaccatcctgagcctgaacgcctgcgagagcaaccacgccatcgccgccatcaacgagggccagaacaagcccgagatcgaggtgacctgggccaagcagggcagaaccgagagactgtgcagccagaacccccccgtgctgaagagacaccagagagagatcaccagaaccaccctgcagagcgaccaggaggagatcgactacgacgacaccatcagcgtggagatgaagaaggaggacttcgacatctacgacgaggacgagaaccagagccccagaagcttccagaagaagaccagacactacttcatcgccgccgtggagagactgtgggactacggcatgagcagcagcccccacgtgctgagaaacagagcccagagcggcagcgtgccccagttcaagaaggtggtgttccaggagttcaccgacggcagcttcacccagcccctgtacagaggcgagctgaacgagcacctgggcctgctgggcccctacatcagagccgaggtggaggacaacatcatggtgaccttcagaaaccaggccagcagaccctacagcttctacagcagcctgatcagctacgaggaggaccagagacagggcgccgagcccagaaagaacttcgtgaagcccaacgagaccaagacctacttctggaaggtgcagcaccacatggcccccaccaaggacgagttcgactgcaaggcctgggcctacttcagcgacgtggacctggagaaggacgtgcacagcggcctgatcggccccctgctggtgtgccacaccaacaccctgaaccccgcccacggcagacaggtgaccgtgcaggagttcgccctgttcttcaccatcttcgacgagaccaagagctggtacttcaccgagaacatggagagaaactgcagagccccctgcaacatccagatggaggaccccaccttcaaggagaactacagattccacgccatcaacggctacatcatggacaccctgcccggcctggtgatggcccaggaccagagaatcagatggtacctgctgagcatgggcagcaacgagaacatccacagcatccacttcagcggccacgtgttcaccgtgagaaagaaggaggagtacaagatggccctgtacaacctgtaccccggcgtgttcgagaccgtggagatgctgcccagcaaggccggcatctggagagtggagtgcctgatcggcgagcacctgcacgccggcatgagcaccctgttcctggtgtacagcaacaagtgccagacccccctgggcatggccagcggccacatcagagacttccagatcaccgccagcggccagtacggccagtgggcccccaagctggccagactgcactacagcggcagcatcaacgcctggagcaccaaggagcccttcagctggatcaaggtggacctgctggcccccatgatcatccacggcatcaagacccagggcgccagacagaagttcagcagcctgtacatcagccagttcatcatcatgtacagcctggacggcaagaagtggcagacctacagaggcaacagcaccggcaccctgatggtgttcttcggcaacgtggacagcagcggcatcaagcacaacatcttcaacccccccatcatcgccagatacatcagactgcaccccacccactacagcatcagaagcaccctgagaatggagctgatgggctgcgacctgaacagctgcagcatgcccctgggcatggagagcaaggccatcagcgacgcccagatcaccgccagcagctacttcaccaacatgttcgccacctggagccccagcaaggccagactgcacctgcagggcagaagcaacgcctggagaccccaggtgaacaaccccaaggagtggctgcaggtggacttccagaagaccatgaaggtgaccggcgtgaccacccagggcgtgaagagcctgctgaccagcatgtacgtgaaggagttcctgatcagcagcagccaggacggccaccagtggaccctgttcttccagaacggcaaggtgaaggtgttccagggcaaccaggacagcttcacccccgtggtgaacagcctggacccccccctgctgaccagatacctgagaatccacccccagagctgggtgcaccagatcgccctgagaatggaggtgctgggctgcgaggcccaggacctgtactag

SEQ ID NO: 1812 - DNA, 999 bp, synthetic construct
  misc_feature 1..999: note = source = /note="Description of Artificial Sequence: Synthetic coding sequence"
  source 1..999: mol_type = other DNA
atgggcagacccctgcacctggtgctgctgagcgccagcctggccggcctgctgctgctgggcgagagcctgttcatcagaagagagcaggccaacaacatcctggccagagtgaccagagccaacagcttcctggaggagatgaagaagggccacctggagagagagtgcatggaggagacctgcagctacgaggaggccagagaggtgttcgaggacagcgacaagaccaacgagttctggaacaagtacaaggacggcgaccagtgcgagaccagcccctgccagaaccagggcaagtgcaaggacggcctgggcgagtacacctgcacctgcctggagggcttcgagggcaagaactgcgagctgttcaccagaaagctgtgcagcctggacaacggcgactgcgaccagttctgccacgaggagcagaacagcgtggtgtgcagctgcgccagaggctacaccctggccgacaacggcaaggcctgcatccccaccggcccctacccctgcggcaagcagaccctggagagaagaaagagaagcgtggcccaggccaccagcagcagcggcgaggcccccgacagcatcacctggaagccctacgacgccgccgacctggaccccaccgagaaccccttcgacctgctggacttcaaccagacccagcccgagagaggcgacaacaacctgaccagaatcgtgggcggccaggagtgcaaggacggcgagtgcccctggcaggccctgctgatcaacgaggagaacgagggcttctgcggcggcaccatcctgagcgagttctacatcctgaccgccgcccactgcctgtaccaggccaagagattcaagggcaccggcaccagaagcagaagaagagccgtgagaagatgcaccagatggagatggagcagcagcaccaccggcagccagagaagacccatgaccagcaccagcccctgcagcggcagcagaccccccagccccagcgcctag

SEQ ID NO: 1813 - DNA, 1467 bp, synthetic construct
  misc_feature 1..1467: note = source = /note="Description of Artificial Sequence: Synthetic coding sequence"
  source 1..1467: mol_type = other DNA
atgggcagacccctgcacctggtgctgctgagcgccagcctggccggcctgctgctgctgggcgagagcctgttcatcagaagagagcaggccaacaacatcctggccagagtgaccagagccaacagcttcctggaggagatgaagaagggccacctggagagagagtgcatggaggagacctgcagctacgaggaggccagagaggtgttcgaggacagcgacaagaccaacgagttctggaacaagtacaaggacggcgaccagtgcgagaccagcccctgccagaaccagggcaagtgcaaggacggcctgggcgagtacacctgcacctgcctggagggcttcgagggcaagaactgcgagctgttcaccagaaagctgtgcagcctggacaacggcgactgcgaccagttctgccacgaggagcagaacagcgtggtgtgcagctgcgccagaggctacaccctggccgacaacggcaaggcctgcatccccaccggcccctacccctgcggcaagcagaccctggagagaagaaagagaagcgtggcccaggccaccagcagcagcggcgaggcccccgacagcatcacctggaagccctacgacgccgccgacctggaccccaccgagaaccccttcgacctgctggacttcaaccagacccagcccgagagaggcgacaacaacctgaccagaatcgtgggcggccaggagtgcaaggacggcgagtgcccctggcaggccctgctgatcaacgaggagaacgagggcttctgcggcggcaccatcctgagcgagttctacatcctgaccgccgcccactgcctgtaccaggccaagagattcaaggtgagagtgggcgacagaaacaccgagcaggaggagggcggcgaggccgtgcacgaggtggaggtggtgatcaagcacaacagattcaccaaggagacctacgacttcgacatcgccgtgctgagactgaagacccccatcaccttcagaatgaacgtggcccccgcctgcctgcccgagagagactgggccgagagcaccctgatgacccagaagaccggcatcgtgagcggcttcggcagaacccacgagaagggcagacagagcaccagactgaagatgctggaggtgccctacgtggacagaaacagctgcaagctgagcagcagcttcatcatcacccagaacatgttctgcgccggctacgacaccaagcaggaggacgcctgccagggcgacagcggcggcccccacgtgaccagattcaaggacacctacttcgtgaccggcatcgtgagctggggcgagggctgcgccagaaagggcaagtacggcatctacaccaaggtgaccgccttcctgaagtggatcgacagaagcatgaagaccagaggcctgcccaaggccaagagccacgcccccgaggtgatcaccagcagccccctgaagtag

SEQ ID NO: 1814 - DNA, 1005 bp, synthetic construct
  misc_feature 1..1005: note = source = /note="Description of Artificial Sequence: Synthetic coding sequence"
  source 1..1005: mol_type = other DNA
atgggcagacccctgcacctggtgctgctgagcgccagcctggccggcctgctgctgctgggcgagagcctgttcatcagaagagagcaggccaacaacatcctggccagagtgaccagagccaacagcttcctggaggagatgaagaagggccacctggagagagagtgcatggaggagacctgcagctacgaggaggccagagaggtgttcgaggacagcgacaagaccaacgagttctggaacaagtacaaggacggcgaccagtgcgagaccagcccctgccagaaccagggcaagtgcaaggacggcctgggcgagtacacctgcacctgcctggagggcttcgagggcaagaactgcgagctgttcaccagaaagctgtgcagcctggacaacggcgactgcgaccagttctgccacgaggagcagaacagcgtggtgtgcagctgcgccagaggctacaccctggccgacaacggcaaggcctgcatccccaccggcccctacccctgcggcaagcagaccctggagagaagaaagagaagcgtggcccaggccaccagcagcagcggcgaggcccccgacagcatcacctggaagccctacgacgccgccgacctggaccccaccgagaaccccttcgacctgctggacttcaaccagacccagcccgagagaggcgacaacaacctgaccagaatcgtgggcggccaggagtgcaaggacggcgagtgcccctggcaggccctgctgatcaacgaggagaacgagggcttctgcggcggcaccatcctgagcgagttctacatcctgaccgccgcccactgcctgtaccaggccaagagattcaaggtgagaggcaccggcaccagaagcagaagaagagccgtgagaagatgcaccagatggagatggagcagcagcaccaccggcagccagagaagacccatgaccagcaccagcccctgcagcggcagcagaccccccagccccagcgcctag

SEQ ID NO: 1815 - DNA, 1722 bp, synthetic construct
  misc_feature 1..1722: note = source = /note="Description of Artificial Sequence: Synthetic coding sequence"
  source 1..1722: mol_type = other DNA
atgatcttcctgtaccaggtggtgcacttcatcctgttcaccagcgtgagcggcgagtgcgtgacccagctgctgaaggacacctgcttcgagggcggcgacatcaccaccgtgttcacccccagcgccaagtactgccaggtggtgtgcacctaccaccccagatgcctgctgttcaccttcaccgccgagagccccagcgaggaccccaccagatggttcacctgcgtgctgaaggacagcgtgaccgagaccctgcccagagtgaacagaaccgccgccatcagcggctacagcttcaagcagtgcagccaccagatcagcgtgaacaacatctgcctgctgaagcacacccagaccggcacccccaccagaatcaccaagctggacaaggtggtgagcggcttcagcctgaagagctgcgccctgagcaacctggcctgcatcagagacatcttccccaacaccgtgttcgccgacagcaacatcgacagcgtgatggcccccgacgccttcgtgtgcggcagaatctgcacccaccaccccggctgcctgttcttcaccttcttcagccaggagtggcccaaggagagccagagaaacctgtgcctgctgaagaccagcgagagcggcctgcccagcaccagaatcaagaagagcaaggccctgagcggcttcagcctgcagagctgcagacacagcatccccgtgttctgccacagcagcttctaccacgacaccgacttcctgggcgaggagctggacatcgtggccgccaagagccacgaggcctgccagaagctgtgcaccaacgccgtgagatgccagttcttcacctacacccccgcccaggccagctgcaacgagggcaagggcaagtgctacctgaagctgagcagcaacggcagccccaccaagatcctgcacggcagaggcggcatcagcggctacaccctgagactgtgcaagatggacaacgagtgcaccaccaagatcaagcccagaatcgtgggcggcaccgccagcgtgagaggcgagtggccctggcaggtgaccctgcacaccaccagccccacccagagacacctgtgcggcggcagcatcatcggcaaccagtggatcctgaccgccgcccactgcttctacggcgtggagagccccaagatcctgagagtgtacagcggcatcctgaaccagagcgagatcaaggaggacaccagcttcttcggcgtgcaggagatcatcatccacgaccagtacaagatggccgagagcggctacgacatcgccctgctgaagctggagaccaccgtgaactacaccgacagccagagacccatctgcctgcccagcaagggcgacagaaacgtgatctacaccgactgctgggtgaccggctggggctacagaaagctgagagacaagatccagaacaccctgcagaaggccaagatccccctggtgaccaacgaggagtgccagaagagatacagaggccacaagatcacccacaagatgatctgcgccggctacagagagggcggcaaggacgcctgcaagggcgacagcggcggccccctgagctgcaagcacaacgaggtgtggcacctggtgggcatcaccagctggggcgagggctgcgcccagagagagagacccggcgtgtacaccaacgtggtggagtacgtggactggatcctggagaagacccaggccgtgtag

SEQ ID NO: 1816 - DNA, 1878 bp, synthetic construct
  misc_feature 1..1878: note = source = /note="Description of Artificial Sequence: Synthetic coding sequence"
  source 1..1878: mol_type = other DNA
atgatcttcctgtaccaggtggtgcacttcatcctgttcaccagcgtgagcggcgagtgcgtgacccagctgctgaaggacacctgcttcgagggcggcgacatcaccaccgtgttcacccccagcgccaagtactgccaggtggtgtgcacctaccaccccagatgcctgctgttcaccttcaccgccgagagccccagcgaggaccccaccagatggttcacctgcgtgctgaaggacagcgtgaccgagaccctgcccagagtgaacagaaccgccgccatcagcggctacagcttcaagcagtgcagccaccagatcagcgcctgcaacaaggacatctacgtggacctggacatgaagggcatcaactacaacagcagcgtggccaagagcgcccaggagtgccaggagagatgcaccgacgacgtgcactgccacttcttcacctacgccaccagacagttccccagcctggagcacagaaacatctgcctgctgaagcacacccagaccggcacccccaccagaatcaccaagctggacaaggtggtgagcggcttcagcctgaagagctgcgccctgagcaacctggcctgcatcagagacatcttccccaacaccgtgttcgccgacagcaacatcgacagcgtgatggcccccgacgccttcgtgtgcggcagaatctgcacccaccaccccggctgcctgttcttcaccttcttcagccaggagtggcccaaggagagccagagaaacctgtgcctgctgaagaccagcgagagcggcctgcccagcaccagaatcaagaagagcaaggccctgagcggcttcagcctgcagagctgcagacacagcatccccgtgttctgccacagcagcttctaccacgacaccgacttcctgggcgaggagctggacatcgtggccgccaagagccacgaggcctgccagaagctgtgcaccaacgccgtgagatgccagttcttcacctacacccccgcccaggccagctgcaacgagggcaagggcaagtgctacctgaagctgagcagcaacggcagccccaccaagatcctgcacggcagaggcggcatcagcggctacaccctgagactgtgcaagatggacaacgagtgcaccaccaagatcaagcccagaatcgtgggcggcaccgccagcgtgagaggcgagtggccctggcaggtgaccctgcacaccaccagccccacccagagacacctgtgcggcggcagcatcatcggcaaccagtggatcctgaccgccgcccactgcttctacggcgtggagagccccaagatcctgagagtgtacagcggcatcctgaaccagagcgagatcaaggaggacaccagcttcttcggcgtgcaggagatcatcatccacgaccagtacaagatggccgagagcggctacgacatcgccctgctgaagctggagaccaccgtgaactacaccgacagccagagacccatctgcctgcccagcaagggcgacagaaacgtgatctacaccgactgctgggtgaccggctggggctacagaaagctgagagacaagatccagaacaccctgcagaaggccaagatccccctggtgaccaacgaggagtgccagaagagatacagaggccacaagatcacccacaagatgatctgcgccggctacagagagggcggcaaggacgcctgcaagggcgacagcggcggccccctgagctgcaagcacaacgaggtgtggcacctggtgggcatcaccagctggggcgagggctgcgcccagagagagagacccggcgtgtacaccaacgtggtggagtacgtggactggatcctggagaagacccaggccgtgtag

SEQ ID NO: 1817 - DNA, 633 bp, synthetic construct
  misc_feature 1..633: note = source = /note="Description of Artificial Sequence: Synthetic coding sequence"
  source 1..633: mol_type = other DNA
tgaagcggcttcagcctgaagagctgcgccctgagcaacctggcctgcatcagagacatcttccccaacaccgtgttcgccgacagcaacatcgacagcgtgatggcccccgacgccttcgtgtgcggcagaatctgcacccaccaccccggctgcctgttcttcaccttcttcagccaggagtggcccaaggagagccagagaaacctgtgcctgctgaagaccagcgagagcggcctgcccagcaccagaatcaagaagagcaaggccctgagcggcttcagcctgcagagctgcagacacagcatccccgtgttctgccacagcagcttctaccacgacaccgacttcctgggcgaggagctggacatcgtggccgccaagagccacgaggcctgccagaagctgtgcaccaacgccgtgagatgccagttcttcacctacacccccgcccaggccagctgcaacgagggcaagggcaagtgctacctgaagctgagcagcaacggcagccccaccaagatcctgcacggcagaggcggcatcagcggctacaccctgagactgtgcaagatggacaacgagctgagaggcgcccccatgaagatcagcggctggctgaagaccagctag

SEQ ID NO: 1818 - DNA, 2199 bp, synthetic construct
  misc_feature 1..2199: note = source = /note="Description of Artificial Sequence: Synthetic coding sequence"
  source 1..2199: mol_type = other DNA
atgagcgagaccagcagaaccgccttcggcggcagaagagccgtgccccccaacaacagcaacgccgccgaggacgacctgcccaccgtggagctgcagggcgtggtgcccagaggcgtgaacctgcaggagttcctgaacgtgaccagcgtgcacctgttcaaggagagatgggacaccaacaaggtggaccaccacaccgacaagtacgagaacaacaagctgatcgtgagaagaggccagagcttctacgtgcagatcgacttcagcagaccctacgaccccagaagagacctgttcagagtggagtacgtgatcggcagatacccccaggagaacaagggcacctacatccccgtgcccatcgtgagcgagctgcagagcggcaagtggggcgccaagatcgtgatgagagaggacagaagcgtgagactgagcatccagagcagccccaagtgcatcgtgggcaagttcagaatgtacgtggccgtgtggaccccctacggcgtgctgagaaccagcagaaaccccgagaccgacacctacatcctgttcaacccctggtgcgaggacgacgccgtgtacctggacaacgagaaggagagagaggagtacgtgctgaacgacatcggcgtgatcttctacggcgaggtgaacgacatcaagaccagaagctggagctacggccagttcgaggacggcatcctggacacctgcctgtacgtgatggacagagcccagatggacctgagcggcagaggcaaccccatcaaggtgagcagagtgggcagcgccatggtgaacgccaaggacgacgagggcgtgctggtgggcagctgggacaacatctacgcctacggcgtgccccccagcgcctggaccggcagcgtggacatcctgctggagtacagaagcagcgagaaccccgtgagatacggccagtgctgggtgttcgccggcgtgttcaacaccttcctgagatgcctgggcatccccgccagaatcgtgaccaactacttcagcgcccacgacaacgacgccaacctgcagatggacatcttcctggaggaggacggcaacgtgaacagcaagctgaccaaggacagcgtgtggaactaccactgctggaacgaggcctggatgaccagacccgacctgcccgtgggcttcggcggctggcaggccgtggacagcaccccccaggagaacagcgacggcatgtacagatgcggccccgccagcgtgcaggccatcaagcacggccacgtgtgcttccagttcgacgcccccttcgtgttcgccgaggtgaacagcgacctgatctacatcaccgccaagaaggacggcacccacgtggtggagaacgtggacgccacccacatcggcaagctgatcgtgaccaagcagatcggcggcgacggcatgatggacatcaccgacacctacaagttccaggagggccaggaggaggagagactggccctggagaccgccctgatgtacggcgccaagaagcccctgaacaccgagggcgtgatgaagagcagaagcaacgtggacatggacttcgaggtggagaacgccgtgctgggcaaggacttcaagctgagcatcaccttcagaaacaacagccacaacagatacaccatcaccgcctacctgagcgccaacatcaccttctacaccggcgtgcccaaggccgagttcaagaaggagaccttcgacgtgaccctggagcccctgagcttcaagaaggaggccgtgctgatccaggccggcgagtacatgggccagctgctggagcaggccagcctgcacttcttcgtgaccgccagaatcaacgagaccagagacgtgctggccaagcagaagagcaccgtgctgaccatccccgagatcatcatcaaggtgagaggcacccaggtggtgggcagcgacatgaccgtgaccgtggagttcaccaaccccctgaaggagaccctgagaaacgtgtgggtgcacctggacggccccggcgtgaccagacccatgaagaagatgttcagagagatcagacccaacagcaccgtgcagtgggaggaggtgtgcagaccctgggtgagcggccacagaaagctgatcgccagcatgagcagcgacagcctgagacacgtgtacggcgagctggacgtgcagatccagagaagacccagcatgtag

SEQ ID NO: 1819 - DNA, 417 bp, synthetic construct
  misc_feature 1..417: note = source = /note="Description of Artificial Sequence: Synthetic coding sequence"
  source 1..417: mol_type = other DNA
atgagcgagaccagcagaaccgccttcggcggcagaagagccgtgccccccaacaacagcaacgccgccgaggacgacctgcccaccgtggagctgcagggcgtggtgcccagaggcgtgaacctgcaggagttcctgaacgtgaccagcgtgcacctgttcaaggagagatgggacaccaacaaggtggaccaccacaccgacaagtacgagaacaacaagctgatcgtgagaagaggccagagcttctacgtgcagatcgacttcagcagaccctacgaccccagaagagacctgttcagagtggagtacgtgatcggcagatacccccaggagaacaagggcacctacatccccgtgcccatcgtgagcgagctgcagagcggcaagtggggcgccaagatcgtgatgagatag

SEQ ID NO: 1820 - DNA, 1881 bp, synthetic construct
  misc_feature 1..1881: note = source = /note="Description of Artificial Sequence: Synthetic coding sequence"
  source 1..1881: mol_type = other DNA
atgagcgagaccagcagaaccgccttcggcggcagaagagccgtgccccccaacaacagcaacgccgccgaggacgacctgcccaccgtggagctgcagggcgtggtgcccagaggcgtgaacctgcagggcagatacccccaggagaacaagggcacctacatccccgtgcccatcgtgagcgagctgcagagcggcaagtggggcgccaagatcgtgatgagagaggacagaagcgtgagactgagcatccagagcagccccaagtgcatcgtgggcaagttcagaatgtacgtggccgtgtggaccccctacggcgtgctgagaaccagcagaaaccccgagaccgacacctacatcctgttcaacccctggtgcgaggacgacgccgtgtacctggacaacgagaaggagagagaggagtacgtgctgaacgacatcggcgtgatcttctacggcgaggtgaacgacatcaagaccagaagctggagctacggccagttcgaggacggcatcctggacacctgcctgtacgtgatggacagagcccagatggacctgagcggcagaggcaaccccatcaaggtgagcagagtgggcagcgccatggtgaacgccaaggacgacgagggcgtgctggtgggcagctgggacaacatctacgcctacggcgtgccccccagcgcctggaccggcagcgtggacatcctgctggagtacagaagcagcgagaaccccgtgagatacggccagtgctgggtgttcgccggcgtgttcaacaccttcctgagatgcctgggcatccccgccagaatcgtgaccaactacttcagcgcccacgacaacgacgccaacctgcagatggacatcttcctggaggaggacggcaacgtgaacagcaagctgaccaaggacagcgtgtggaactaccactgctggaacgaggcctggatgaccagacccgacctgcccgtgggcttcggcggctggcaggccgtggacagcaccccccaggagaacagcgacggcatgtacagatgcggccccgccagcgtgcaggccatcaagcacggccacgtgtgcttccagttcgacgcccccttcgtgttcgccgaggtgaacagcgacctgatctacatcaccgccaagaaggacggcacccacgtggtggagaacgtggacgccacccacatcggcaagctgatcgtgaccaagcagatcggcggcgacggcatgatggacatcaccgacacctacaagttccaggagggccaggaggaggagagactggccctggagaccgccctgatgtacggcgccaagaagcccctgaacaccgagggcgtgatgaagagcagaagcaacgtggacatggacttcgaggtggagaacgccgtgctgggcaaggacttcaagctgagcatcaccttcagaaacaacagccacaacagatacaccatcaccgcctacctgagcgccaacatcaccttctacaccggcgtgcccaaggccgagttcaagaaggagaccttcgacgtgaccctggagcccctgagcttcaagaaggaggccgtgctgatccaggccggcgagtacatgggccagctgctggagcaggccagcctgcacttcttcgtgaccgccagaatcaacgagaccagagacgtgctggccaagcagaagagcaccgtgctgaccatccccgagatcatcatcaaggtgagaggcacccaggtggtgggcagcgacatgaccgtgaccgaggtgtgcagaccctgggtgagcggccacagaaagctgatcgccagcatgagcagcgacagcctgagacacgtgtacggcgagctggacgtgcagatccagagaagacccagcatgtag

SEQ ID NO: 1821 - DNA, 8835 bp, synthetic construct
  misc_feature 1..8835: note = source = /note="Description of Artificial Sequence: Synthetic coding sequence"
  source 1..8835: mol_type = other DNA
atgaccctgagactgctggtggccgccctgtgcgccggcatcctggccgaggcccccagagtgagagcccagcacagagagagagtgacctgcaccagactgtacgccgccgacatcgtgttcctgctggacggcagcagcagcatcggcagaagcaacttcagagaggtgagaagcttcctggagggcctggtgctgcccttcagcggcgccgccagcgcccagggcgtgagattcgccaccgtgcagtacagcgacgaccccagaaccgagttcggcctggacgccctgggcagcggcggcgacgtgatcagagccatcagagagctgagctacaagggcggcaacaccagaaccggcgccgccatcctgcacgtggccgaccacgtgttcctgccccagctggccagacccggcgtgcccaaggtgtgcatcctgatcaccgacggcaagagccaggacctggtggacaccgccgcccagagactgaagggccagggcgtgaagctgttcgccgtgggcatcaagaacgccgaccccgaggagctgaagagagtggccagccagcccaccagcgacttcttcttcttcgtgaacgacttcagcatcctgagaaccctgctgcccctggtgagcagaagagtgtgcaccaccgccggcggcgtgcccgtgaccagaccccccgacgacagcaccagcgcccccagagacctggtgctgagcgagcccagcagccagagcctgagagtgcagtggaccgccgccagcggccccgtgaccggctacaaggtgcagtacacccccctgaccggcctgggccagcccctgcccagcgagagacaggaggtgaacgtgcccgccggcgagaccagcgtgagactgagaggcctgagacccctgaccgagtaccaggtgaccgtgatcgccctgtacgccaacagcatcggcgaggccgtgagcggcaccgccagaaccaccgccctggagggccccgagctgaccatccagaacaccaccgcccacagcctgctggtggcctggagaagcgtgcccggcgccaccggctacagagtgacctggagagtgctgagcggcggccccacccagcagcaggagctgggccccggccagggcagcgtgctgctgagagacctggagcccggcaccgactacgaggtgaccgtgagcaccctgttcggcagaagcgtgggccccgccaccagcctgatggccagaaccgacgccagcgtggagcagaccctgagacccgtgatcctgggccccaccagcatcctgctgagctggaacctggtgcccgaggccagaggctacagactggagtggagaagagagaccggcctggagcccccccagaaggtggtgctgcccagcgacgtgaccagataccagctggacggcctgcagcccggcaccgagtacagactgaccctgtacaccctgctggagggccacgaggtggccacccccgccaccgtggtgcccaccggccccgagctgcccgtgagccccgtgaccgacctgcaggccaccgagctgcccggccagagagtgagagtgagctggagccccgtgcccggcgccacccagtacagaatcatcgtgagaagcacccagggcgtggagagaaccctggtgctgcccggcagccagaccgccttcgacctggacgacgtgcaggccggcctgagctacaccgtgagagtgagcgccagagtgggccccagagagggcagcgccagcgtgctgaccgtgagaagagagcccgagacccccctggccgtgcccggcctgagagtggtggtgagcgacgccaccagagtgagagtggcctggggccccgtgcccggcgccagcggcttcagaatcagctggagcaccggcagcggccccgagagcagccagaccctgccccccgacagcaccgccaccgacatcaccggcctgcagcccggcaccacctaccaggtggccgtgagcgtgctgagaggcagagaggagggccccgccgccgtgatcgtggccagaaccgaccccctgggccccgtgagaaccgtgcacgtgacccaggccagcagcagcagcgtgaccatcacctggaccagagtgcccggcgccaccggctacagagtgagctggcacagcgcccacggccccgagaagagccagctggtgagcggcgaggccaccgtggccgagctggacggcctggagcccgacaccgagtacaccgtgcacgtgagagcccacgtggccggcgtggacggcccccccgccagcgtggtggtgagaaccgcccccgagcccgtgggcagagtgagcagactgcagatcctgaacgccagcagcgacgtgctgagaatcacctgggtgggcgtgaccggcgccaccgcctacagactggcctggggcagaagcgagggcggccccatgagacaccagatcctgcccggcaacaccgacagcgccgagatcagaggcctggagggcggcgtgagctacagcgtgagagtgaccgccctggtgggcgacagagagggcacccccgtgagcatcgtggtgaccaccccccccgaggccccccccgccctgggcaccctgcacgtggtgcagagaggcgagcacagcctgagactgagatgggagcccgtgcccagagcccagggcttcctgctgcactggcagcccgagggcggccaggagcagagcagagtgctgggccccgagctgagcagctaccacctggacggcctggagcccgccacccagtacagagtgagactgagcgtgctgggccccgccggcgagggccccagcgccgaggtgaccgccagaaccgagagccccagagtgcccagcatcgagctgagagtggtggacaccagcatcgacagcgtgaccctggcctggacccccgtgagcagagccagcagctacatcctgagctggagacccctgagaggccccggccaggaggtgcccggcagcccccagaccctgcccggcatcagcagcagccagagagtgaccggcctggagcccggcgtgagctacatcttcagcctgacccccgtgctggacggcgtgagaggccccgaggccagcgtgacccagacccccgtgtgccccagaggcctggccgacgtggtgttcctgccccacgccacccaggacaacgcccacagagccgaggccaccagaagagtgctggagagactggtgctggccctgggccccctgggcccccaggccgtgcaggtgggcctgctgagctacagccacagacccagccccctgttccccctgaacggcagccacgacctgggcatcatcctgcagagaatcagagacatgccctacatggaccccagcggcaacaacctgggcaccgccgtggtgaccgcccacagatacatgctggcccccgacgcccccggcagaagacagcacgtgcccggcgtgatggtgctgctggtggacgagcccctgagaggcgacatcttcagccccatcagagaggcccaggccagcggcctgaacgtggtgatgctgggcatggccggcgccgaccccgagcagctgagaagactggcccccggcatggacagcgtgcagaccttcttcgccgtggacgacggccccagcctggaccaggccgtgagcggcctggccaccgccctgtgccaggccagcttcaccacccagcccagacccgagccctgccccgtgtactgccccaagggccagaagggcgagcccggcgagatgggcctgagaggccaggtgggcccccccggcgaccccggcctgcccggcagaaccggcgcccccggcccccagggcccccccggcagcgccaccgccaagggcgagagaggcttccccggcgccgacggcagacccggcagccccggcagagccggcaaccccggcacccccggcgcccccggcctgaagggcagccccggcctgcccggccccagaggcgaccccggcgagagaggccccagaggccccaagggcgagcccggcgcccccggccaggtgatcggcggcgagggccccggcctgcccggcagaaagggcgaccccggccccagcggcccccccggccccagaggccccctgggcgaccccggccccagaggcccccccggcctgcccggcaccgccatgaagggcgacaagggcgacagaggcgagagaggcccccccggccccggcgagggcggcatcgcccccggcgagcccggcctgcccggcctgcccggcagccccggcccccagggccccgtgggcccccccggcaagaagggcgagaagggcgacagcgaggacggcgcccccggcctgcccggccagcccggcagccccggcgagcagggccccagaggcccccccggcgccatcggccccaagggcgacagaggcttccccggccccctgggcgaggccggcgagaagggcgagagaggcccccccggccccgccggcagcagaggcctgcccggcgtggccggcagacccggcgccaagggccccgagggcccccccggccccaccggcagacagggcgagaagggcgagcccggcagacccggcgaccccgccgtggtgggccccgccgtggccggccccaagggcgagaagggcgacgtgggccccgccggccccagaggcgccaccggcgtgcagggcgagagaggcccccccggcctggtgctgcccggcgaccccggccccaagggcgaccccggcgacagaggccccatcggcctgaccggcagagccggcccccccggcgacagcggcccccccggcgagaagggcgaccccggcagacccggcccccccggccccgtgggccccagaggcagagacggcgaggtgggcgagaagggcgacgagggcccccccggcgaccccggcctgcccggcaaggccggcgagagaggcctgagaggcgcccccggcgtgagaggccccgtgggcgagaagggcgaccagggcgaccccggcgaggacggcagaaacggcagccccggcagcagcggccccaagggcgacagaggcgagcccggcccccccggcccccccggcagactggtggacaccggccccggcgccagagagaagggcgagcccggcgacagaggccaggagggccccagaggccccaagggcgaccccggcctgcccggcgcccccggcgagagaggcatcgagggcttcagaggcccccccggcccccagggcgaccccggcgtgagaggccccgccggcgagaagggcgacagaggcccccccggcctggacggcagaagcggcctggacggcaagcccggcgccgccggccccagcggccccaacggcgccgccggcaaggccggcgaccccggcagagacggcctgcccggcctgagaggcgagcagggcctgcccggccccagcggcccccccggcctgcccggcaagcccggcgaggacggcaagcccggcctgaacggcaagaacggcgagcccggcgaccccggcgaggacggcagaaagggcgagaagggcgacagcggcgccagcggcagagagggcagagacggccccaagggcgagagaggcgcccccggcatcctgggcccccagggcccccccggcctgcccggccccgtgggcccccccggccagggcttccccggcgtgcccggcggcaccggccccaagggcgacagaggcgagaccggcagcaagggcgagcagggcctgcccggcgagagaggcctgagaggcgagcccggcagcgtgcccaacgtggacagactgctggagaccgccggcatcaaggccagcgccctgagagagatcgtggagacctgggacgagagcagcggcagcttcctgcccgtgcccgagagaagaagaggccccaagggcgacagcggcgagcagggcccccccggcaaggagggccccatcggcttccccggcgagagaggcctgaagggcgacagaggcgaccccggcccccagggcccccccggcctggccctgggcgagagaggcccccccggccccagcggcctggccggcgagcccggcaagcccggcatccccggcctgcccggcagagccggcggcgtgggcgaggccggcagacccggcgagagaggcgagagaggcgagaagggcgagagaggcgagcagggcagagacggcccccccggcctgcccggcacccccggcccccccggcccccccggccccaaggtgagcgtggacgagcccggccccggcctgagcggcgagcagggcccccccggcctgaagggcgccaagggcgagcccggcagcaacggcgaccagggccccaagggcgacagaggcgtgcccggcatcaagggcgacagaggcgagcccggccccagaggccaggacggcaaccccggcctgcccggcgagagaggcatggccggccccgagggcaagcccggcctgcagggccccagaggcccccccggccccgtgggcggccacggcgaccccggcccccccggcgcccccggcctggccggccccgccggcccccagggccccagcggcctgaagggcgagcccggcgagaccggcccccccggcagaggcctgaccggccccaccggcgccgtgggcctgcccggcccccccggccccagcggcctggtgggcccccagggcagccccggcctgcccggccaggtgggcgagaccggcaagcccggcgcccccggcagagacggcgccagcggcaaggacggcgacagaggcagccccggcgtgcccggcagccccggcctgcccggccccgtgggccccaagggcgagcccggccccaccggcgcccccggccaggccgtggtgggcctgcccggcgccaagggcgagaagggcgcccccggcggcctggccggcgacctggtgggcgagcccggcgccaagggcgacagaggcctgcccggccccagaggcgagaagggcgaggccggcagagccggcgagcccggcgaccccggcgaggacggccagaagggcgcccccggccccaagggcttcaagggcgaccccggcgtgggcgtgcccggcagccccggcccccccggcccccccggcgtgaagggcgacctgggcctgcccggcctgcccggcgcccccggcgtggtgggcttccccggccagaccggccccagaggcgagatgggccagcccggccccagcggcgagagaggcctggccggcccccccggcagagagggcatccccggccccctgggcccccccggcccccccggcagcgtgggcccccccggcgccagcggcctgaagggcgacaagggcgaccccggcgtgggcctgcccggccccagaggcgagagaggcgagcccggcatcagaggcgaggacggcagacccggccaggagggccccagaggcctgaccggcccccccggcagcagaggcgagagaggcgagaagggcgacgtgggcagcgccggcctgaagggcgacaagggcgacagcgccgtgatcctgggcccccccggccccagaggcgccaagggcgacatgggcgagagaggccccagaggcctggacggcgacaagggccccagaggcgacaacggcgaccccggcgacaagggcagcaagggcgagcccggcgacaagggcagcgccggcctgcccggcctgagaggcctgctgggcccccagggccagcccggcgccgccggcatccccggcgaccccggcagccccggcaaggacggcgtgcccggcatcagaggcgagaagggcgacgtgggcttcatgggccccagaggcctgaagggcgagagaggcgtgaagggcgcctgcggcctggacggcgagaagggcgacaagggcgaggccggcccccccggcagacccggcctggccggccacaagggcgagatgggcgagcccggcgtgcccggccagagcggcgcccccggcaaggagggcctgatcggccccaagggcgacagaggcttcgacggccagcccggccccaagggcgaccagggcgagaagggcgagagaggcacccccggcatcggcggcttccccggccccagcggcaacgacggcagcgccggcccccccggcccccccggcagcgtgggccccagaggccccgagggcctgcagggccagaagggcgagagaggcccccccggcgagagagtggtgggcgcccccggcgtgcccggcgcccccggcgagagaggcgagcagggcagacccggccccgccggccccagaggcgagaagggcgaggccgccctgaccgaggacgacatcagaggcttcgtgagacaggagatgagccagcactgcgcctgccagggccagttcatcgccagcggcagcagacccctgcccagctacgccgccgacaccgccggcagccagctgcacgccgtgcccgtgctgagagtgagccacgccgaggaggaggagagagtgccccccgaggacgacgagtacagcgagtacagcgagtacagcgtggaggagtaccaggaccccgaggccccctgggacagcgacgacccctgcagcctgcccctggacgagggcagctgcaccgcctacaccctgagatggtaccacagagccgtgaccggcagcaccgaggcctgccaccccttcgtgtacggcggctgcggcggcaacgccaacagattcggcaccagagaggcctgcgagagaagatgcccccccagagtggtgcagagccagggcaccggcaccgcccaggactag

SEQ ID NO: 1822 - DNA, 8739 bp, synthetic construct
  misc_feature 1..8739: note = source = /note="Description of Artificial Sequence: Synthetic coding sequence"
  source 1..8739: mol_type = other DNA
atgaccctgagactgctggtggccgccctgtgcgccggcatcctggccgaggcccccagagtgagagcccagcacagagagagagtgacctgcaccagactgtacgccgccgacatcgtgttcctgctggacggcagcagcagcatcggcagaagcaacttcagagaggtgagaagcttcctggagggcctggtgctgcccttcagcggcgccgccagcgcccagggcgtgagattcgccaccgtgcagtacagcgacgaccccagaaccgagttcggcctggacgccctgggcagcggcggcgacgtgatcagagccatcagagagctgagctacaagggcggcaacaccagaaccggcgccgccatcctgcacgtggccgaccacgtgttcctgccccagctggccagacccggcgtgcccaaggtgtgcatcctgatcaccgacggcaagagccaggacctggtggacaccgccgcccagagactgaagggccagggcgtgaagctgttcgccgtgggcatcaagaacgccgaccccgaggagctgaagagagtggccagccagcccaccagcgacttcttcttcttcgtgaacgacttcagcatcctgagaaccctgctgcccctggtgagcagaagagtgtgcaccaccgccggcggcgtgcccgtgaccagaccccccgacgacagcaccagcgcccccagagacctggtgctgagcgagcccagcagccagagcctgagagtgcagtggaccgccgccagcggccccgtgaccggctacaaggtgcagtacacccccctgaccggcctgggccagcccctgcccagcgagagacaggaggtgaacgtgcccgccggcgagaccagcgtgagactgagaggcctgagacccctgaccgagtaccaggtgaccgtgatcgccctgtacgccaacagcatcggcgaggccgtgagcggcaccgccagaaccaccgccctggagggccccgagctgaccatccagaacaccaccgcccacagcctgctggtggcctggagaagcgtgcccggcgccaccggctacagagtgacctggagagtgctgagcggcggccccacccagcagcaggagctgggccccggccagggcagcgtgctgctgagagacctggagcccggcaccgactacgaggtgaccgtgagcaccctgttcggcagaagcgtgggccccgccaccagcctgatggccagaaccgacgccagcgtggagcagaccctgagacccgtgatcctgggccccaccagcatcctgctgagctggaacctggtgcccgaggccagaggctacagactggagtggagaagagagaccggcctggagcccccccagaaggtggtgctgcccagcgacgtgaccagataccagctggacggcctgcagcccggcaccgagtacagactgaccctgtacaccctgctggagggccacgaggtggccacccccgccaccgtggtgcccaccggccccgagctgcccgtgagccccgtgaccgacctgcaggccaccgagctgcccggccagagagtgagagtgagctggagccccgtgcccggcgccacccagtacagaatcatcgtgagaagcacccagggcgtggagagaaccctggtgctgcccggcagccagaccgccttcgacctggacgacgtgcaggccggcctgagctacaccgtgagagtgagcgccagagtgggccccagagagggcagcgccagcgtgctgaccgtgagaagagagcccgagacccccctggccgtgcccggcctgagagtggtggtgagcgacgccaccagagtgagagtggcctggggccccgtgcccggcgccagcggcttcagaatcagctggagcaccggcagcggccccgagagcagccagaccctgccccccgacagcaccgccaccgacatcaccggcctgcagcccggcaccacctaccaggtggccgtgagcgtgctgagaggcagagaggagggccccgccgccgtgatcgtggccagaaccgaccccctgggccccgtgagaaccgtgcacgtgacccaggccagcagcagcagcgtgaccatcacctggaccagagtgcccggcgccaccggctacagagtgagctggcacagcgcccacggccccgagaagagccagctggtgagcggcgaggccaccgtggccgagctggacggcctggagcccgacaccgagtacaccgtgcacgtgagagcccacgtggccggcgtggacggcccccccgccagcgtggtggtgagaaccgcccccgagcccgtgggcagagtgagcagactgcagatcctgaacgccagcagcgacgtgctgagaatcacctgggtgggcgtgaccggcgccaccgcctacagactggcctggggcagaagcgagggcggccccatgagacaccagatcctgcccggcaacaccgacagcgccgagatcagaggcctggagggcggcgtgagctacagcgtgagagtgaccgccctggtgggcgacagagagggcacccccgtgagcatcgtggtgaccaccccccccgaggccccccccgccctgggcaccctgcacgtggtgcagagaggcgagcacagcctgagactgagatgggagcccgtgcccagagcccagggcttcctgctgcactggcagcccgagggcggccaggagcagagcagagtgctgggccccgagctgagcagctaccacctggacggcctggagcccgccacccagtacagagtgagactgagcgtgctgggccccgccggcgagggccccagcgccgaggtgaccgccagaaccgagagccccagagtgcccagcatcgagctgagagtggtggacaccagcatcgacagcgtgaccctggcctggacccccgtgagcagagccagcagctacatcctgagctggagacccctgagaggccccggccaggaggtgcccggcagcccccagaccctgcccggcatcagcagcagccagagagtgaccggcctggagcccggcgtgagctacatcttcagcctgacccccgtgctggacggcgtgagaggccccgaggccagcgtgacccagacccccgtgtgccccagaggcctggccgacgtggtgttcctgccccacgccacccaggacaacgcccacagagccgaggccaccagaagagtgctggagagactggtgctggccctgggccccctgggcccccaggccgtgcaggtgggcctgctgagctacagccacagacccagccccctgttccccctgaacggcagccacgacctgggcatcatcctgcagagaatcagagacatgccctacatggaccccagcggcaacaacctgggcaccgccgtggtgaccgcccacagatacatgctggcccccgacgcccccggcagaagacagcacgtgcccggcgtgatggtgctgctggtggacgagcccctgagaggcgacatcttcagccccatcagagaggcccaggccagcggcctgaacgtggtgatgctgggcatggccggcgccgaccccgagcagctgagaagactggcccccggcatggacagcgtgcagaccttcttcgccgtggacgacggccccagcctggaccaggccgtgagcggcctggccaccgccctgtgccaggccagcttcaccacccagcccagacccgagccctgccccgtgtactgccccaagggccagaagggcgagcccggcgagatgggcctgagaggccaggtgggcccccccggcgaccccggcctgcccggcagaaccggcgcccccggcccccagggcccccccggcagcgccaccgccaagggcgagagaggcttccccggcgccgacggcagacccggcagccccggcagagccggcaaccccggcacccccggcgcccccggcctgaagggcagccccggcctgcccggccccagaggcgaccccggcgagagaggccccagaggccccaagggcgagcccggcgcccccggccaggtgatcggcggcgagggccccggcctgcccggcagaaagggcgaccccggccccagcggcccccccggccccagaggccccctgggcgaccccggccccagaggcccccccggcctgcccggcaccgccatgaagggcgacaagggcgacagaggcgagagaggcccccccggccccggcgagggcggcatcgcccccggcgagcccggcctgcccggcctgcccggcagccccggcccccagggccccgtgggcccccccggcaagaagggcgagaagggcgacagcgaggacggcgcccccggcctgcccggccagcccggcagccccggcgagcagggccccagaggcccccccggcgccatcggccccaagggcgacagaggcttccccggccccctgggcgaggccggcgagaagggcgagagaggcccccccggccccgccggcagcagaggcctgcccggcgtggccggcagacccggcgccaagggccccgagggcccccccggccccaccggcagacagggcgagaagggcgagcccggcagacccggcgaccccgccgtggtgggccccgccgtggccggccccaagggcgagaagggcgacgtgggccccgccggccccagaggcgccaccggcgtgcagggcgagagaggcccccccggcctggtgctgcccggcgaccccggccccaagggcgaccccggcgacagaggccccatcggcctgaccggcagagccggcccccccggcgacagcggcccccccggcgagaagggcgaccccggcagacccggcccccccggccccgtgggccccagaggcagagacggcgaggtgggcgagaagggcgacgagggcccccccggcgaccccggcctgcccggcaaggccggcgagagaggcctgagaggcgcccccggcgtgagaggccccgtgggcgagaagggcgaccagggcgaccccggcgaggacggcagaaacggcagccccggcagcagcggccccaagggcgacagaggcgagcccggcccccccggcccccccggcagactggtggacaccggccccggcgccagagagaagggcgagcccggcgacagaggccaggagggccccagaggccccaagggcgaccccggcctgcccggcgcccccggcgagagaggcatcgagggcttcagaggcccccccggcccccagggcgaccccggcgtgagaggccccgccggcgagaagggcgacagaggcccccccggcctggacggcagaagcggcctggacggcaagcccggcgccgccggccccagcggccccaacggcgccgccggcaaggccggcgaccccggcagagacggcctgcccggcctgagaggcgagcagggcctgcccggccccagcggcccccccggcctgcccggcaagcccggcgaggacggcaagcccggcctgaacggcaagaacggcgagcccggcgaccccggcgaggacggcagaaagggcgagaagggcgacagcggcgccagcggcagagagggcttccccggcgtgcccggcggcaccggccccaagggcgacagaggcgagaccggcagcaagggcgagcagggcctgcccggcgagagaggcctgagaggcgagcccggcagcgtgcccaacgtggacagactgctggagaccgccggcatcaaggccagcgccctgagagagatcgtggagacctgggacgagagcagcggcagcttcctgcccgtgcccgagagaagaagaggccccaagggcgacagcggcgagcagggcccccccggcaaggagggccccatcggcttccccggcgagagaggcctgaagggcgacagaggcgaccccggcccccagggcccccccggcctggccctgggcgagagaggcccccccggccccagcggcctggccggcgagcccggcaagcccggcatccccggcctgcccggcagagccggcggcgtgggcgaggccggcagacccggcgagagaggcgagagaggcgagaagggcgagagaggcgagcagggcagagacggcccccccggcctgcccggcacccccggcccccccggcccccccggccccaaggtgagcgtggacgagcccggccccggcctgagcggcgagcagggcccccccggcctgaagggcgccaagggcgagcccggcagcaacggcgaccagggccccaagggcgacagaggcgtgcccggcatcaagggcgacagaggcgagcccggccccagaggccaggacggcaaccccggcctgcccggcgagagaggcatggccggccccgagggcaagcccggcctgcagggccccagaggcccccccggccccgtgggcggccacggcgaccccggcccccccggcgcccccggcctggccggccccgccggcccccagggccccagcggcctgaagggcgagcccggcgagaccggcccccccggcagaggcctgaccggccccaccggcgccgtgggcctgcccggcccccccggccccagcggcctggtgggcccccagggcagccccggcctgcccggccaggtgggcgagaccggcaagcccggcgcccccggcagagacggcgccagcggcaaggacggcgacagaggcagccccggcgtgcccggcagccccggcctgcccggccccgtgggccccaagggcgagcccggccccaccggcgcccccggccaggccgtggtgggcctgcccggcgccaagggcgagaagggcgcccccggcggcctggccggcgacctggtgggcgagcccggcgccaagggcgacagaggcctgcccggccccagaggcgagaagggcgaggccggcagagccggcgagcccggcgaccccggcgaggacggccagaagggcgcccccggccccaagggcttcaagggcgaccccggcgtgggcgtgcccggcagccccggcccccccggcccccccggcgtgaagggcgacctgggcctgcccggcctgcccggcgcccccggcgtggtgggcttccccggccagaccggccccagaggcgagatgggccagcccggccccagcggcgagagaggcctggccggcccccccggcagagagggcatccccggccccctgggcccccccggcccccccggcagcgtgggcccccccggcgccagcggcctgaagggcgacaagggcgaccccggcgtgggcctgcccggccccagaggcgagagaggcgagcccggcatcagaggcgaggacggcagacccggccaggagggccccagaggcctgaccggcccccccggcagcagaggcgagagaggcgagaagggcgacgtgggcagcgccggcctgaagggcgacaagggcgacagcgccgtgatcctgggcccccccggccccagaggcgccaagggcgacatgggcgagagaggccccagaggcctggacggcgacaagggccccagaggcgacaacggcgaccccggcgacaagggcagcaagggcgagcccggcgacaagggcagcgccggcctgcccggcctgagaggcctgctgggcccccagggccagcccggcgccgccggcatccccggcgaccccggcagccccggcaaggacggcgtgcccggcatcagaggcgagaagggcgacgtgggcttcatgggccccagaggcctgaagggcgagagaggcgtgaagggcgcctgcggcctggacggcgagaagggcgacaagggcgaggccggcccccccggcagacccggcctggccggccacaagggcgagatgggcgagcccggcgtgcccggccagagcggcgcccccggcaaggagggcctgatcggccccaagggcgacagaggcttcgacggccagcccggccccaagggcgaccagggcgagaagggcgagagaggcacccccggcatcggcggcttccccggccccagcggcaacgacggcagcgccggcccccccggcccccccggcagcgtgggccccagaggccccgagggcctgcagggccagaagggcgagagaggcccccccggcgagagagtggtgggcgcccccggcgtgcccggcgcccccggcgagagaggcgagcagggcagacccggccccgccggccccagaggcgagaagggcgaggccgccctgaccgaggacgacatcagaggcttcgtgagacaggagatgagccagcactgcgcctgccagggccagttcatcgccagcggcagcagacccctgcccagctacgccgccgacaccgccggcagccagctgcacgccgtgcccgtgctgagagtgagccacgccgaggaggaggagagagtgccccccgaggacgacgagtacagcgagtacagcgagtacagcgtggaggagtaccaggaccccgaggccccctgggacagcgacgacccctgcagcctgcccctggacgagggcagctgcaccgcctacaccctgagatggtaccacagagccgtgaccggcagcaccgaggcctgccaccccttcgtgtacggcggctgcggcggcaacgccaacagattcggcaccagagaggcctgcgagagaagatgcccccccagagtggtgcagagccagggcaccggcaccgcccaggactag

SEQ ID NO: 1823 - DNA, 435 bp, synthetic construct
  misc_feature 1..435: note = source = /note="Description of Artificial Sequence: Synthetic coding sequence"
  source 1..435: mol_type = other DNA
atgtggctgcagagcctgctgctgctgggcaccgtggcctgcagcatcagcgcccccgccagaagccccagccccagcacccagccctgggagcacgtgaacgccatccaggaggccagaagactgctgaacctgagcagagacaccgccgccgagatgaacgagaccgtggaggtgatcagcgagatgttcgacctgcaggagcccacctgcctgcagaccagactggagctgtacaagcagggcctgagaggcagcctgaccaagctgaagggccccctgaccatgatggccagccactacaagcagcactgcccccccacccccgagaccagctgcgccacccagatcatcaccttcgagagcttcaaggagaacctgaaggacttcctgctggtgatccccttcgactgctgggagcccgtgcaggagtag

SEQ ID NO: 1824 - DNA, 1218 bp, synthetic construct
  misc_feature 1..1218: note = source = /note="Description of Artificial Sequence: Synthetic coding sequence"
  source 1..1218: mol_type = other DNA
atggaggccagcttcgtgcagaccaccatggccctgggcctgagcagcaagaaggccagcagcagaaacgtggccgtggagagaaagaacctgatcaccgtgtgcagattcagcgtgaagaccctgctggagaagtacaccgccgagcccatcgacgacagcagcgaggagttcgtgaacttcgccgccatcctggagcagatcctgagccacagattcaaggcctgcgcccccgccggccccgtgagctggttcagcagcgacggccagagaggcttctgggactacatcagactggcctgcagcaaggtgcccaacaactgcgtgagcagcatcgagaacatggagaacatcagcaccgccagagccaagggcagagcctggatcagagtggccctgatggagaagagaatgagcgagtacatcaccaccgccctgagagacaccagaaccaccagaagattctacgacagcggcgccatcatgctgagagacgaggccaccatcctgaccggcatgctgatcggcctgagcgccatcgacttcagcttctgcctgaagggcgaggtgctggacggcaagacccccgtggtgatcgactacaccccctacctgaagttcacccagagctacgactacctgaccgacgaggaggagagacacagcgccgagagcagcaccagcgaggacaacagccccgagcacccctacctgcccctggtgaccgacgaggacagctggtacagcaagtggcacaagatggagcagaagttcagaatcgtgtacgcccagaagggctacctggaggagctggtgagactgagagagagccagctgaaggacctggaggccgagaacagaagactgcagctgcagctggaggaggccgccgcccagaaccagagagagaagagagagctggagggcgtgatcctggagctgcaggagcagctgaccggcctgatccccagcgaccacgcccccctggcccagggcagcaaggagctgaccacccccctggtgaaccagtggcccagcctgggcaccctgaacggcgccgagggcgccagcaacagcaagctgtacagaagacacagcttcatgagcaccgagcccctgagcgccgaggccagcctgagcagcgacagccagagactgggcgagggcaccagagacgaggagccctggggccccatcggcagcagcgagcccaactag

SEQ ID NO: 1825 - DNA, 603 bp, synthetic construct
  misc_feature 1..603: note = source = /note="Description of Artificial Sequence: Synthetic coding sequence"
  source 1..603: mol_type = other DNA
atgagccccgagcccgccctgagccccgccctgcagctgctgctgtggcacagcgccctgtggaccgtgcaggaggccacccccctgggccccgccagcagcctgccccagagcttcctgctgaagtgcctggagcaggtgagaaagatccagggcgacggcgccgccctgcaggagaagctgtgcgccacctacaagctgtgccaccccgaggagctggtgctgctgggccacagcctgggcatcccctgggcccccctgagcagctgccccagccaggccctgcagctggccggctgcctgagccagctgcacagcggcctgttcctgtaccagggcctgctgcaggccctggagggcatcagccccgagctgggccccaccctggacaccctgcagctggacgtggccgacttcgccaccaccatctggcagcagatggaggagctgggcatggcccccgccctgcagcccacccagggcgccatgcccgccttcgccagcgccttccagagaagagccggcggcgtgctggtggccagccacctgcagagcttcctggaggtgagctacagagtgctgagacacctggcccagccctag

SEQ ID NO: 1826 - DNA, 516 bp, synthetic construct
  misc_feature 1..516: note = source = /note="Description of Artificial Sequence: Synthetic coding sequence"
  source 1..516: mol_type = other DNA
atggccggccccgccacccagagccccatgaagctgatggccctgcagctgctgctgtggcacagcgccctgtggaccgtgcaggaggccacccccctgggccccgccagcagcctgccccagagcttcctgctgaagtgcctggagcaggtgagaaagatccagggcgacggcgccgccctgcaggagaagctggtgagcgaggccggctgcctgagccagctgcacagcggcctgttcctgtaccagggcctgctgcaggccctggagggcatcagccccgagctgggccccaccctggacaccctgcagctggacgtggccgacttcgccaccaccatctggcagcagatggaggagctgggcatggcccccgccctgcagcccacccagggcgccatgcccgccttcgccagcgccttccagagaagagccggcggcgtgctggtggccagccacctgcagagcttcctggaggtgagctacagagtgctgagacacctggcccagccctag

SEQ ID NO: 1827 - DNA, 615 bp, synthetic construct
  misc_feature 1..615: note = source = /note="Description of Artificial Sequence: Synthetic coding sequence"
  source 1..615: mol_type = other DNA
atggccggccccgccacccagagccccatgaagctgatggccctgcagctgctgctgtggcacagcgccctgtggaccgtgcaggaggccacccccctgggccccgccagcagcctgccccagagcttcctgctgaagtgcctggagcaggtgagaaagatccagggcgacggcgccgccctgcaggagaagctgtgcgccacctacaagctgtgccaccccgaggagctggtgctgctgggccacagcctgggcatcccctgggcccccctgagcagctgccccagccaggccctgcagctggccggctgcctgagccagctgcacagcggcctgttcctgtaccagggcctgctgcaggccctggagggcatcagccccgagctgggccccaccctggacaccctgcagctggacgtggccgacttcgccaccaccatctggcagcagatggaggagctgggcatggcccccgccctgcagcccacccagggcgccatgcccgccttcgccagcgccttccagagaagagccggcggcgtgctggtggccagccacctgcagagcttcctggaggtgagctacagagtgctgagacacctggcccagccctag

SEQ ID NO: 1828 - DNA, 3696 bp, synthetic construct
  misc_feature 1..3696: note = source = /note="Description of Artificial Sequence: Synthetic coding sequence"
  source 1..3696: mol_type = other DNA
atgagactgctggccaagatcatctgcctgatgctgtgggccatctgcgtggccgaggactgcaacgagctgccccccagaagaaacaccgagatcctgaccggcagctggagcgaccagacctaccccgagggcacccaggccatctacaagtgcagacccggctacagaagcctgggcaacgtgatcatggtgtgcagaaagggcgagtgggtggccctgaaccccctgagaaagtgccagaagagaccctgcggccaccccggcgacacccccttcggcaccttcaccctgaccggcggcaacgtgttcgagtacggcgtgaaggccgtgtacacctgcaacgagggctaccagctgctgggcgagatcaactacagagagtgcgacaccgacggctggaccaacgacatccccatctgcgaggtggtgaagtgcctgcccgtgaccgcccccgagaacggcaagatcgtgagcagcgccatggagcccgacagagagtaccacttcggccaggccgtgagattcgtgtgcaacagcggctacaagatcgagggcgacgaggagatgcactgcagcgacgacggcttctggagcaaggagaagcccaagtgcgtggagatcagctgcaagagccccgacgtgatcaacggcagccccatcagccagaagatcatctacaaggagaacgagagattccagtacaagtgcaacatgggctacgagtacagcgagagaggcgacgccgtgtgcaccgagagcggctggagacccctgcccagctgcgaggagaagagctgcgacaacccctacatccccaacggcgactacagccccctgagaatcaagcacagaaccggcgacgagatcacctaccagtgcagaaacggcttctaccccgccaccagaggcaacaccgccaagtgcaccagcaccggctggatccccgcccccagatgcaccctgaagccctgcgactaccccgacatcaagcacggcggcctgtaccacgagaacatgagaagaccctacttccccgtggccgtgggcaagtactacagctactactgcgacgagcacttcgagacccccagcggcagctactgggaccacatccactgcacccaggacggctggagccccgccgtgccctgcctgagaaagtgctacttcccctacctggagaacggctacaaccagaaccacggcagaaagttcgtgcagggcaagagcatcgacgtggcctgccaccccggctacgccctgcccaaggcccagaccaccgtgacctgcatggagaacggctggagccccacccccagatgcatcagagtgaagacctgcagcaagagcagcatcgacatcgagaacggcttcatcagcgagagccagtacacctacgccctgaaggagaaggccaagtaccagtgcaagctgggctacgtgaccgccgacggcgagaccagcggcagcatcacctgcggcaaggacggctggagcgcccagcccacctgcatcaagagctgcgacatccccgtgttcatgaacgccagaaccaagaacgacttcacctggttcaagctgaacgacaccctggactacgagtgccacgacggctacgagagcaacaccggcagcaccaccggcagcatcgtgtgcggctacaacggctggagcgacctgcccatctgctacgagagagagtgcgagctgcccaagatcgacgtgcacctggtgcccgacagaaagaaggaccagtacaaggtgggcgaggtgctgaagttcagctgcaagcccggcttcaccatcgtgggccccaacagcgtgcagtgctaccacttcggcctgagccccgacctgcccatctgcaaggagcaggtgcagagctgcggccccccccccgagctgctgaacggcaacgtgaaggagaagaccaaggaggagtacggccacagcgaggtggtggagtactactgcaaccccagattcctgatgaagggccccaacaagatccagtgcgtggacggcgagtggaccaccctgcccgtgtgcatcgtggaggagagcacctgcggcgacatccccgagctggagcacggctgggcccagctgagcagccccccctactactacggcgacagcgtggagttcaactgcagcgagagcttcaccatgatcggccacagaagcatcacctgcatccacggcgtgtggacccagctgccccagtgcgtggccatcgacaagctgaagaagtgcaagagcagcaacctgatcatcctggaggagcacctgaagaacaagaaggagttcgaccacaacagcaacatcagatacagatgcagaggcaaggagggctggatccacaccgtgtgcatcaacggcagatgggaccccgaggtgaactgcagcatggcccagatccagctgtgccccccccccccccagatccccaacagccacaacatgaccaccaccctgaactacagagacggcgagaaggtgagcgtgctgtgccaggagaactacctgatccaggagggcgaggagatcacctgcaaggacggcagatggcagagcatccccctgtgcgtggagaagatcccctgcagccagcccccccagatcgagcacggcaccatcaacagcagcagaagcagccaggagagctacgcccacggcaccaagctgagctacacctgcgagggcggcttcagaatcagcgaggagaacgagaccacctgctacatgggcaagtggagcagccccccccagtgcgagggcctgccctgcaagagcccccccgagatcagccacggcgtggtggcccacatgagcgacagctaccagtacggcgaggaggtgacctacaagtgcttcgagggcttcggcatcgacggccccgccatcgccaagtgcctgggcgagaagtggagccacccccccagctgcatcaagaccgactgcctgagcctgcccagcttcgagaacgccatccccatgggcgagaagaaggacgtgtacaaggccggcgagcaggtgacctacacctgcgccacctactacaagatggacggcgccagcaacgtgacctgcatcaacagcagatggaccggcagacccacctgcagagacaccagctgcgtgaacccccccaccgtgcagaacgcctacatcgtgagcagacagatgagcaagtaccccagcggcgagagagtgagataccagtgcagaagcccctacgagatgttcggcgacgaggaggtgatgtgcctgaacggcaactggaccgagcccccccagtgcaaggacagcaccggcaagtgcggcccccccccccccatcgacaacggcgacatcaccagcttccccctgagcgtgtacgcccccgccagcagcgtggagtaccagtgccagaacctgtaccagctggagggcaacaagagaatcacctgcagaaacggccagtggagcgagccccccaagtgcctgcacccctgcgtgatcagcagagagatcatggagaactacaacatcgccctgagatggaccgccaagcagaagctgtacagcagaaccggcgagagcgtggagttcgtgtgcaagagaggctacagactgagcagcagaagccacaccctgagaaccacctgctgggacggcaagctggagtaccccacctgcgccaagagatag

SEQ ID NO: 1829 - DNA, 1350 bp, synthetic construct
  misc_feature 1..1350: note = source = /note="Description of Artificial Sequence: Synthetic coding sequence"
  source 1..1350: mol_type = other DNA
atgagactgctggccaagatcatctgcctgatgctgtgggccatctgcgtggccgaggactgcaacgagctgccccccagaagaaacaccgagatcctgaccggcagctggagcgaccagacctaccccgagggcacccaggccatctacaagtgcagacccggctacagaagcctgggcaacgtgatcatggtgtgcagaaagggcgagtgggtggccctgaaccccctgagaaagtgccagaagagaccctgcggccaccccggcgacacccccttcggcaccttcaccctgaccggcggcaacgtgttcgagtacggcgtgaaggccgtgtacacctgcaacgagggctaccagctgctgggcgagatcaactacagagagtgcgacaccgacggctggaccaacgacatccccatctgcgaggtggtgaagtgcctgcccgtgaccgcccccgagaacggcaagatcgtgagcagcgccatggagcccgacagagagtaccacttcggccaggccgtgagattcgtgtgcaacagcggctacaagatcgagggcgacgaggagatgcactgcagcgacgacggcttctggagcaaggagaagcccaagtgcgtggagatcagctgcaagagccccgacgtgatcaacggcagccccatcagccagaagatcatctacaaggagaacgagagattccagtacaagtgcaacatgggctacgagtacagcgagagaggcgacgccgtgtgcaccgagagcggctggagacccctgcccagctgcgaggagaagagctgcgacaacccctacatccccaacggcgactacagccccctgagaatcaagcacagaaccggcgacgagatcacctaccagtgcagaaacggcttctaccccgccaccagaggcaacaccgccaagtgcaccagcaccggctggatccccgcccccagatgcaccctgaagccctgcgactaccccgacatcaagcacggcggcctgtaccacgagaacatgagaagaccctacttccccgtggccgtgggcaagtactacagctactactgcgacgagcacttcgagacccccagcggcagctactgggaccacatccactgcacccaggacggctggagccccgccgtgccctgcctgagaaagtgctacttcccctacctggagaacggctacaaccagaaccacggcagaaagttcgtgcagggcaagagcatcgacgtggcctgccaccccggctacgccctgcccaaggcccagaccaccgtgacctgcatggagaacggctggagccccacccccagatgcatcagagtgatcttccagctgtag

SEQ ID NO: 1830 - DNA, 1350 bp, synthetic construct
  misc_feature 1..1350: note = source = /note="Description of Artificial Sequence: Synthetic coding sequence"
  source 1..1350: mol_type = other DNA
atgagactgctggccaagatcatctgcctgatgctgtgggccatctgcgtggccgaggactgcaacgagctgccccccagaagaaacaccgagatcctgaccggcagctggagcgaccagacctaccccgagggcacccaggccatctacaagtgcagacccggctacagaagcctgggcaacgtgatcatggtgtgcagaaagggcgagtgggtggccctgaaccccctgagaaagtgccagaagagaccctgcggccaccccggcgacacccccttcggcaccttcaccctgaccggcggcaacgtgttcgagtacggcgtgaaggccgtgtacacctgcaacgagggctaccagctgctgggcgagatcaactacagagagtgcgacaccgacggctggaccaacgacatccccatctgcgaggtggtgaagtgcctgcccgtgaccgcccccgagaacggcaagatcgtgagcagcgccatggagcccgacagagagtaccacttcggccaggccgtgagattcgtgtgcaacagcggctacaagatcgagggcgacgaggagatgcactgcagcgacgacggcttctggagcaaggagaagcccaagtgcgtggagatcagctgcaagagccccgacgtgatcaacggcagccccatcagccagaagatcatctacaaggagaacgagagattccagtacaagtgcaacatgggctacgagtacagcgagagaggcgacgccgtgtgcaccgagagcggctggagacccctgcccagctgcgaggagaagagctgcgacaacccctacatccccaacggcgactacagccccctgagaatcaagcacagaaccggcgacgagatcacctaccagtgcagaaacggcttctaccccgccaccagaggcaacaccgccaagtgcaccagcaccggctggatccccgcccccagatgcaccctgaagccctgcgactaccccgacatcaagcacggcggcctgtaccacgagaacatgagaagaccctacttccccgtggccgtgggcaagtactacagctactactgcgacgagcacttcgagacccccagcggcagctactgggaccacatccactgcacccaggacggctggagccccgccgtgccctgcctgagaaagtgctacttcccctacctggagaacggctacaaccagaaccacggcagaaagttcgtgcagggcaagagcatcgacgtggcctgccaccccggctacgccctgcccaaggcccagaccaccgtgacctgcatggagaacggctggagccccacccccagatgcatcagagtgagcttcaccctgtag

SEQ ID NO: 1831 - DNA, 573 bp, synthetic construct
  misc_feature 1..573: note = source = /note="Description of Artificial Sequence: Synthetic coding sequence"
  source 1..573: mol_type = other DNA
atggccgccggcgagctggagggcggcaagcccctgagcggcctgctgaacgccctggcccaggacaccttccacggctaccccggcatcaccgaggagctgctgagaagccagctgtaccccgaggtgccccccgaggagttcagacccttcctggccaagatgagaggcatcctgaagagcatcgccagcgccgacatggacttcaaccagctggaggccttcctgaccgcccagaccaagaagcagggcggcatcaccagcgaccaggccgccgtgatcagcaagttctggaagagccacaagaccaagatcagagagagcctgatgaaccagagcagatggaacagcggcctgagaggcctgagctggagagtggacggcaagagccagagcagacacagcgcccagatccacacccccgtggccatcatcgagctggagctgggcaagtacggccaggagagcgagttcctgtgcctggagttcgacgaggtgaaggtgaaccagatcctgaagaccctgagcgaggtggaggagagcatcagcaccctgatcagccagcccaactag

SEQ ID NO: 1832 - DNA, 117 bp, synthetic construct
  misc_feature 1..117: note = source = /note="Description of Artificial Sequence: Synthetic coding sequence"
  source 1..117: mol_type = other DNA
tgacaggagagcgagttcctgtgcctggagttcgacgaggtgaaggtgaaccagatcctgaagaccctgagcgaggtggaggagagcatcagcaccctgatcagccagcccaactag

SEQ ID NO: 1833 - DNA, 99 bp, synthetic construct
  misc_feature 1..99: note = source = /note="Description of Artificial Sequence: Synthetic coding sequence"
  source 1..99: mol_type = other DNA
tgatgcctggagttcgacgaggtgaaggtgaaccagatcctgaagaccctgagcgaggtggaggagagcatcagcaccctgatcagccagcccaactag

SEQ ID NO: 1834 - DNA, 117 bp, synthetic construct; identical to SEQ ID NO: 1832
  misc_feature 1..117: note = source = /note="Description of Artificial Sequence: Synthetic coding sequence"
  source 1..117: mol_type = other DNA

SEQ ID NO: 1835 - DNA, 480 bp, synthetic construct
  misc_feature 1..480: note = source = /note="Description of Artificial Sequence: Synthetic coding sequence"
  source 1..480: mol_type = other DNA
atggccgccggcgagctggagggcggcaagcccctgagcggcctgctgaacgccctggcccaggacaccttccacggctaccccggcatcaccgaggagctgctgagaagccagctgtaccccgaggtgccccccgaggagttcagacccttcctggccaagatgagaggcatcctgaagagcatcgccagcgccgacatggacttcaaccagctggaggccttcctgaccgcccagaccaagaagcagggcggcatcaccagcgaccaggccgccgtgatcagcaagttctggaagagccacaagaccaagatcagagagagcctgatgaaccagagcagatggaacagcggcctgagaggcctgagctggagagtggacggcaagagccagagcagacacagcgcccagatccacacccccgtggccatcatcgagctggagctgggcaagtacggccaggtgcactgcaaccagtag

SEQ ID NO: 1836 - DNA, 591 bp, synthetic construct
  misc_feature 1..591: note = source = /note="Description of Artificial Sequence: Synthetic coding sequence"
  source 1..591: mol_type = other DNA
atgagactgcccctgctggtgagcgccggcgtgctgctggtggccctgctgccctgccccccctgcagagccctgctgagcagaggccccgtgcccggcgccagacaggccccccagcacccccagcccctggacttcttccagccccccccccagagcgagcagccccagcagccccaggccagacccgtgctgctgagaatgggcgaggagtacttcctgagactgggcaacctgaacaagagccccgccgcccccctgagccccgccagcagcctgctggccggcggcagcggcagcagacccagccccgagcaggccaccgccaacttcttcagagtgctgctgcagcagctgctgctgcccagaagaagcctggacagccccgccgccctggccgagagaggcgccagaaacgccctgggcggccaccaggaggcccccgagagagagagaagaagcgaggagccccccatcagcctggacctgaccttccacctgctgagagaggtgctggagatggccagagccgagcagctggcccagcaggcccacagcaacagaaagctgatggagatcatcggcaagtag

SEQ ID NO: 1837 - DNA, 4443 bp, synthetic construct
  misc_feature 1..4443: note = source = /note="Description of Artificial Sequence: Synthetic coding sequence"
  source 1..4443: mol_type = other DNA
atgcagagaagccccctggagaaggccagcgtggtgagcaagctgttcttcagctggaccagacccatcctgagaaagggctacagacagagactggagctgagcgacatctaccagatccccagcgtggacagcgccgacaacctgagcgagaagctggagagagagtgggacagagagctggccagcaagaagaaccccaagctgatcaacgccctgagaagatgcttcttctggagattcatgttctacggcatcttcctgtacctgggcgaggtgaccaaggccgtgcagcccctgctgctgggcagaatcatcgccagctacgaccccgacaacaaggaggagagaagcatcgccatctacctgggcatcggcctgtgcctgctgttcatcgtgagaaccctgctgctgcaccccgccatcttcggcctgcaccacatcggcatgcagatgagaatcgccatgttcagcctgatctacaagaagaccctgaagctgagcagcagagtgctggacaagatcagcatcggccagctggtgagcctgctgagcaacaacctgaacaagttcgacgagggcctggccctggcccacttcgtgtggatcgcccccctgcaggtggccctgctgatgggcctgatctgggagctgctgcaggccagcgccttctgcggcctgggcttcctgatcgtgctggccctgttccaggccggcctgggcagaatgatgatgaagtacagagaccagagagccggcaagatcagcgagagactggtgatcaccagcgagatgatcgagaacatccagagcgtgaaggcctactgctgggaggaggccatggagaagatgatcgagaacctgagacagaccgagctgaagctgaccagaaaggccgcctacgtgagatacttcaacagcagcgccttcttcttcagcggcttcttcgtggtgttcctgagcgtgctgccctacgccctgatcaagggcatcatcctgagaaagatcttcaccaccatcagcttctgcatcgtgctgagaatggccgtgaccagacagttcccctgggccgtgcagacctggtacgacagcctgggcgccatcaacaagatccaggacttcctgcagaagcaggagtacaagaccctggagtacaacctgaccaccaccgaggtggtgatggagaacgtgaccgccttctgggaggagggcttcggcgagctgttcgagaaggccaagcagaacaacaacaacagaaagaccagcaacggcgacgacagcctgttcttcagcaacttcagcctgctgggcacccccgtgctgaaggacatcaacttcaagatcgagagaggccagctgctggccgtggccggcagcaccggcgccggcaagaccagcctgctgatggtgatcatgggcgagctggagcccagcgagggcaagatcaagcacagcggcagaatcagcttctgcagccagttcagctggatcatgcccggcaccatcaaggagaacatcatcttcggcgtgagctacgacgagtacagatacagaagcgtgatcaaggcctgccagctggaggaggacatcagcaagttcgccgagaaggacaacatcgtgctgggcgagggcggcatcaccctgagcggcggccagagagccagaatcagcctggccagagccgtgtacaaggacgccgacctgtacctgctggacagccccttcggctacctggacgtgctgaccgagaaggagatcttcgagagctgcgtgtgcaagctgatggccaacaagaccagaatcctggtgaccagcaagatggagcacctgaagaaggccgacaagatcctgatcctgcacgagggcagcagctacttctacggcaccttcagcgagctgcagaacctgcagcccgacttcagcagcaagctgatgggctgcgacagcttcgaccagttcagcgccgagagaagaaacagcatcctgaccgagaccctgcacagattcagcctggagggcgacgcccccgtgagctggaccgagaccaagaagcagagcttcaagcagaccggcgagttcggcgagaagagaaagaacagcatcctgaaccccatcaacagcatcagaaagttcagcatcgtgcagaagacccccctgcagatgaacggcatcgaggaggacagcgacgagcccctggagagaagactgagcctggtgcccgacagcgagcagggcgaggccatcctgcccagaatcagcgtgatcagcaccggccccaccctgcaggccagaagaagacagagcgtgctgaacctgatgacccacagcgtgaaccagggccagaacatccacagaaagaccaccgccagcaccagaaaggtgagcctggccccccaggccaacctgaccgagctggacatctacagcagaagactgagccaggagaccggcctggagatcagcgaggagatcaacgaggaggacctgaaggagtgcttcttcgacgacatggagagcatccccgccgtgaccacctggaacacctacctgagatacatcaccgtgcacaagagcctgatcttcgtgctgatctggtgcctggtgatcttcctggccgaggtggccgccagcctggtggtgctgtggctgctgggcaacacccccctgcaggacaagggcaacagcacccacagcagaaacaacagctacgccgtgatcatcaccagcaccagcagctactacgtgttctacatctacgtgggcgtggccgacaccctgctggccatgggcttcttcagaggcctgcccctggtgcacaccctgatcaccgtgagcaagatcctgcaccacaagatgctgcacagcgtgctgcaggcccccatgagcaccctgaacaccctgaaggccggcggcatcctgaacagattcagcaaggacatcgccatcctggacgacctgctgcccctgaccatcttcgacttcatccagctgctgctgatcgtgatcggcgccatcgccgtggtggccgtgctgcagccctacatcttcgtggccaccgtgcccgtgatcgtggccttcatcatgctgagagcctacttcctgcagaccagccagcagctgaagcagctggagagcgagggcagaagccccatcttcacccacctggtgaccagcctgaagggcctgtggaccctgagagccttcggcagacagccctacttcgagaccctgttccacaaggccctgaacctgcacaccgccaactggttcctgtacctgagcaccctgagatggttccagatgagaatcgagatgatcttcgtgatcttcttcatcgccgtgaccttcatcagcatcctgaccaccggcgagggcgagggcagagtgggcatcatcctgaccctggccatgaacatcatgagcaccctgcagtgggccgtgaacagcagcatcgacgtggacagcctgatgagaagcgtgagcagagtgttcaagttcatcgacatgcccaccgagggcaagcccaccaagagcaccaagccctacaagaacggccagctgagcaaggtgatgatcatcgagaacagccacgtgaagaaggacgacatctggcccagcggcggccagatgaccgtgaaggacctgaccgccaagtacaccgagggcggcaacgccatcctggagaacatcagcttcagcatcagccccggccagagagtgggcctgctgggcagaaccggcagcggcaagagcaccctgctgagcgccttcctgagactgctgaacaccgagggcgagatccagatcgacggcgtgagctgggacagcatcaccctgcagcagtggagaaaggccttcggcgtgatcccccagaaggtgttcatcttcagcggcaccttcagaaagaacctggacccctacgagcagtggagcgaccaggagatctggaaggtggccgacgaggtgggcctgagaagcgtgatcgagcagttccccggcaagctggacttcgtgctggtggacggcggctgcgtgctgagccacggccacaagcagctgatgtgcctggccagaagcgtgctgagcaaggccaagatcctgctgctggacgagcccagcgcccacctggaccccgtgacctaccagatcatcagaagaaccctgaagcaggccttcgccgactgcaccgtgatcctgtgcgagcacagaatcgaggccatgctggagtgccagcagttcctggtgatcgaggagaacaaggtgagacagtacgacagcatccagaagctgctgaacgagagaagcctgttcagacaggccatcagccccagcgacagagtgaagctgttcccccacagaaacagcagcaagtgcaagagcaagccccagatcgccgccctgaaggaggagaccgaggaggaggtgcaggacaccagactgtag

SEQ ID NO: 1838 - DNA, 4317 bp, synthetic construct
  misc_feature 1..4317: note = source = /note="Description of Artificial Sequence: Synthetic coding sequence"
  source 1..4317: mol_type = other DNA
atgcagagaagccccctggagaaggccagcgtggtgagcaagctgttcttcagctggaccagacccatcctgagaaagggctacagacagagactggagctgagcgacatctaccagatccccagcgtggacagcgccgacaacctgagcgagaagctggagagagagtgggacagagagctggccagcaagaagaaccccaagctgatcaacgccctgagaagatgcttcttctggagattcatgttctacggcatcttcctgtacctgggcgaggtgaccaaggccgtgcagcccctgctgctgggcagaatcatcgccagctacgaccccgacaacaaggaggagagaagcatcgccatctacctgggcatcggcctgtgcctgctgttcatcgtgagaaccctgctgctgcaccccgccatcttcggcctgcaccacatcggcatgcagatgagaatcgccatgttcagcctgatctacaagaagggcctggccctggcccacttcgtgtggatcgcccccctgcaggtggccctgctgatgggcctgatctgggagctgctgcaggccagcgccttctgcggcctgggcttcctgatcgtgctggccctgttccaggccggcctgggcagaatgatgatgaagtacagagaccagagagccggcaagatcagcgagagactggtgatcaccagcgagatgatcgagaacatccagagcgtgaaggcctactgctgggaggaggccatggagaagatgatcgagaacctgagacagaccgagctgaagctgaccagaaaggccgcctacgtgagatacttcaacagcagcgccttcttcttcagcggcttcttcgtggtgttcctgagcgtgctgccctacgccctgatcaagggcatcatcctgagaaagatcttcaccaccatcagcttctgcatcgtgctgagaatggccgtgaccagacagttcccctgggccgtgcagacctggtacgacagcctgggcgccatcaacaagatccaggacttcctgcagaagcaggagtacaagaccctggagtacaacctgaccaccaccgaggtggtgatggagaacgtgaccgccttctgggaggagggcttcggcgagctgttcgagaaggccaagcagaacaacaacaacagaaagaccagcaacggcgacgacagcctgttcttcagcaacttcagcctgctgggcacccccgtgctgaaggacatcaacttcaagatcgagagaggccagctgctggccgtggccggcagcaccggcgccggcaagaccagcctgctgatggtgatcatgggcgagctggagcccagcgagggcaagatcaagcacagcggcagaatcagcttctgcagccagttcagctggatcatgcccggcaccatcaaggagaacatcatcttcggcgtgagctacgacgagtacagatacagaagcgtgatcaaggcctgccagctggaggaggacatcagcaagttcgccgagaaggacaacatcgtgctgggcgagggcggcatcaccctgagcggcggccagagagccagaatcagcctggccagagccgtgtacaaggacgccgacctgtacctgctggacagccccttcggctacctggacgtgctgaccgagaaggagatcttcgagagctgcgtgtgcaagctgatggccaacaagaccagaatcctggtgaccagcaagatggagcacctgaagaaggccgacaagatcctgatcctgcacgagggcagcagctacttctacggcaccttcagcgagctgcagaacctgcagcccgacttcagcagcaagctgatgggctgcgacagcttcgaccagttcagcgccgagagaagaaacagcatcctgaccgagaccctgcacagattcagcctggagggcgacgcccccgtgagctggaccgagaccaagaagcagagcttcaagcagaccggcgagttcggcgagaagagaaagaacagcatcctgaaccccatcaacagcatcagaaagttcagcatcgtgcagaagacccccctgcagatgaacggcatcgaggaggacagcgacgagcccctggagagaagactgagcctggtgcccgacagcgagcagggcgaggccatcctgcccagaatcagcgtgatcagcaccggccccaccctgcaggccagaagaagacagagcgtgctgaacctgatgacccacagcgtgaaccagggccagaacatccacagaaagaccaccgccagcaccagaaaggtgagcctggccccccaggccaacctgaccgagctggacatctacagcagaagactgagccaggagaccggcctggagatcagcgaggagatcaacgaggaggacctgaaggagtgcttcttcgacgacatggagagcatccccgccgtgaccacctggaacacctacctgagatacatcaccgtgcacaagagcctgatcttcgtgctgatctggtgcctggtgatcttcctggccgaggtggccgccagcctggtggtgctgtggctgctgggcaacacccccctgcaggacaagggcaacagcacccacagcagaaacaacagctacgccgtgatcatcaccagcaccagcagctactacgtgttctacatctacgtgggcgtggccgacaccctgctggccatgggcttcttcagaggcctgcccctggtgcacaccctgatcaccgtgagcaagatcctgcaccacaagatgctgcacagcgtgctgcaggcccccatgagcaccctgaacaccctgaaggccggcggcatcctgaacagattcagcaaggacatcgccatcctggacgacctgctgcccctgaccatcttcgacttcatccagctgctgctgatcgtgatcggcgccatcgccgtggtggccgtgctgcagccctacatcttcgtggccaccgtgcccgtgatcgtggccttcatcatgctgagagcctacttcctgcagaccagccagcagctgaagcagctggagagcgagggcagaagccccatcttcacccacctggtgaccagcctgaagggcctgtggaccctgagagccttcggcagacagccctacttcgagaccctgttccacaaggccctgaacctgcacaccgccaactggttcctgtacctgagcaccctgagatggttccagatgagaatcgagatgatcttcgtgatcttcttcatcgccgtgaccttcatcagcatcctgaccaccggcgagggcgagggcagagtgggcatcatcctgaccctggccatgaacatcatgagcaccctgcagtgggccgtgaacagcagcatcgacgtggacagcctgatgagaagcgtgagcagagtgttcaagttcatcgacatgcccaccgagggcaagcccaccaagagcaccaagccctacaagaacggccagctgagcaaggtgatgatcatcgagaacagccacgtgaagaaggacgacatctggcccagcggcggccagatgaccgtgaaggacctgaccgccaagtacaccgagggcggcaacgccatcctggagaacatcagcttcagcatcagccccggccagagagtgggcctgctgggcagaaccggcagcggcaagagcaccctgctgagcgccttcctgagactgctgaacaccgagggcgagatccagatcgacggcgtgagctgggacagcatcaccctgcagcagtggagaaaggccttcggcgtgatcccccagaaggtgttcatcttcagcggcaccttcagaaagaacctggacccctacgagcagtggagcgaccaggagatctggaaggtggccgacgaggtgggcctgagaagcgtgatcgagcagttccccggcaagctggacttcgtgctggtggacggcggctgcgtgctgagccacggccacaagcagctgatgtgcctggccagaagcgtgctgagcaaggccaagatcctgctgctggacgagcccagcgcccacctggaccccgtgacctaccagatcatcagaagaaccctgaagcaggccttcgccgactgcaccgtgatcctgtgcgagcacagaatcgaggccatgctggagtgccagcagttcctggtgatcgaggagaacaaggtgagacagtacgacagcatccagaagctgctgaacgagagaagcctgttcagacaggccatcagccccagcgacagagtgaagctgttcccccacagaaacagcagcaagtgcaagagcaagccccagatcgccgccctgaagtag

SEQ ID NO: 1839 - DNA, 4260 bp, synthetic construct
  misc_feature 1..4260: note = source = /note="Description of Artificial Sequence: Synthetic coding sequence"
  source 1..4260: mol_type = other DNA
atgcagagaagccccctggagaaggccagcgtggtgagcaagctgttcttcagctggaccagacccatcctgagaaagggctacagacagagactggagctgagcgacatctaccagatccccagcgtggacagcgccgacaacctgagcgagaagctggagagagagtgggacagagagctggccagcaagaagaaccccaagctgatcaacgccctgagaagatgcttcttctggagattcatgttctacggcatcttcctgtacctgggcgaggtgaccaaggccgtgcagcccctgctgctgggcagaatcatcgccagctacgaccccgacaacaaggaggagagaagcatcgccatctacctgggcatcggcctgtgcctgctgttcatcgtgagaaccctgctgctgcaccccgccatcttcggcctgcaccacatcggcatgcagatgagaatcgccatgttcagcctgatctacaagaagaccctgaagctgagcagcagagtgctggacaagatcagcatcggccagctggtgagcctgctgagcaacaacctgaacaagttcgacgagggcctggccctggcccacttcgtgtggatcgcccccctgcaggtggccctgctgatgggcctgatctgggagctgctgcaggccagcgccttctgcggcctgggcttcctgatcgtgctggccctgttccaggccggcctgggcagaatgatgatgaagtacagagaccagagagccggcaagatcagcgagagactggtgatcaccagcgagatgatcgagaacatccagagcgtgaaggcctactgctgggaggaggccatggagaagatgatcgagaacctgagacagaccgagctgaagctgaccagaaaggccgcctacgtgagatacttcaacagcagcgccttcttcttcagcggcttcttcgtggtgttcctgagcgtgctgccctacgccctgatcaagggcatcatcctgagaaagatcttcaccaccatcagcttctgcatcgtgctgagaatggccgtgaccagacagttcccctgggccgtgcagacctggtacgacagcctgggcgccatcaacaagatccaggacttcctgcagaagcaggagtacaagaccctggagtacaacctgaccaccaccgaggtggtgatggagaacgtgaccgccttctgggaggagaccagcctgctgatggtgatcatgggcgagctggagcccagcgagggcaagatcaagcacagcggcagaatcagcttctgcagccagttcagctggatcatgcccggcaccatcaaggagaacatcatcttcggcgtgagctacgacgagtacagatacagaagcgtgatcaaggcctgccagctggaggaggacatcagcaagttcgccgagaaggacaacatcgtgctgggcgagggcggcatcaccctgagcggcggccagagagccagaatcagcctggccagagccgtgtacaaggacgccgacctgtacctgctggacagccccttcggctacctggacgtgctgaccgagaaggagatcttcgagagctgcgtgtgcaagctgatggccaacaagaccagaatcctggtgaccagcaagatggagcacctgaagaaggccgacaagatcctgatcctgcacgagggcagcagctacttctacggcaccttcagcgagctgcagaacctgcagcccgacttcagcagcaagctgatgggctgcgacagcttcgaccagttcagcgccgagagaagaaacagcatcctgaccgagaccctgcacagattcagcctggagggcgacgcccccgtgagctggaccgagaccaagaagcagagcttcaagcagaccggcgagttcggcgagaagagaaagaacagcatcctgaaccccatcaacagcatcagaaagttcagcatcgtgcagaagacccccctgcagatgaacggcatcgaggaggacagcgacgagcccctggagagaagactgagcctggtgcccgacagcgagcagggcgaggccatcctgcccagaatcagcgtgatcagcaccggccccaccctgcaggccagaagaagacagagcgtgctgaacctgatgacccacagcgtgaaccagggccagaacatccacagaaagaccaccgccagcaccagaaaggtgagcctggccccccaggccaacctgaccgagctggacatctacagcagaagactgagccaggagaccggcctggagatcagcgaggagatcaacgaggaggacctgaaggagtgcttcttcgacgacatggagagcatccccgccgtgaccacctggaacacctacctgagatacatcaccgtgcacaagagcctgatcttcgtgctgatctggtgcctggtgatcttcctggccgaggtggccgccagcctggtggtgctgtggctgctgggcaacacccccctgcaggacaagggcaacagcacccacagcagaaacaacagctacgccgtgatcatcaccagcaccagcagctactacgtgttctacatctacgtgggcgtggccgacaccctgctggccatgggcttcttcagaggcctgcccctggtgcacaccctgatcaccgtgagcaagatcctgcaccacaagatgctgcacagcgtgctgcaggcccccatgagcaccctgaacaccctgaaggccggcggcatcctgaacagattcagcaaggacatcgccatcctggacgacctgctgcccctgaccatcttcgacttcatccagctgctgctgatcgtgatcggcgccatcgccgtggtggccgtgctgcagccctacatcttcgtggccaccgtgcccgtgatcgtggccttcatcatgctgagagcctacttcctgcagaccagccagcagctgaagcagctggagagcgagggcagaagccccatcttcacccacctggtgaccagcctgaagggcctgtggaccctgagagccttcggcagacagccctacttcgagaccctgttccacaaggccctgaacctgcacaccgccaactggttcctgtacctgagcaccctgagatggttccagatgagaatcgagatgatcttcgtgatcttcttcatcgccgtgaccttcatcagcatcctgaccaccggcgagggcgagggcagagtgggcatcatcctgaccctggccatgaacatcatgagcaccctgcagtgggccgtgaacagcagcatcgacgtggacagcctgatgagaagcgtgagcagagtgttcaagttcatcgacatgcccaccgagggcaagcccaccaagagcaccaagccctacaagaacggccagctgagcaaggtgatgatcatcgagaacagccacgtgaagaaggacgacatctggcccagcggcggccagatgaccgtgaaggacctgaccgccaagtacaccgagggcggcaacgccatcctggagaacatcagcttcagcatcagccccggccagagagtgggcctgctgggcagaaccggcagcggcaagagcaccctgctgagcgccttcctgagactgctgaacaccgagggcgagatccagatcgacggcgtgagctgggacagcatcaccctgcagcagtggagaaaggccttcggcgtgatcccccagaaggtgttcatcttcagcggcaccttcagaaagaacctggacccctacgagcagtggagcgaccaggagatctggaaggtggccgacgaggtgggcctgagaagcgtgatcgagcagttccccggcaagctggacttcgtgctggtggacggcggctgcgtgctgagccacggccacaagcagctgatgtgcctggccagaagcgtgctgagcaaggccaagatcctgctgctggacgagcccagcgcccacctggaccccgtgacctaccagatcatcagaagaaccctgaagcaggccttcgccgactgcaccgtgatcctgtgcgagcacagaatcgaggccatgctggagtgccagcagttcctggtgatcgaggagaacaaggtgagacagtacgacagcatccagaagctgctgaacgagagaagcctgttcagacaggccatcagccccagcgacagagtgaagctgttcccccacagaaacagcagcaagtgcaagagcaagccccagatcgccgccctgaaggaggagaccgaggaggaggtgcaggacaccagactgtag

SEQ ID NO: 1840 - DNA, 573 bp, synthetic construct
  misc_feature 1..573: note = source = /note="Description of Artificial Sequence: Synthetic coding sequence"
  source 1..573: mol_type = other DNA
tgaaagggcctgtggaccctgagagccttcggcagacagccctacttcgagaccctgttccacaaggccctgaacctgcacaccgccaactggttcctgtacctgagcaccctgagatggttccagatgagaatcgagatgatcttcgtgatcttcttcatcgccgtgaccttcatcagcatcctgaccaccggcgagggcgagggcagagtgggcatcatcctgaccctggccatgaacatcatgagcaccctgcagtgggccgtgaacagcagcatcgacgtggacagcctgatgagaagcgtgagcagagtgttcaagttcatcgacatgcccaccgagggcaagcccaccaagagcaccaagccctacaagaacggccagctgagcaaggtgatgatcatcgagaacagccacgtgaagaaggacgacatctggcccagcggcggccagatgaccgtgaaggacctgaccgccaagtacaccgagggcggcaacgccatcctggagaacatcagcttcagcatcagccccggccagagagtgagattcgagcactgcctgctgtgctag

SEQ ID NO: 1841 - DNA, 1203 bp, synthetic construct
  misc_feature 1..1203: note = source = /note="Description of Artificial Sequence: Synthetic coding sequence"
  source 1..1203: mol_type = other DNA
atgatcagaaactggctgaccatcttcatcctgttccccctgaagctggtggagaagtgcgagagcagcgtgagcctgaccgtgccccccgtggtgaagctggagaacggcagcagcaccaacgtgagcctgaccctgagaccccccctgaacgccaccctggtgatcaccttcgagatcaccttcagaagcaagaacatcaccatcctggagctgcccgacgaggtggtggtgccccccggcgtgaccaacagcagcttccaggtgaccagccagaacgtgggccagctgaccgtgtacctgcacggcaaccacagcaaccagaccggccccagaatcagattcctggtgatcagaagcagcgccatcagcatcatcaaccaggtgatcggctggatctacttcgtggcctggagcatcagcttctacccccaggtgatcatgaactggagaagaaagagcgtgatcggcctgagcttcgacttcgtggccctgaacctgaccggcttcgtggcctacagcgtgttcaacatcggcctgctgtgggtgccctacatcaaggagcagttcctgctgaagtaccccaacggcgtgaaccccgtgaacagcaacgacgtgttcttcagcctgcacgccgtggtgctgaccctgatcatcatcgtgcagtgctgcctgtacgagagaggcggccagagagtgagctggcccgccatcggcttcctggtgctggcctggctgttcgccttcgtgaccatgatcgtggccgccgtgggcgtgaccacctggctgcagttcctgttctgcttcagctacatcaagctggccgtgaccctggtgaagtacttcccccaggcctacatgaacttctactacaagagcaccgagggctggagcatcggcaacgtgctgctggacttcaccggcggcagcttcagcctgctgcagatgttcctgcagagctacaacaacgaccagtggaccctgatcttcggcgaccccaccaagttcggcctgggcgtgttcagcatcgtgttcgacgtggtgttcttcatccagcacttctgcctgtacagaaagagacccggcctgcaggccgccagaaccggcagcggcagcagactgagacaggactgggcccccagcctgcagcccaaggccctgccccagaccaccagcgtgagcgccagcagcctgaagggctag

SEQ ID NO: 1842 - DNA, 1104 bp, synthetic construct
  misc_feature 1..1104: note = source = /note="Description of Artificial Sequence: Synthetic coding sequence"
  source 1..1104: mol_type = other DNA
atgatcagaaactggctgaccatcttcatcctgttccccctgaagctggtggagaagtgcgagagcagcgtgagcctgaccgtgccccccgtggtgaagctggagaacggcagcagcaccaacgtgagcctgaccctgagaccccccctgaacgccaccctggtgatcaccttcgagatcaccttcagaagcaagaacatcaccatcctggagctgcccgacgaggtggtggtgccccccggcgtgaccaacagcagcttccaggtgaccagccagaacgtgggccagctgaccgtgtacctgcacggcaaccacagcaaccagaccggccccagaatcagattcctggtgatcagaagcagcgccatcagcatcatcaaccaggtgatcggctggatctacttcgtggcctggagcatcagcttctacccccaggtgatcatgaactggagaagaaagagcgtgatcggcctgagcttcgacttcgtggccctgaacctgaccggcttcgtggcctacagcgtgttcaacatcggcctgctgtgggtgccctacatcaaggagcagttcctgctgaagtaccccaacggcgtgaaccccgtgaacagcaacgacgtgttcttcagcctgcacgccgtggtgctgaccctgatcatcatcgtgcagtgctgcctgtacgagagaggcggccagagagtgagctggcccgccatcggcttcctggtgctggcctggctgttcgccttcgtgaccatgatcgtggccgccgtgggcgtgaccacctggctgcagttcctgttctgcttcagctacatcaagctggccgtgaccctggtgaagtacttcccccaggcctacatgaacttctactacaagagcaccgagggctggagcatcggcaacgtgctgctggacttcaccggcggcagcttcagcctgctgcagatgttcctgcagagctacaacaacgaccagtggaccctgatcttcggcgaccccaccaagttcggcctgggcgtgttcagcatcgtgttcgacgtggtgttcttcatccagcacttctgcctgtacagaaagagacccggctacgaccagctgaactag

SEQ ID NO: 1843 - DNA, 663 bp, synthetic construct
  misc_feature 1..663: note = source = /note="Description of Artificial Sequence: Synthetic coding sequence"
  source 1..663: mol_type = other DNA
atgaactggagaagaaagagcgtgatcggcctgagcttcgacttcgtggccctgaacctgaccggcttcgtggcctacagcgtgttcaacatcggcctgctgtgggtgccctacatcaaggagcagttcctgctgaagtaccccaacggcgtgaaccccgtgaacagcaacgacgtgttcttcagcctgcacgccgtggtgctgaccctgatcatcatcgtgcagtgctgcctgtacgagagaggcggccagagagtgagctggcccgccatcggcttcctggtgctggcctggctgttcgccttcgtgaccatgatcgtggccgccgtgggcgtgaccacctggctgcagttcctgttctgcttcagctacatcaagctggccgtgaccctggtgaagtacttcccccaggcctacatgaacttctactacaagagcaccgagggctggagcatcggcaacgtgctgctggacttcaccggcggcagcttcagcctgctgcagatgttcctgcagagctacaacaacgaccagtggaccctgatcttcggcgaccccaccaagttcggcctgggcgtgttcagcatcgtgttcgacgtggtgttcttcatccagcacttctgcctgtacagaaagagacccggctacgaccagctgaactag

SEQ ID NO: 1844 - DNA, 879 bp, synthetic construct
  misc_feature 1..879: note = source = /note="Description of Artificial Sequence: Synthetic coding sequence"
  source 1..879: mol_type = other DNA
atgtgccccagaatcagattcctggtgatcagaagcagcgccatcagcatcatcaaccaggtgatcggctggatctacttcgtggcctggagcatcagcttctacccccaggtgatcatgaactggagaagaaagagcgtgatcggcctgagcttcgacttcgtggccctgaacctgaccggcttcgtggcctacagcgtgttcaacatcggcctgctgtgggtgccctacatcaaggagcagttcctgctgaagtaccccaacggcgtgaaccccgtgaacagcaacgacgtgttcttcagcctgcacgccgtggtgctgaccctgatcatcatcgtgcagtgctgcctgtacgagagaggcggccagagagtgagctggcccgccatcggcttcctggtgctggcctggctgttcgccttcgtgaccatgatcgtggccgccgtgggcgtgaccacctggctgcagttcctgttctgcttcagctacatcaagctggccgtgaccctggtgaagtacttcccccaggcctacatgaacttctactacaagagcaccgagggctggagcatcggcaacgtgctgctggacttcaccggcggcagcttcagcctgctgcagatgttcctgcagagctacaacaacgaccagtggaccctgatcttcggcgaccccaccaagttcggcctgggcgtgttcagcatcgtgttcgacgtggtgttcttcatccagcacttctgcctgtacagaaagagacccggcctgcaggccgccagaaccggcagcggcagcagactgagacaggactgggcccccagcctgcagcccaaggccctgccccagaccaccagcgtgagcgccagcagcctgaagggctag

SEQ ID NO: 1845 - DNA, 228 bp, synthetic construct
  misc_feature 1..228: note = source = /note="Description of Artificial Sequence: Synthetic coding sequence"
  source 1..228: mol_type = other DNA
atgatcagaaactggctgaccatcttcatcctgttccccctgaagctggtggagaagtgcgagagcagcgtgagcctgaccgtgccccccgtggtgaagctggagaacggcagcagcaccaacgtgagcctgaccctgagaccccccctgaacgccaccctggtgatcaccttcgagatcaccttcagaagcaagaacatcaccatcctggagctgcccgacgagtag

SEQ ID NO: 1846 - DNA, 204 bp, synthetic construct
  misc_feature 1..204: note = source = /note="Description of Artificial Sequence: Synthetic coding sequence"
  source 1..204: mol_type = other DNA
atgagaatccactacctgctgttcgccctgctgttcctgttcctggtgcccgtgcccggccacggcggcatcatcaacaccctgcagaagtactactgcagagtgagaggcggcagatgcgccgtgctgagctgcctgcccaaggaggagcagatcggcaagtgcagcaccagaggcagaaagtgctgcagaagaaagaagtag

SEQ ID NO: 1847 - DNA, 204 bp, synthetic construct; identical to SEQ ID NO: 1846
  misc_feature 1..204: note = source = /note="Description of Artificial Sequence: Synthetic coding sequence"
  source 1..204: mol_type = other DNA

SEQ ID NO: 1848 - DNA, 195 bp, synthetic construct
  misc_feature 1..195: note = source = /note="Description of Artificial Sequence: Synthetic coding sequence"
  source 1..195: mol_type = other DNA
atgagagtgctgtacctgctgttcagcttcctgttcatcttcctgatgcccctgcccggcgtgttcggcggcatcggcgaccccgtgacctgcctgaagagcggcgccatctgccaccccgtgttctgccccagaagatacaagcagatcggcacctgcggcctgcccggcaccaagtgctgcaagaagccctag

SEQ ID NO: 1849 - DNA, 195 bp, synthetic construct; identical to SEQ ID NO: 1848
  misc_feature 1..195: note = source = /note="Description of Artificial Sequence: Synthetic coding sequence"
  source 1..195: mol_type = other DNA

SEQ ID NO: 1850 - DNA, 849 bp, synthetic construct
  misc_feature 1..849: note = source = /note="Description of Artificial Sequence: Synthetic coding sequence"
  source 1..849: mol_type = other DNA
atgagaggcatgaagctgctgggcgccctgctggccctggccgccctgctgcagggcgccgtgagcctgaagatcgccgccttcaacatccagaccttcggcgagaccaagatgagcaacgccaccctggtgagctacatcgtgcagatcctgagcagatacgacatcgccctggtgcaggaggtgagagacagccacctgaccgccgtgggcaagctgctggacaacctgaaccaggacgcccccgacacctaccactacgtggtgagcgagcccctgggcagaaacagctacaaggagagatacctgttcgtgtacagacccgaccaggtgagcgccgtggacagctactactacgacgacggctgcgagccctgcggcaacgacaccttcaacagagagcccgccatcgtgagattcttcagcagattcaccgaggtgagagagttcgccatcgtgcccctgcacgccgcccccggcgacgccgtggccgagatcgacgccctgtacgacgtgtacctggacgtgcaggagaagtggggcctggaggacgtgatgctgatgggcgacttcaacgccggctgcagctacgtgagacccagccagtggagcagcatcagactgtggaccagccccaccttccagtggctgatccccgacagcgccgacaccaccgccacccccacccactgcgcctacgacagaatcgtggtggccggcatgctgctgagaggcgccgtggtgcccgacagcgccctgcccttcaacttccaggccgcctacggcctgagcgaccagctggcccaggccatcagcgaccactaccccgtggaggtgatgctgaagtag

SEQ ID NO: 1851 - DNA, 849 bp, synthetic construct; identical to SEQ ID NO: 1850
  misc_feature 1..849: note = source = /note="Description of Artificial Sequence: Synthetic coding sequence"
  source 1..849: mol_type = other DNA

SEQ ID NO: 1852 - DNA, 564 bp, synthetic construct
  misc_feature 1..564: note = source = /note="Description of Artificial Sequence: Synthetic coding sequence"
  source 1..564: mol_type = other DNA
atgcaccagacccccatcaccacctggagcgtgagccactgggacggcaccgccatcagaagcgccacctgcagctgcaccggcctgaccagatgcctgagatggaccgccaccaccaccatgatggccgccagccccgccggcaccacccccagcaccgagagccagcccctgagcggcagcagccccggcagccaggacgtgatgctgatgggcgacttcaacgccggctgcagctacgtgagacccagccagtggagcagcatcagactgtggaccagccccaccttccagtggctgatccccgacagcgccgacaccaccgccacccccacccactgcgcctacgacagaatcgtggtggccggcatgctgctgagaggcgccgtggtgcccgacagcgccctgcccttcaacttccaggccgcctacggcctgagcgaccagctgttcagcgtgcacacctgcagcggcgccggcctgggcgagagacacggcctgcccgccagcgccgccctgcccagcaacacctgcagagccggcacccacagagtgagcacctag

SEQ ID NO: 1853 - DNA, 6243 bp, synthetic construct
  misc_feature 1..6243: note = source = /note="Description of Artificial Sequence: Synthetic coding sequence"
  source 1..6243: mol_type = other DNA
atgctgagagtgttcatcctgtacgccgagaacgtgcacacccccgacaccgacatcagcgacgcctactgcagcgccgtgttcgccggcgtgaagaagagaaccaaggtgatcaagaacagcgtgaaccccgtgtggaacgagggcttcgagtgggacctgaagggcatccccctggaccagggcagcgagctgcacgtggtggtgaaggaccacgagaccatgggcagaaacagattcctgggcgaggccaaggtgcccctgagagaggtgctggccacccccagcctgagcgccagcttcaacgcccccctgctggacaccaagaagcagcccaccggcgccagcctggtgctgcaggtgagctacacccccctgcccggcgccgtgcccctgttccccccccccacccccctggagcccagccccaccctgcccgacctggacgtggtggccgacaccggcggcgaggaggacaccgaggaccagggcctgaccggcgacgaggccgagcccttcctggaccagagcggcggccccggcgcccccaccacccccagaaagctgcccagcagaccccccccccactaccccggcatcaagagaaagagaagcgcccccaccagcagaaagctgctgagcgacaagccccaggacttccagatcagagtgcaggtgatcgagggcagacagctgcccggcgtgaacatcaagcccgtggtgaaggtgaccgccgccggccagaccaagagaaccagaatccacaagggcaacagccccctgttcaacgagaccctgttcttcaacctgttcgacagccccggcgagctgttcgacgagcccatcttcatcaccgtggtggacagcagaagcctgagaaccgacgccctgctgggcgagttcagaatggacgtgggcaccatctacagagagcccagacacgcctacctgagaaagtggctgctgctgagcgaccccgacgacttcagcgccggcgccagaggctacctgaagaccagcctgtgcgtgctgggccccggcgacgaggcccccctggagagaaaggaccccagcgaggacaaggaggacatcgagagcaacctgctgagacccaccggcgtggccctgagaggcgcccacttctgcctgaaggtgttcagagccgaggacctgccccagatggacgacgccgtgatggacaacgtgaagcagatcttcggcttcgagagcaacaagaagaacctggtggaccccttcgtggaggtgagcttcgccggcaagatgctgtgcagcaagatcctggagaagaccgccaacccccagtggaaccagaacatcaccctgcccgccatgttccccagcatgtgcgagaagatgagaatcagaatcatcgactgggacagactgacccacaacgacatcgtggccaccacctacctgagcatgagcaagatcagcgcccccggcggcgagatcgaggaggagcccgccggcgccgtgaagcccagcaaggccagcgacctggacgactacctgggcttcctgcccaccttcggcccctgctacatcaacctgtacggcagccccagagagttcaccggcttccccgacccctacaccgagctgaacaccggcaagggcgagggcgtggcctacagaggcagactgctgctgagcctggagaccaagctggtggagcacagcgagcagaaggtggaggacctgcccgccgacgacatcctgagagtggagaagtacctgagaagaagaaagtacagcctgttcgccgccttctacagcgccaccatgctgcaggacgtggacgacgccatccagttcgaggtgagcatcggcaactacggcaacaagttcgacatgacctgcctgcccctggccagcaccacccagtacagcagagccgtgttcgacggctgccactactactacctgccctggggcaacgtgaagcccgtggtggtgctgagcagctactgggaggacatcagccacagaatcgagacccagaaccagctgctgggcatcgccgacagactggaggccggcctggagcaggtgcacctggccctgaaggcccagtgcagcaccgaggacgtggacagcctggtggcccagctgaccgacgagctgatcgccggctgcagccagcccctgggcgacatccacgagacccccagcgccacccacctggaccagtacctgtaccagctgagaacccaccacctgagccagatcaccgaggccgccctggccctgaagctgggccacagcgagctgcccgccgccctggagcaggccgaggactggctgctgagactgagagccctggccgaggagccccagaacagcctgcccgacatcgtgatctggatgctgcagggcgacaagagagtggcctaccagagagtgcccgcccaccaggtgctgttcagcagaagaggcgccaactactgcggcaagaactgcggcaagctgcagaccatcttcctgaagtaccccatggagaaggtgcccggcgccagaatgcccgtgcagatcagagtgaagctgtggttcggcctgagcgtggacgagaaggagttcaaccagttcgccgagggcaagctgagcgtgttcgccgagacctacgagaacgagaccaagctggccctggtgggcaactggggcaccaccggcctgacctaccccaagttcagcgacgtgaccggcaagatcaagctgcccaaggacagcttcagacccagcgccggctggacctgggccggcgactggttcgtgtgccccgagaagaccctgctgcacgacatggacgccggccacctgagcttcgtggaggaggtgttcgagaaccagaccagactgcccggcggccagtggatctacatgagcgacaactacaccgacgtgaacggcgagaaggtgctgcccaaggacgacatcgagtgccccctgggctggaagtgggaggacgaggagtggagcaccgacctgaacagagccgtggacgagcagggctgggagtacagcatcaccatcccccccgagagaaagcccaagcactgggtgcccgccgagaagatgtactacacccacagaagaagaagatgggtgagactgagaagaagagacctgagccagatggaggccctgaagagacacagacaggccgaggccgagggcgagggctgggagtacgccagcctgttcggctggaagttccacctggagtacagaaagaccgacgccttcagaagaagaagatggagaagaagaatggagcccctggagaagaccggccccgccgccgtgttcgccctggagggcgccctgggcggcgtgatggacgacaagagcgaggacagcatgagcgtgagcaccctgagcttcggcgtgaacagacccaccatcagctgcatcttcgactacggcaacagataccacctgagatgctacatgtaccaggccagagacctggccgccatggacaaggacagcttcagcgacccctacgccatcgtgagcttcctgcaccagagccagaagaccgtggtggtgaagaacaccctgaaccccacctgggaccagaccctgatcttctacgagatcgagatcttcggcgagcccgccaccgtggccgagcagccccccagcatcgtggtggagctgtacgaccacgacacctacggcgccgacgagttcatgggcagatgcatctgccagcccagcctggagagaatgcccagactggcctggttccccctgaccagaggcagccagcccagcggcgagctgctggccagcttcgagctgatccagagagagaagcccgccatccaccacatccccggcttcgaggtgcaggagaccagcagaatcctggacgagagcgaggacaccgacctgccctacccccccccccagagagaggccaacatctacatggtgccccagaacatcaagcccgccctgcagagaaccgccatcgagatcctggcctggggcctgagaaacatgaagagctaccagctggccaacatcagcagccccagcctggtggtggagtgcggcggccagaccgtgcagagctgcgtgatcagaaacctgagaaagaaccccaacttcgacatctgcaccctgttcatggaggtgatgctgcccagagaggagctgtactgcccccccatcaccgtgaaggtgatcgacaacagacagttcggcagaagacccgtggtgggccagtgcaccatcagaagcctggagagcttcctgtgcgacccctacagcgccgagagccccagcccccagggcggccccgacgacgtgagcctgctgagccccggcgaggacgtgctgatcgacatcgacgacaaggagcccctgatccccatccaggaggaggagttcatcgactggtggagcaagttcttcgccagcatcggcgagagagagaagtgcggcagctacctggagaaggacttcgacaccctgaaggtgtacgacacccagctggagaacgtggaggccttcgagggcctgagcgacttctgcaacaccttcaagctgtacagaggcaagacccaggaggagaccgaggaccccagcgtgatcggcgagttcaagggcctgttcaagatctaccccctgcccgaggaccccgccatccccatgccccccagacagttccaccagctggccgcccagggcccccaggagtgcctggtgagaatctacatcgtgagagccttcggcctgcagcccaaggaccccaacggcaagtgcgacccctacatcaagatcagcatcggcaagaagagcgtgagcgaccaggacaactacatcccctgcaccctggagcccgtgttcggcaagatgttcgagctgacctgcaccctgcccctggagaaggacctgaagatcaccctgtacgactacgacctgctgagcaaggacgagaagatcggcgagaccgtggtggacctggagaacagactgctgagcaagttcggcgccagatgcggcctgccccagacctactgcgtgagcggccccaaccagtggagagaccagctgagacccagccagctgctgcacctgttctgccagcagcacagagtgaaggcccccgtgtacagaaccgacagagtgatgttccaggacaaggagtacagcatcgaggagatcgaggccggcagaatccccaacccccacctgggccccgtggaggagagactggccctgcacgtgctgcagcagcagggcctggtgcccgagcacgtggagagcagacccctgtacagccccctgcagcccgacatcgagcagggcaagctgcagatgtgggtggacctgttccccaaggccctgggcagacccggcccccccttcaacatcacccccagaagagccagaagattcttcctgagatgcatcatctggaacaccagagacgtgatcctggacgacctgagcctgaccggcgagaagatgagcgacatctacgtgaagggctggatgatcggcttcgaggagcacaagcagaagaccgacgtgcactacagaagcctgggcggcgagggcaacttcaactggagattcatcttccccttcgactacctgcccgccgagcaggtgtgcaccatcgccaagaaggacgccttctggagactggacaagaccgagagcaagatccccgccagagtggtgttccagatctgggacaacgacaagttcagcttcgacgacttcctgggcagcctgcagctggacctgaacagaatgcccaagcccgccaagaccgccaagaagtgcagcctggaccagctggacgacgccttccaccccgagtggttcgtgagcctgttcgagcagaagaccgtgaagggctggtggccctgcgtggccgaggagggcgagaagaagatcctggccggcaagctggagatgaccctggagatcgtggccgagagcgagcacgaggagagacccgccggccagggcagagacgagcccaacatgaaccccaagctggaggaccccagaagacccgacaccagcttcctgtggttcaccagcccctacaagaccatgaagttcatcctgtggagaagattcagatgggccatcatcctgttcatcatcctgttcatcctgctgctgttcctggccatcttcatctacgccttccccaactacgccgccatgaagctggtgaagcccttcagctag

SEQ ID NO: 1854 - DNA, 6246 bp, synthetic construct
  misc_feature 1..6246: note = source = /note="Description of Artificial Sequence: Synthetic coding sequence"
  source 1..6246: mol_type = other DNA
atgctgtgctgcctgctggtgagagccagcaacctgcccagcgccaagaaggacagaagaagcgaccccgtggccagcctgaccttcagaggcgtgaagaagagaaccaaggtgatcaagaacagcgtgaaccccgtgtggaacgagggcttcgagtgggacctgaagggcatccccctggaccagggcagcgagctgcacgtggtggtgaaggaccacgagaccatgggcagaaacagattcctgggcgaggccaaggtgcccctgagagaggtgctggccacccccagcctgagcgccagcttcaacgcccccctgctggacaccaagaagcagcccaccggcgccagcctggtgctgcaggtgagctacacccccctgcccggcgccgtgcccctgttccccccccccacccccctggagcccagccccaccctgcccgacctggacgtggtggccgacaccggcggcgaggaggacaccgaggaccagggcctgaccggcgacgaggccgagcccttcctggaccagagcggcggccccggcgcccccaccacccccagaaagctgcccagcagaccccccccccactaccccggcatcaagagaaagagaagcgcccccaccagcagaaagctgctgagcgacaagccccaggacttccagatcagagtgcaggtgatcgagggcagacagctgcccggcgtgaacatcaagcccgtggtgaaggtgaccgccgccggccagaccaagagaaccagaatccacaagggcaacagccccctgttcaacgagaccctgttcttcaacctgttcgacagccccggcgagctgttcgacgagcccatcttcatcaccgtggtggacagcagaagcctgagaaccgacgccctgctgggcgagttcagaatggacgtgggcaccatctacagagagcccagacacgcctacctgagaaagtggctgctgctgagcgaccccgacgacttcagcgccggcgccagaggctacctgaagaccagcctgtgcgtgctgggccccggcgacgaggcccccctggagagaaaggaccccagcgaggacaaggaggacatcgagagcaacctgctgagacccaccggcgtggccctgagaggcgcccacttctgcctgaaggtgttcagagccgaggacctgccccagatggacgacgccgtgatggacaacgtgaagcagatcttcggcttcgagagcaacaagaagaacctggtggaccccttcgtggaggtgagcttcgccggcaagatgctgtgcagcaagatcctggagaagaccgccaacccccagtggaaccagaacatcaccctgcccgccatgttccccagcatgtgcgagaagatgagaatcagaatcatcgactgggacagactgacccacaacgacatcgtggccaccacctacctgagcatgagcaagatcagcgcccccggcggcgagatcgaggaggagcccgccggcgccgtgaagcccagcaaggccagcgacctggacgactacctgggcttcctgcccaccttcggcccctgctacatcaacctgtacggcagccccagagagttcaccggcttccccgacccctacaccgagctgaacaccggcaagggcgagggcgtggcctacagaggcagactgctgctgagcctggagaccaagctggtggagcacagcgagcagaaggtggaggacctgcccgccgacgacatcctgagagtggagaagtacctgagaagaagaaagtacagcctgttcgccgccttctacagcgccaccatgctgcaggacgtggacgacgccatccagttcgaggtgagcatcggcaactacggcaacaagttcgacatgacctgcctgcccctggccagcaccacccagtacagcagagccgtgttcgacggctgccactactactacctgccctggggcaacgtgaagcccgtggtggtgctgagcagctactgggaggacatcagccacagaatcgagacccagaaccagctgctgggcatcgccgacagactggaggccggcctggagcaggtgcacctggccctgaaggcccagtgcagcaccgaggacgtggacagcctggtggcccagctgaccgacgagctgatcgccggctgcagccagcccctgggcgacatccacgagacccccagcgccacccacctggaccagtacctgtaccagctgagaacccaccacctgagccagatcaccgaggccgccctggccctgaagctgggccacagcgagctgcccgccgccctggagcaggccgaggactggctgctgagactgagagccctggccgaggagccccagaacagcctgcccgacatcgtgatctggatgctgcagggcgacaagagagtggcctaccagagagtgcccgcccaccaggtgctgttcagcagaagaggcgccaactactgcggcaagaactgcggcaagctgcagaccatcttcctgaagtaccccatggagaaggtgcccggcgccagaatgcccgtgcagatcagagtgaagctgtggttcggcctgagcgtggacgagaaggagttcaaccagttcgccgagggcaagctgagcgtgttcgccgagacctacgagaacgagaccaagctggccctggtgggcaactggggcaccaccggcctgacctaccccaagttcagcgacgtgaccggcaagatcaagctgcccaaggacagcttcagacccagcgccggctggacctgggccggcgactggttcgtgtgccccgagaagaccctgctgcacgacatggacgccggccacctgagcttcgtggaggaggtgttcgagaaccagaccagactgcccggcggccagtggatctacatgagcgacaactacaccgacgtgaacggcgagaaggtgctgcccaaggacgacatcgagtgccccctgggctggaagtgggaggacgaggagtggagcaccgacctgaacagagccgtggacgagcagggctgggagtacagcatcaccatcccccccgagagaaagcccaagcactgggtgcccgccgagaagatgtactacacccacagaagaagaagatgggtgagactgagaagaagagacctgagccagatggaggccctgaagagacacagacaggccgaggccgagggcgagggctgggagtacgccagcctgttcggctggaagttccacctggagtacagaaagaccgacgccttcagaagaagaagatggagaagaagaatggagcccctggagaagaccggccccgccgccgtgttcgccctggagggcgccctgggcggcgtgatggacgacaagagcgaggacagcatgagcgtgagcaccctgagcttcggcgtgaacagacccaccatcagctgcatcttcgactacggcaacagataccacctgagatgctacatgtaccaggccagagacctggccgccatggacaaggacagcttcagcgacccctacgccatcgtgagcttcctgcaccagagccagaagaccgtggtggtgaagaacaccctgaaccccacctgggaccagaccctgatcttctacgagatcgagatcttcggcgagcccgccaccgtggccgagcagccccccagcatcgtggtggagctgtacgaccacgacacctacggcgccgacgagttcatgggcagatgcatctgccagcccagcctggagagaatgcccagactggcctggttccccctgaccagaggcagccagcccagcggcgagctgctggccagcttcgagctgatccagagagagaagcccgccatccaccacatccccggcttcgaggtgcaggagaccagcagaatcctggacgagagcgaggacaccgacctgccctacccccccccccagagagaggccaacatctacatggtgccccagaacatcaagcccgccctgcagagaaccgccatcgagatcctggcctggggcctgagaaacatgaagagctaccagctggccaacatcagcagccccagcctggtggtggagtgcggcggccagaccgtgcagagctgcgtgatcagaaacctgagaaagaaccccaacttcgacatctgcaccctgttcatggaggtgatgctgcccagagaggagctgtactgcccccccatcaccgtgaaggtgatcgacaacagacagttcggcagaagacccgtggtgggccagtgcaccatcagaagcctggagagcttcctgtgcgacccctacagcgccgagagccccagcccccagggcggccccgacgacgtgagcctgctgagccccggcgaggacgtgctgatcgacatcgacgacaaggagcccctgatccccatccaggaggaggagttcatcgactggtggagcaagttcttcgccagcatcggcgagagagagaagtgcggcagctacctggagaaggacttcgacaccctgaaggtgtacgacacccagctggagaacgtggaggccttcgagggcctgagcgacttctgcaacaccttcaagctgtacagaggcaagacccaggaggagaccgaggaccccagcgtgatcggcgagttcaagggcctgttcaagatctaccccctgcccgaggaccccgccatccccatgccccccagacagttccaccagctggccgcccagggcccccaggagtgcctggtgagaatctacatcgtgagagccttcggcctgcagcccaaggaccccaacggcaagtgcgacccctacatcaagatcagcatcggcaagaagagcgtgagcgaccaggacaactacatcccctgcaccctggagcccgtgttcggcaagatgttcgagctgacctgcaccctgcccctggagaaggacctgaagatcaccctgtacgactacgacctgctgagcaaggacgagaagatcggcgagaccgtggtggacctggagaacagactgctgagcaagttcggcgccagatgcggcctgccccagacctactgcgtgagcggccccaaccagtggagagaccagctgagacccagccagctgctgcacctgttctgccagcagcacagagtgaaggcccccgtgtacagaaccgacagagtgatgttccaggacaaggagtacagcatcgaggagatcgaggccggcagaatccccaacccccacctgggccccgtggaggagagactggccctgcacgtgctgcagcagcagggcctggtgcccgagcacgtggagagcagacccctgtacagccccctgcagcccgacatcgagcagggcaagctgcagatgtgggtggacctgttccccaaggccctgggcagacccggcccccccttcaacatcacccccagaagagccagaagattcttcctgagatgcatcatctggaacaccagagacgtgatcctggacgacctgagcctgaccggcgagaagatgagcgacatctacgtgaagggctggatgatcggcttcgaggagcacaagcagaagaccgacgtgcactacagaagcctgggcggcgagggcaacttcaactggagattcatcttccccttcgactacctgcccgccgagcaggtgtgcaccatcgccaagaaggacgccttctggagactggacaagaccgagagcaagatccccgccagagtggtgttccagatctgggacaacgacaagttcagcttcgacgacttcctgggcagcctgcagctggacctgaacagaatgcccaagcccgccaagaccgccaagaagtgcagcctggaccagctggacgacgccttccaccccgagtggttcgtgagcctgttcgagcagaagaccgtgaagggctggtggccctgcgtggccgaggagggcgagaagaagatcctggccggcaagctggagatgaccctggagatcgtggccgagagcgagcacgaggagagacccgccggccagggcagagacgagcccaacatgaaccccaagctggaggaccccagaagacccgacaccagcttcctgtggttcaccagcccctacaagaccatgaagttcatcctgtggagaagattcagatgggccatcatcctgttcatcatcctgttcatcctgctgctgttcctggccatcttcatctacgccttccccaactacgccgccatgaagctggtgaagcccttcagctag

SEQ ID NO: 1855 - DNA, 6309 bp, synthetic construct
  misc_feature 1..6309: note = source = /note="Description of Artificial Sequence: Synthetic coding sequence"
  source 1..6309: mol_type = other DNA
atgctgtgctgcctgctggtgagagccagcaacctgcccagcgccaagaaggacagaagaagcgaccccgtggccagcctgaccttcagaggcgtgaagaagagaaccaaggtgatcaagaacagcgtgaaccccgtgtggaacgagggcttcgagtgggacctgaagggcatccccctggaccagggcagcgagctgcacgtggtggtgaaggaccacgagaccatgggcagaaacagattcctgggcgaggccaaggtgcccctgagagaggtgctggccacccccagcctgagcgccagcttcaacgcccccctgctggacaccaagaagcagcccaccggcgccagcctggtgctgcaggtgagctacacccccctgcccggcgccgtgcccctgttccccccccccacccccctggagcccagccccaccctgcccgacctggacgtggtggccgacaccggcggcgaggaggacaccgaggaccagggcctgaccggcgacgaggccgagcccttcctggaccagagcggcggccccggcgcccccaccacccccagaaagctgcccagcagaccccccccccactaccccggcatcaagagaaagagaagcgcccccaccagcagaaagctgctgagcgacaagccccaggacttccagatcagagtgcaggtgatcgagggcagacagctgcccggcgtgaacatcaagcccgtggtgaaggtgaccgccgccggccagaccaagagaaccagaatccacaagggcaacagccccctgttcaacgagaccctgttcttcaacctgttcgacagccccggcgagctgttcgacgagcccatcttcatcaccgtggtggacagcagaagcctgagaaccgacgccctgctgggcgagttcagaatggacgtgggcaccatctacagagagcccagacacgcctacctgagaaagtggctgctgctgagcgaccccgacgacttcagcgccggcgccagaggctacctgaagaccagcctgtgcgtgctgggccccggcgacgaggcccccctggagagaaaggaccccagcgaggacaaggaggacatcgagagcaacctgctgagacccaccggcgtggccctgagaggcgcccacttctgcctgaaggtgttcagagccgaggacctgccccagatggacgacgccgtgatggacaacgtgaagcagatcttcggcttcgagagcaacaagaagaacctggtggaccccttcgtggaggtgagcttcgccggcaagatgctgtgcagcaagatcctggagaagaccgccaacccccagtggaaccagaacatcaccctgcccgccatgttccccagcatgtgcgagaagatgagaatcagaatcatcgactgggacagactgacccacaacgacatcgtggccaccacctacctgagcatgagcaagatcagcgcccccggcggcgagatcgaggaggagcccgccggcgccgtgaagcccagcaaggccagcgacctggacgactacctgggcttcctgcccaccttcggcccctgctacatcaacctgtacggcagccccagagagttcaccggcttccccgacccctacaccgagctgaacaccggcaagggcgagggcgtggcctacagaggcagactgctgctgagcctggagaccaagctggtggagcacagcgagcagaaggtggaggacctgcccgccgacgacatcctgagagtggagaagtacctgagaagaagaaagtacagcctgttcgccgccttctacagcgccaccatgctgcaggacgtggacgacgccatccagttcgaggtgagcatcggcaactacggcaacaagttcgacatgacctgcctgcccctggccagcaccacccagtacagcagagccgtgttcgacggctgccactactactacctgccctggggcaacgtgaagcccgtggtggtgctgagcagctactgggaggacatcagccacagaatcgagacccagaaccagctgctgggcatcgccgacagactggaggccggcctggagcaggtgcacctggccctgaaggcccagtgcagcaccgaggacgtggacagcctggtggcccagctgaccgacgagctgatcgccggctgcagccagcccctgggcgacatccacgagacccccagcgccacccacctggaccagtacctgtaccagctgagaacccaccacctgagccagatcaccgaggccgccctggccctgaagctgggccacagcgagctgcccgccgccctggagcaggccgaggactggctgctgagactgagagccctggccgaggagccccagaacagcctgcccgacatcgtgatctggatgctgcagggcgacaagagagtggcctaccagagagtgcccgcccaccaggtgctgttcagcagaagaggcgccaactactgcggcaagaactgcggcaagctgcagaccatcttcctgaagtaccccatggagaaggtgcccggcgccagaatgcccgtgcagatcagagtgaagctgtggttcggcctgagcgtggacgagaaggagttcaaccagttcgccgagggcaagctgagcgtgttcgccgagacctacgagaacgagaccaagctggccctggtgggcaactggggcaccaccggcctgacctaccccaagttcagcgacgtgaccggcaagatcaagctgcccaaggacagcttcagacccagcgccggctggacctgggccggcgactggttcgtgtgccccgagaagaccctgctgcacgacatggacgccggccacctgagcttcgtggaggaggtgttcgagaaccagaccagactgcccggcggccagtggatctacatgagcgacaactacaccgacgtgaacggcgagaaggtgctgcccaaggacgacatcgagtgccccctgggctggaagtgggaggacgaggagtggagcaccgacctgaacagagccgtggacgagcagggctgggagtacagcatcaccatcccccccgagagaaagcccaagcactgggtgcccgccgagaagatgtactacacccacagaagaagaagatgggtgagactgagaagaagagacctgagccagatggaggccctgaagagacacagacaggccgaggccgagggcgagggctgggagtacgccagcctgttcggctggaagttccacctggagtacagaaagaccgacgccttcagaagaagaagatggagaagaagaatggagcccctggagaagaccggccccgccgccgtgttcgccctggagggcgccctgggcggcgtgatggacgacaagagcgaggacagcatgagcgtgagcaccctgagcttcggcgtgaacagacccaccatcagctgcatcttcgactacggcaacagataccacctgagatgctacatgtaccaggccagagacctggccgccatggacaaggacagcttcagcgacccctacgccatcgtgagcttcctgcaccagagccagaagaccgtggtggtgaagaacaccctgaaccccacctgggaccagaccctgatcttctacgagatcgagatcttcggcgagcccgccaccgtggccgagcagccccccagcatcgtggtggagctgtacgaccacgacacctacggcgccgacgagttcatgggcagatgcatctgccagcccagcctggagagaatgcccagactggcctggttccccctgaccagaggcagccagcccagcggcgagctgctggccagcttcgagctgatccagagagagaagcccgccatccaccacatccccggcttcgaggtgcaggagaccagcagaatcctggacgagagcgaggacaccgacctgccctacccccccccccagagagaggccaacatctacatggtgccccagaacatcaagcccgccctgcagagaaccgccatcgagatcctggcctggggcctgagaaacatgaagagctaccagctggccaacatcagcagccccagcctggtggtggagtgcggcggccagaccgtgcagagctgcgtgatcagaaacctgagaaagaaccccaacttcgacatctgcaccctgttcatggaggtgatgctgcccagagaggagctgtactgcccccccatcaccgtgaaggtgatcgacaacagacagttcggcagaagacccgtggtgggccagtgcaccatcagaagcctggagagcttcctgtgcgacccctacagcgccgagagccccagcccccagggcggccccgacgacgtgagcctgctgagccccggcgaggacgtgctgatcgacatcgacgacaaggagcccctgatccccatccagctggccgacggcctgagcagcctggcccccaccaacaccgccagcccccccagcagcccccacgaggaggagttcatcgactggtggagcaagttcttcgccagcatcggcgagagagagaagtgcggcagctacctggagaaggacttcgacaccctgaaggtgtacgacacccagctggagaacgtggaggccttcgagggcctgagcgacttctgcaacaccttcaagctgtacagaggcaagacccaggaggagaccgaggaccccagcgtgatcggcgagttcaagggcctgttcaagatctaccccctgcccgaggaccccgccatccccatgccccccagacagttccaccagctggccgcccagggcccccaggagtgcctggtgagaatctacatcgtgagagccttcggcctgcagcccaaggaccccaacggcaagtgcgacccctacatcaagatcagcatcggcaagaagagcgtgagcgaccaggacaactacatcccctgcaccctggagcccgtgttcggcaagatgttcgagctgacctgcaccctgcccctggagaaggacctgaagatcaccctgtacgactacgacctgctgagcaaggacgagaagatcggcgagaccgtggtggacctggagaacagactgctgagcaagttcggcgccagatgcggcctgccccagacctactgcgtgagcggccccaaccagtggagagaccagctgagacccagccagctgctgcacctgttctgccagcagcacagagtgaaggcccccgtgtacagaaccgacagagtgatgttccaggacaaggagtacagcatcgaggagatcgaggccggcagaatccccaacccccacctgggccccgtggaggagagactggccctgcacgtgctgcagcagcagggcctggtgcccgagcacgtggagagcagacccctgtacagccccctgcagcccgacatcgagcagggcaagctgcagatgtgggtggacctgttccccaaggccctgggcagacccggcccccccttcaacatcacccccagaagagccagaagattcttcctgagatgcatcatctggaacaccagagacgtgatcctggacgacctgagcctgaccggcgagaagatgagcgacatctacgtgaagggctggatgatcggcttcgaggagcacaagcagaagaccgacgtgcactacagaagcctgggcggcgagggcaacttcaactggagattcatcttccccttcgactacctgcccgccgagcaggtgtgcaccatcgccaagaaggacgccttctggagactggacaagaccgagagcaagatccccgccagagtggtgttccagatctgggacaacgacaagttcagcttcgacgacttcctgggcagcctgcagctggacctgaacagaatgcccaagcccgccaagaccgccaagaagtgcagcctggaccagctggacgacgccttccaccccgagtggttcgtgagcctgttcgagcagaagaccgtgaagggctggtggccctgcgtggccgaggagggcgagaagaagatcctggccggcaagctggagatgaccctggagatcgtggccgagagcgagcacgaggagagacccgccggccagggcagagacgagcccaacatgaaccccaagctggaggaccccagaagacccgacaccagcttcctgtggttcaccagcccctacaagaccatgaagttcatcctgtggagaagattcagatgggccatcatcctgttcatcatcctgttcatcctgctgctgttcctggccatcttcatctacgccttccccaactacgccgccatgaagctggtgaagcccttcagctag

SEQ ID NO: 1856 - DNA, 6357 bp, synthetic construct
  misc_feature 1..6357: note = source = /note="Description of Artificial Sequence: Synthetic coding sequence"
  source 1..6357: mol_type = other DNA
atgctgagagtgttcatcctgtacgccgagaacgtgcacacccccgacaccgacatcagcgacgcctactgcagcgccgtgttcgccggcgtgaagaagagaaccaaggtgatcaagaacagcgtgaaccccgtgtggaacgagggcttcgagtgggacctgaagggcatccccctggaccagggcagcgagctgcacgtggtggtgaaggaccacgagaccatgggcagaaacagattcctgggcgaggccaaggtgcccctgagagaggtgctggccacccccagcctgagcgccagcttcaacgcccccctgctggacaccaagaagcagcccaccggcgccagcctggtgctgcaggtgagctacacccccctgcccggcgccgtgcccctgttccccccccccacccccctggagcccagccccaccctgcccgacctggacgtggtggccggcggcggccagagcagagccgagacctggagcctgctgagcgacagcaccatggacaccagatacagcggcaagaagtggcccgcccccaccgacaccggcggcgaggaggacaccgaggaccagggcctgaccggcgacgaggccgagcccttcctggaccagagcggcggccccggcgcccccaccacccccagaaagctgcccagcagaccccccccccactaccccggcatcaagagaaagagaagcgcccccaccagcagaaagctgctgagcgacaagccccaggacttccagatcagagtgcaggtgatcgagggcagacagctgcccggcgtgaacatcaagcccgtggtgaaggtgaccgccgccggccagaccaagagaaccagaatccacaagggcaacagccccctgttcaacgagaccctgttcttcaacctgttcgacagccccggcgagctgttcgacgagcccatcttcatcaccgtggtggacagcagaagcctgagaaccgacgccctgctgggcgagttcagaatggacgtgggcaccatctacagagagcccagacacgcctacctgagaaagtggctgctgctgagcgaccccgacgacttcagcgccggcgccagaggctacctgaagaccagcctgtgcgtgctgggccccggcgacgaggcccccctggagagaaaggaccccagcgaggacaaggaggacatcgagagcaacctgctgagacccaccggcgtggccctgagaggcgcccacttctgcctgaaggtgttcagagccgaggacctgccccagatggacgacgccgtgatggacaacgtgaagcagatcttcggcttcgagagcaacaagaagaacctggtggaccccttcgtggaggtgagcttcgccggcaagatgctgtgcagcaagatcctggagaagaccgccaacccccagtggaaccagaacatcaccctgcccgccatgttccccagcatgtgcgagaagatgagaatcagaatcatcgactgggacagactgacccacaacgacatcgtggccaccacctacctgagcatgagcaagatcagcgcccccggcggcgagatcgaggtggacgactacctgggcttcctgcccaccttcggcccctgctacatcaacctgtacggcagccccagagagttcaccggcttccccgacccctacaccgagctgaacaccggcaagggcgagggcgtggcctacagaggcagactgctgctgagcctggagaccaagctggtggagcacagcgagcagaaggtggaggacctgcccgccgacgacatcctgagagtggagaagtacctgagaagaagaaagtacagcctgttcgccgccttctacagcgccaccatgctgcaggacgtggacgacgccatccagttcgaggtgagcatcggcaactacggcaacaagttcgacatgacctgcctgcccctggccagcaccacccagtacagcagagccgtgttcgacggctgccactactactacctgccctggggcaacgtgaagcccgtggtggtgctgagcagctactgggaggacatcagccacagaatcgagacccagaaccagctgctgggcatcgccgacagactggaggccggcctggagcaggtgcacctggccctgaaggcccagtgcagcaccgaggacgtggacagcctggtggcccagctgaccgacgagctgatcgccggctgcagccagcccctgggcgacatccacgagacccccagcgccacccacctggaccagtacctgtaccagctgagaacccaccacctgagccagatcaccgaggccgccctggccctgaagctgggccacagcgagctgcccgccgccctggagcaggccgaggactggctgctgagactgagagccctggccgaggagccccagaacagcctgcccgacatcgtgatctggatgctgcagggcgacaagagagtggcctaccagagagtgcccgcccaccaggtgctgttcagcagaagaggcgccaactactgcggcaagaactgcggcaagctgcagaccatcttcctgaagtaccccatggagaaggtgcccggcgccagaatgcccgtgcagatcagagtgaagctgtggttcggcctgagcgtggacgagaaggagttcaaccagttcgccgagggcaagctgagcgtgttcgccgagacctacgagaacgagaccaagctggccctggtgggcaactggggcaccaccggcctgacctaccccaagttcagcgacgtgaccggcaagatcaagctgcccaaggacagcttcagacccagcgccggctggacctgggccggcgactggttcgtgtgccccgagaagaccctgctgcacgacatggacgccggccacctgagcttcgtggaggaggtgttcgagaaccagaccagactgcccggcggccagtggatctacatgagcgacaactacaccgacgtgaacggcgagaaggtgctgcccaaggacgacatcgagtgccccctgggctggaagtgggaggacgaggagtggagcaccgacctgaacagagccgtggacgagcagggctgggagtacagcatcaccatcccccccgagagaaagcccaagcactgggtgcccgccgagaagatgtactacacccacagaagaagaagatgggtgagactgagaagaagagacctgagccagatggaggccctgaagagacacagacaggccgaggccgagggcgagggctgggagtacgccagcctgttcggctggaagttccacctggagtacagaaagaccgacgccttcagaagaagaagatggagaagaagaatggagcccctggagaagaccggccccgccgccgtgttcgccctggagggcgccctgggcggcgtgatggacgacaagagcgaggacagcatgagcgtgagcaccctgagcttcggcgtgaacagacccaccatcagctgcatcttcgactacggcaacagataccacctgagatgctacatgtaccaggccagagacctggccgccatggacaaggacagcttcagcgacccctacgccatcgtgagcttcctgcaccagagccagaagaccgtggtggtgaagaacaccctgaaccccacctgggaccagaccctgatcttctacgagatcgagatcttcggcgagcccgccaccgtggccgagcagccccccagcatcgtggtggagctgtacgaccacgacacctacggcgccgacgagttcatgggcagatgcatctgccagcccagcctggagagaatgcccagactggcctggttccccctgaccagaggcagccagcccagcggcgagctgctggccagcttcgagctgatccagagagagaagcccgccatccaccacatccccggcttcgaggtgcaggagaccagcagaatcctggacgagagcgaggacaccgacctgccctacccccccccccagagagaggccaacatctacatggtgccccagaacatcaagcccgccctgcagagaaccgccatcgagatcctggcctggggcctgagaaacatgaagagctaccagctggccaacatcagcagccccagcctggtggtggagtgcggcggccagaccgtgcagagctgcgtgatcagaaacctgagaaagaaccccaacttcgacatctgcaccctgttcatggaggtgatgctgcccagagaggagctgtactgcccccccatcaccgtgaaggtgatcgacaacagacagttcggcagaagacccgtggtgggccagtgcaccatcagaagcctggagagcttcctgtgcgacccctacagcgccgagagccccagcccccagggcggccccgacgacgtgagcctgctgagccccggcgaggacgtgctgatcgacatcgacgacaaggagcccctgatccccatccagctggccgacggcctgagcagcctggcccccaccaacaccgccagcccccccagcagcccccacgaggaggagttcatcgactggtggagcaagttcttcgccagcatcggcgagagagagaagtgcggcagctacctggagaaggacttcgacaccctgaaggtgtacgacacccagctggagaacgtggaggccttcgagggcctgagcgacttctgcaacaccttcaagctgtacagaggcaagacccaggaggagaccgaggaccccagcgtgatcggcgagttcaagggcctgttcaagatctaccccctgcccgaggaccccgccatccccatgccccccagacagttccaccagctggccgcccagggcccccaggagtgcctggtgagaatctacatcgtgagagccttcggcctgcagcccaaggaccccaacggcaagtgcgacccctacatcaagatcagcatcggcaagaagagcgtgagcgaccaggacaactacatcccctgcaccctggagcccgtgttcggcaagatgttcgagctgacctgcaccctgcccctggagaaggacctgaagatcaccctgtacgactacgacctgctgagcaaggacgagaagatcggcgagaccgtggtggacctggagaacagactgctgagcaagttcggcgccagatgcggcctgccccagacctactgcgtgagcggccccaaccagtggagagaccagctgagacccagccagctgctgcacctgttctgccagcagcacagagtgaaggcccccgtgtacagaaccgacagagtgatgttccaggacaaggagtacagcatcgaggagatcgaggccggcagaatccccaacccccacctgggccccgtggaggagagactggccctgcacgtgctgcagcagcagggcctggtgcccgagcacgtggagagcagacccctgtacagccccctgcagcccgacatcgagcagggcaagctgcagatgtgggtggacctgttccccaaggccctgggcagacccggcccccccttcaacatcacccccagaagagccagaagattcttcctgagatgcatcatctggaacaccagagacgtgatcctggacgacctgagcctgaccggcgagaagatgagcgacatctacgtgaagggctggatgatcggcttcgaggagcacaagcagaagaccgacgtgcactacagaagcctgggcggcgagggcaacttcaactggagattcatcttccccttcgactacctgcccgccgagcaggtgtgcaccatcgccaagaaggacgccttctggagactggacaagaccgagagcaagatccccgccagagtggtgttccagatctgggacaacgacaagttcagcttcgacgacttcctgggcagcctgcagctggacctgaacagaatgcccaagcccgccaagaccgccaagaagtgcagcctggaccagctggacgacgccttccaccccgagtggttcgtgagcctgttcgagcagaagaccgtgaagggctggtggccctgcgtggccgaggagggcgagaagaagatcctggccggcaagctggagatgaccctggagatcgtggccgagagcgagcacgaggagagacccgccggccagggcagagacgagcccaacatgaaccccaagctggaggaccccagaagacccgacaccagcttcctgtggttcaccagcccctacaagaccatgaagttcatcctgtggagaagattcagatgggccatcatcctgttcatcatcctgttcatcctgctgctgttcctggccatcttcatctacgccttccccaactacgccgccatgaagctggtgaagcccttcagctag

SEQ ID NO: 1857 - DNA, 6339 bp, synthetic construct
  misc_feature 1..6339: note = source = /note="Description of Artificial Sequence: Synthetic coding sequence"
  source 1..6339: mol_type = other DNA
atgctgtgctgcctgctggtgagagccagcaacctgcccagcgccaagaaggacagaagaagcgaccccgtggccagcctgaccttcagaggcgtgaagaagagaaccaaggtgatcaagaacagcgtgaaccccgtgtggaacgagggcttcgagtgggacctgaagggcatccccctggaccagggcagcgagctgcacgtggtggtgaaggaccacgagaccatgggcagaaacagattcctgggcgaggccaaggtgcccctgagagaggtgctggccacccccagcctgagcgccagcttcaacgcccccctgctggacaccaagaagcagcccaccggcgccagcctggtgctgcaggtgagctacacccccctgcccggcgccgtgcccctgttccccccccccacccccctggagcccagccccaccctgcccgacctggacgtggtggccggcggcggccagagcagagccgagacctggagcctgctgagcgacagcaccatggacaccagatacagcggcaagaagtggcccgcccccaccgacaccggcggcgaggaggacaccgaggaccagggcctgaccggcgacgaggccgagcccttcctggaccagagcggcggccccggcgcccccaccacccccagaaagctgcccagcagaccccccccccactaccccggcatcaagagaaagagaagcgcccccaccagcagaaagctgctgagcgacaagccccaggacttccagatcagagtgcaggtgatcgagggcagacagctgcccggcgtgaacatcaagcccgtggtgaaggtgaccgccgccggccagaccaagagaaccagaatccacaagggcaacagccccctgttcaacgagaccctgttcttcaacctgttcgacagccccggcgagctgttcgacgagcccatcttcatcaccgtggtggacagcagaagcctgagaaccgacgccctgctgggcgagttcagaatggacgtgggcaccatctacagagagcccagacacgcctacctgagaaagtggctgctgctgagcgaccccgacgacttcagcgccggcgccagaggctacctgaagaccagcctgtgcgtgctgggccccggcgacgaggcccccctggagagaaaggaccccagcgaggacaaggaggacatcgagagcaacctgctgagacccaccggcgtggccctgagaggcgcccacttctgcctgaaggtgttcagagccgaggacctgccccagatggacgacgccgtgatggacaacgtgaagcagatcttcggcttcgagagcaacaagaagaacctggtggaccccttcgtggaggtgagcttcgccggcaagatgctgtgcagcaagatcctggagaagaccgccaacccccagtggaaccagaacatcaccctgcccgccatgttccccagcatgtgcgagaagatgagaatcagaatcatcgactgggacagactgacccacaacgacatcgtggccaccacctacctgagcatgagcaagatcagcgcccccggcggcgagatcgaggaggagcccgccggcgccgtgaagcccagcaaggccagcgacctggacgactacctgggcttcctgcccaccttcggcccctgctacatcaacctgtacggcagccccagagagttcaccggcttccccgacccctacaccgagctgaacaccggcaagggcgagggcgtggcctacagaggcagactgctgctgagcctggagaccaagctggtggagcacagcgagcagaaggtggaggacctgcccgccgacgacatcctgagagtggagaagtacctgagaagaagaaagtacagcctgttcgccgccttctacagcgccaccatgctgcaggacgtggacgacgccatccagttcgaggtgagcatcggcaactacggcaacaagttcgacatgacctgcctgcccctggccagcaccacccagtacagcagagccgtgttcgacggctgccactactactacctgccctggggcaacgtgaagcccgtggtggtgctgagcagctactgggaggacatcagccacagaatcgagacccagaaccagctgctgggcatcgccgacagactggaggccggcctggagcaggtgcacctggccctgaaggcccagtgcagcaccgaggacgtggacagcctggtggcccagctgaccgacgagctgatcgccggctgcagccagcccctgggcgacatccacgagacccccagcgccacccacctggaccagtacctgtaccagctgagaacccaccacctgagccagatcaccgaggccgccctggccctgaagctgggccacagcgagctgcccgccgccctggagcaggccgaggactggctgctgagactgagagccctggccgaggagccccagaacagcctgcccgacatcgtgatctggatgctgcagggcgacaagagagtggcctaccagagagtgcccgcccaccaggtgctgttcagcagaagaggcgccaactactgcggcaagaactgcggcaagctgcagaccatcttcctgaagtaccccatggagaaggtgcccggcgccagaatgcccgtgcagatcagagtgaagctgtggttcggcctgagcgtggacgagaaggagttcaaccagttcgccgagggcaagctgagcgtgttcgccgagacctacgagaacgagaccaagctggccctggtgggcaactggggcaccaccggcctgacctaccccaagttcagcgacgtgaccggcaagatcaagctgcccaaggacagcttcagacccagcgccggctggacctgggccggcgactggttcgtgtgccccgagaagaccctgctgcacgacatggacgccggccacctgagcttcgtggaggaggtgttcgagaaccagaccagactgcccggcggccagtggatctacatgagcgacaactacaccgacgtgaacggcgagaaggtgctgcccaaggacgacatcgagtgccccctgggctggaagtgggaggacgaggagtggagcaccgacctgaacagagccgtggacgagcagggctgggagtacagcatcaccatcccccccgagagaaagcccaagcactgggtgcccgccgagaagatgtactacacccacagaagaagaagatgggtgagactgagaagaagagacctgagccagatggaggccctgaagagacacagacaggccgaggccgagggcgagggctgggagtacgccagcctgttcggctggaagttccacctggagtacagaaagaccgacgccttcagaagaagaagatggagaagaagaatggagcccctggagaagaccggccccgccgccgtgttcgccctggagggcgccctgggcggcgtgatggacgacaagagcgaggacagcatgagcgtgagcaccctgagcttcggcgtgaacagacccaccatcagctgcatcttcgactacggcaacagataccacctgagatgctacatgtaccaggccagagacctggccgccatggacaaggacagcttcagcgacccctacgccatcgtgagcttcctgcaccagagccagaagaccgtggtggtgaagaacaccctgaaccccacctgggaccagaccctgatcttctacgagatcgagatcttcggcgagcccgccaccgtggccgagcagccccccagcatcgtggtggagctgtacgaccacgacacctacggcgccgacgagttcatgggcagatgcatctgccagcccagcctggagagaatgcccagactggcctggttccccctgaccagaggcagccagcccagcggcgagctgctggccagcttcgagctgatccagagagagaagcccgccatccaccacatccccggcttcgaggtgcaggagaccagcagaatcctggacgagagcgaggacaccgacctgccctacccccccccccagagagaggccaacatctacatggtgccccagaacatcaagcccgccctgcagagaaccgccatcgagatcctggcctggggcctgagaaacatgaagagctaccagctggccaacatcagcagccccagcctggtggtggagtgcggcggccagaccgtgcagagctgcgtgatcagaaacctgagaaagaaccccaacttcgacatctgcaccctgttcatggaggtgatgctgcccagagaggagctgtactgcccccccatcaccgtgaaggtgatcgacaacagacagttcggcagaagacccgtggtgggccagtgcaccatcagaagcctggagagcttcctgtgcgacccctacagcgccgagagccccagcccccagggcggccccgacgacgtgagcctgctgagccccggcgaggacgtgctgatcgacatcgacgacaaggagcccctgatccccatccaggaggaggagttcatcgactggtggagcaagttcttcgccagcatcggcgagagagagaagtgcggcagctacctggagaaggacttcgacaccctgaaggtgtacgacacccagctggagaacgtggaggccttcgagggcctgagcgacttctgcaacaccttcaagctgtacagaggcaagacccaggaggagaccgaggaccccagcgtgatcggcgagttcaagggcctgttcaagatctaccccctgcccgaggaccccgccatccccatgccccccagacagttccaccagctggccgcccagggcccccaggagtgcctggtgagaatctacatcgtgagagccttcggcctgcagcccaaggaccccaacggcaagtgcgacccctacatcaagatcagcatcggcaagaagagcgtgagcgaccaggacaactacatcccctgcaccctggagcccgtgttcggcaagatgttcgagctgacctgcaccctgcccctggagaaggacctgaagatcaccctgtacgactacgacctgctgagcaaggacgagaagatcggcgagaccgtggtggacctggagaacagactgctgagcaagttcggcgccagatgcggcctgccccagacctactgcgtgagcggccccaaccagtggagagaccagctgagacccagccagctgctgcacctgttctgccagcagcacagagtgaaggcccccgtgtacagaaccgacagagtgatgttccaggacaaggagtacagcatcgaggagatcgaggccggcagaatccccaacccccacctgggccccgtggaggagagactggccctgcacgtgctgcagcagcagggcctggtgcccgagcacgtggagagcagacccctgtacagccccctgcagcccgacatcgagcagggcaagctgcagatgtgggtggacctgttccccaaggccctgggcagacccggcccccccttcaacatcacccccagaagagccagaagattcttcctgagatgcatcatctggaacaccagagacgtgatcctggacgacctgagcctgaccggcgagaagatgagcgacatctacgtgaagggctggatgatcggcttcgaggagcacaagcagaagaccgacgtgcactacagaagcctgggcggcgagggcaacttcaactggagattcatcttccccttcgactacctgcccgccgagcaggtgtgcaccatcgccaagaaggacgccttctggagactggacaagaccgagagcaagatccccgccagagtggtgttccagatctgggacaacgacaagttcagcttcgacgacttcctgggcagcctgcagctggacctgaacagaatgcccaagcccgccaagaccgccaagaagtgcagcctggaccagctggacgacgccttccaccccgagtggttcgtgagcctgttcgagcagaagaccgtgaagggctggtggccctgcgtggccgaggagggcgagaagaagatcctggccggcaagctggagatgaccctggagatcgtggccgagagcgagcacgaggagagacccgccggccagggcagagacgagcccaacatgaaccccaagctggaggaccccagaagacccgacaccagcttcctgtggttcaccagcccctacaagaccatgaagttcatcctgtggagaagattcagatgggccatcatcctgttcatcatcctgttcatcctgctgctgttcctggccatcttcatctacgccttccccaactacgccgccatgaagctggtgaagcccttcagctag

SEQ ID NO: 1858 - DNA, 6267 bp, synthetic construct
  misc_feature 1..6267: note = source = /note="Description of Artificial Sequence: Synthetic coding sequence"
  source 1..6267: mol_type = other DNA
atgctgtgctgcctgctggtgagagccagcaacctgcccagcgccaagaaggacagaagaagcgaccccgtggccagcctgaccttcagaggcgtgaagaagagaaccaaggtgatcaagaacagcgtgaaccccgtgtggaacgagggcttcgagtgggacctgaagggcatccccctggaccagggcagcgagctgcacgtggtggtgaaggaccacgagaccatgggcagaaacagattcctgggcgaggccaaggtgcccctgagagaggtgctggccacccccagcctgagcgccagcttcaacgcccccctgctggacaccaagaagcagcccaccggcgccagcctggtgctgcaggtgagctacacccccctgcccggcgccgtgcccctgttccccccccccacccccctggagcccagccccaccctgcccgacctggacgtggtggccgacaccggcggcgaggaggacaccgaggaccagggcctgaccggcgacgaggccgagcccttcctggaccagagcggcggccccggcgcccccaccacccccagaaagctgcccagcagaccccccccccactaccccggcatcaagagaaagagaagcgcccccaccagcagaaagctgctgagcgacaagccccaggacttccagatcagagtgcaggtgatcgagggcagacagctgcccggcgtgaacatcaagcccgtggtgaaggtgaccgccgccggccagaccaagagaaccagaatccacaagggcaacagccccctgttcaacgagaccctgttcttcaacctgttcgacagccccggcgagctgttcgacgagcccatcttcatcaccgtggtggacagcagaagcctgagaaccgacgccctgctgggcgagttcagaatggacgtgggcaccatctacagagagcccagacacgcctacctgagaaagtggctgctgctgagcgaccccgacgacttcagcgccggcgccagaggctacctgaagaccagcctgtgcgtgctgggccccggcgacgaggcccccctggagagaaaggaccccagcgaggacaaggaggacatcgagagcaacctgctgagacccaccggcgtggccctgagaggcgcccacttctgcctgaaggtgttcagagccgaggacctgccccagatggacgacgccgtgatggacaacgtgaagcagatcttcggcttcgagagcaacaagaagaacctggtggaccccttcgtggaggtgagcttcgccggcaagatgctgtgcagcaagatcctggagaagaccgccaacccccagtggaaccagaacatcaccctgcccgccatgttccccagcatgtgcgagaagatgagaatcagaatcatcgactgggacagactgacccacaacgacatcgtggccaccacctacctgagcatgagcaagatcagcgcccccggcggcgagatcgaggtggacgactacctgggcttcctgcccaccttcggcccctgctacatcaacctgtacggcagccccagagagttcaccggcttccccgacccctacaccgagctgaacaccggcaagggcgagggcgtggcctacagaggcagactgctgctgagcctggagaccaagctggtggagcacagcgagcagaaggtggaggacctgcccgccgacgacatcctgagagtggagaagtacctgagaagaagaaagtacagcctgttcgccgccttctacagcgccaccatgctgcaggacgtggacgacgccatccagttcgaggtgagcatcggcaactacggcaacaagttcgacatgacctgcctgcccctggccagcaccacccagtacagcagagccgtgttcgacggctgccactactactacctgccctggggcaacgtgaagcccgtggtggtgctgagcagctactgggaggacatcagccacagaatcgagacccagaaccagctgctgggcatcgccgacagactggaggccggcctggagcaggtgcacctggccctgaaggcccagtgcagcaccgaggacgtggacagcctggtggcccagctgaccgacgagctgatcgccggctgcagccagcccctgggcgacatccacgagacccccagcgccacccacctggaccagtacctgtaccagctgagaacccaccacctgagccagatcaccgaggccgccctggccctgaagctgggccacagcgagctgcccgccgccctggagcaggccgaggactggctgctgagactgagagccctggccgaggagccccagaacagcctgcccgacatcgtgatctggatgctgcagggcgacaagagagtggcctaccagagagtgcccgcccaccaggtgctgttcagcagaagaggcgccaactactgcggcaagaactgcggcaagctgcagaccatcttcctgaagtaccccatggagaaggtgcccggcgccagaatgcccgtgcagatcagagtgaagctgtggttcggcctgagcgtggacgagaaggagttcaaccagttcgccgagggcaagctgagcgtgttcgccgagacctacgagaacgagaccaagctggccctggtgggcaactggggcaccaccggcctgacctaccccaagttcagcgacgtgaccggcaagatcaagctgcccaaggacagcttcagacccagcgccggctggacctgggccggcgactggttcgtgtgccccgagaagaccctgctgcacgacatggacgccggccacctgagcttcgtggaggaggtgttcgagaaccagaccagactgcccggcggccagtggatctacatgagcgacaactacaccgacgtgaacggcgagaaggtgctgcccaaggacgacatcgagtgccccctgggctggaagtgggaggacgaggagtggagcaccgacctgaacagagccgtggacgagcagggctgggagtacagcatcaccatcccccccgagagaaagcccaagcactgggtgcccgccgagaagatgtactacacccacagaagaagaagatgggtgagactgagaagaagagacctgagccagatggaggccctgaagagacacagacaggccgaggccgagggcgagggctgggagtacgccagcctgttcggctggaagttccacctggagtacagaaagaccgacgccttcagaagaagaagatggagaagaagaatggagcccctggagaagaccggccccgccgccgtgttcgccctggagggcgccctgggcggcgtgatggacgacaagagcgaggacagcatgagcgtgagcaccctgagcttcggcgtgaacagacccaccatcagctgcatcttcgactacggcaacagataccacctgagatgctacatgtaccaggccagagacctggccgccatggacaaggacagcttcagcgacccctacgccatcgtgagcttcctgcaccagagccagaagaccgtggtggtgaagaacaccctgaaccccacctgggaccagaccctgatcttctacgagatcgagatcttcggcgagcccgccaccgtggccgagcagccccccagcatcgtggtggagctgtacgaccacgacacctacggcgccgacgagttcatgggcagatgcatctgccagcccagcctggagagaatgcccagactggcctggttccccctgaccagaggcagccagcccagcggcgagctgctggccagcttcgagctgatccagagagagaagcccgccatccaccacatccccggcttcgaggtgcaggagaccagcagaatcctggacgagagcgaggacaccgacctgccctacccccccccccagagagaggccaacatctacatggtgccccagaacatcaagcccgccctgcagagaaccgccatcgagatcctggcctggggcctgagaaacatgaagagctaccagctggccaacatcagcagccccagcctggtggtggagtgcggcggccagaccgtgcagagctgcgtgatcagaaacctgagaaagaaccccaacttcgacatctgcaccctgttcatggaggtgatgctgcccagagaggagctgtactgcccccccatcaccgtgaaggtgatcgacaacagacagttcggcagaagacccgtggtgggccagtgcaccatcagaagcctggagagcttcctgtgcgacccctacagcgccgagagccccagcccccagggcggccccgacgacgtgagcctgctgagccccggcgaggacgtgctgatcgacatcgacgacaaggagcccctgatccccatccagctggccgacggcctgagcagcctggcccccaccaacaccgccagcccccccagcagcccccacgaggaggagttcatcgactggtggagcaagttcttcgccagcatcggcgagagagagaagtgcggcagctacctggagaaggacttcgacaccctgaaggtgtacgacacccagctggagaacgtggaggccttcgagggcctgagcgacttctgcaacaccttcaagctgtacagaggcaagacccaggaggagaccgaggaccccagcgtgatcggcgagttcaagggcctgttcaagatctaccccctgcccgaggaccccgccatccccatgccccccagacagttccaccagctggccgcccagggcccccaggagtgcctggtgagaatctacatcgtgagagccttcggcctgcagcccaaggaccccaacggcaagtgcgacccctacatcaagatcagcatcggcaagaagagcgtgagcgaccaggacaactacatcccctgcaccctggagcccgtgttcggcaagatgttcgagctgacctgcaccctgcccctggagaaggacctgaagatcaccctgtacgactacgacctgctgagcaaggacgagaagatcggcgagaccgtggtggacctggagaacagactgctgagcaagttcggcgccagatgcggcctgccccagacctactgcgtgagcggccccaaccagtggagagaccagctgagacccagccagctgctgcacctgttctgccagcagcacagagtgaaggcccccgtgtacagaaccgacagagtgatgttccaggacaaggagtacagcatcgaggagatcgaggccggcagaatccccaacccccacctgggccccgtggaggagagactggccctgcacgtgctgcagcagcagggcctggtgcccgagcacgtggagagcagacccctgtacagccccctgcagcccgacatcgagcagggcaagctgcagatgtgggtggacctgttccccaaggccctgggcagacccggcccccccttcaacatcacccccagaagagccagaagattcttcctgagatgcatcatctggaacaccagagacgtgatcctggacgacctgagcctgaccggcgagaagatgagcgacatctacgtgaagggctggatgatcggcttcgaggagcacaagcagaagaccgacgtgcactacagaagcctgggcggcgagggcaacttcaactggagattcatcttccccttcgactacctgcccgccgagcaggtgtgcaccatcgccaagaaggacgccttctggagactggacaagaccgagagcaagatccccgccagagtggtgttccagatctgggacaacgacaagttcagcttcgacgacttcctgggcagcctgcagctggacctgaacagaatgcccaagcccgccaagaccgccaagaagtgcagcctggaccagctggacgacgccttccaccccgagtggttcgtgagcctgttcgagcagaagaccgtgaagggctggtggccctgcgtggccgaggagggcgagaagaagatcctggccggcaagctggagatgaccctggagatcgtggccgagagcgagcacgaggagagacccgccggccagggcagagacgagcccaacatgaaccccaagctggaggaccccagaagacccgacaccagcttcctgtggttcaccagcccctacaagaccatgaagttcatcctgtggagaagattcagatgggccatcatcctgttcatcatcctgttcatcctgctgctgttcctggccatcttcatctacgccttccccaactacgccgccatgaagctggtgaagcccttcagctag

SEQ ID NO: 1859 - DNA, 6294 bp, synthetic construct
  misc_feature 1..6294: note = source = /note="Description of Artificial Sequence: Synthetic coding sequence"
  source 1..6294: mol_type = other DNA
atgctgagagtgttcatcctgtacgccgagaacgtgcacacccccgacaccgacatcagcgacgcctactgcagcgccgtgttcgccggcgtgaagaagagaaccaaggtgatcaagaacagcgtgaaccccgtgtggaacgagggcttcgagtgggacctgaagggcatccccctggaccagggcagcgagctgcacgtggtggtgaaggaccacgagaccatgggcagaaacagattcctgggcgaggccaaggtgcccctgagagaggtgctggccacccccagcctgagcgccagcttcaacgcccccctgctggacaccaagaagcagcccaccggcgccagcctggtgctgcaggtgagctacacccccctgcccggcgccgtgcccctgttccccccccccacccccctggagcccagccccaccctgcccgacctggacgtggtggccggcggcggccagagcagagccgagacctggagcctgctgagcgacagcaccatggacaccagatacagcggcaagaagtggcccgcccccaccgacaccggcggcgaggaggacaccgaggaccagggcctgaccggcgacgaggccgagcccttcctggaccagagcggcggccccggcgcccccaccacccccagaaagctgcccagcagaccccccccccactaccccggcatcaagagaaagagaagcgcccccaccagcagaaagctgctgagcgacaagccccaggacttccagatcagagtgcaggtgatcgagggcagacagctgcccggcgtgaacatcaagcccgtggtgaaggtgaccgccgccggccagaccaagagaaccagaatccacaagggcaacagccccctgttcaacgagaccctgttcttcaacctgttcgacagccccggcgagctgttcgacgagcccatcttcatcaccgtggtggacagcagaagcctgagaaccgacgccctgctgggcgagttcagaatggacgtgggcaccatctacagagagcccagacacgcctacctgagaaagtggctgctgctgagcgaccccgacgacttcagcgccggcgccagaggctacctgaagaccagcctgtgcgtgctgggccccggcgacgaggcccccctggagagaaaggaccccagcgaggacaaggaggacatcgagagcaacctgctgagacccaccggcgtggccctgagaggcgcccacttctgcctgaaggtgttcagagccgaggacctgccccagatggacgacgccgtgatggacaacgtgaagcagatcttcggcttcgagagcaacaagaagaacctggtggaccccttcgtggaggtgagcttcgccggcaagatgctgtgcagcaagatcctggagaagaccgccaacccccagtggaaccagaacatcaccctgcccgccatgttccccagcatgtgcgagaagatgagaatcagaatcatcgactgggacagactgacccacaacgacatcgtggccaccacctacctgagcatgagcaagatcagcgcccccggcggcgagatcgaggtggacgactacctgggcttcctgcccaccttcggcccctgctacatcaacctgtacggcagccccagagagttcaccggcttccccgacccctacaccgagctgaacaccggcaagggcgagggcgtggcctacagaggcagactgctgctgagcctggagaccaagctggtggagcacagcgagcagaaggtggaggacctgcccgccgacgacatcctgagagtggagaagtacctgagaagaagaaagtacagcctgttcgccgccttctacagcgccaccatgctgcaggacgtggacgacgccatccagttcgaggtgagcatcggcaactacggcaacaagttcgacatgacctgcctgcccctggccagcaccacccagtacagcagagccgtgttcgacggctgccactactactacctgccctggggcaacgtgaagcccgtggtggtgctgagcagctactgggaggacatcagccacagaatcgagacccagaaccagctgctgggcatcgccgacagactggaggccggcctggagcaggtgcacctggccctgaaggcccagtgcagcaccgaggacgtggacagcctggtggcccagctgaccgacgagctgatcgccggctgcagccagcccctgggcgacatccacgagacccccagcgccacccacctggaccagtacctgtaccagctgagaacccaccacctgagccagatcaccgaggccgccctggccctgaagctgggccacagcgagctgcccgccgccctggagcaggccgaggactggctgctgagactgagagccctggccgaggagccccagaacagcctgcccgacatcgtgatctggatgctgcagggcgacaagagagtggcctaccagagagtgcccgcccaccaggtgctgttcagcagaagaggcgccaactactgcggcaagaactgcggcaagctgcagaccatcttcctgaagtaccccatggagaaggtgcccggcgccagaatgcccgtgcagatcagagtgaagctgtggttcggcctgagcgtggacgagaaggagttcaaccagttcgccgagggcaagctgagcgtgttcgccgagacctacgagaacgagaccaagctggccctggtgggcaactggggcaccaccggcctgacctaccccaagttcagcgacgtgaccggcaagatcaagctgcccaaggacagcttcagacccagcgccggctggacctgggccggcgactggttcgtgtgccccgagaagaccctgctgcacgacatggacgccggccacctgagcttcgtggaggaggtgttcgagaaccagaccagactgcccggcggccagtggatctacatgagcgacaactacaccgacgtgaacggcgagaaggtgctgcccaaggacgacatcgagtgccccctgggctggaagtgggaggacgaggagtggagcaccgacctgaacagagccgtggacgagcagggctgggagtacagcatcaccatcccccccgagagaaagcccaagcactgggtgcccgccgagaagatgtactacacccacagaagaagaagatgggtgagactgagaagaagagacctgagccagatggaggccctgaagagacacagacaggccgaggccgagggcgagggctgggagtacgccagcctgttcggctggaagttccacctggagtacagaaagaccgacgccttcagaagaagaagatggagaagaagaatggagcccctggagaagaccggccccgccgccgtgttcgccctggagggcgccctgggcggcgtgatggacgacaagagcgaggacagcatgagcgtgagcaccctgagcttcggcgtgaacagacccaccatcagctgcatcttcgactacggcaacagataccacctgagatgctacatgtaccaggccagagacctggccgccatggacaaggacagcttcagcgacccctacgccatcgtgagcttcctgcaccagagccagaagaccgtggtggtgaagaacaccctgaaccccacctgggaccagaccctgatcttctacgagatcgagatcttcggcgagcccgccaccgtggccgagcagccccccagcatcgtggtggagctgtacgaccacgacacctacggcgccgacgagttcatgggcagatgcatctgccagcccagcctggagagaatgcccagactggcctggttccccctgaccagaggcagccagcccagcggcgagctgctggccagcttcgagctgatccagagagagaagcccgccatccaccacatccccggcttcgaggtgcaggagaccagcagaatcctggacgagagcgaggacaccgacctgccctacccccccccccagagagaggccaacatctacatggtgccccagaacatcaagcccgccctgcagagaaccgccatcgagatcctggcctggggcctgagaaacatgaagagctaccagctggccaacatcagcagccccagcctggtggtggagtgcggcggccagaccgtgcagagctgcgtgatcagaaacctgagaaagaaccccaacttcgacatctgcaccctgttcatggaggtgatgctgcccagagaggagctgtactgcccccccatcaccgtgaaggtgatcgacaacagacagttcggcagaagacccgtggtgggccagtgcaccatcagaagcctggagagcttcctgtgcgacccctacagcgccgagagccccagcccccagggcggccccgacgacgtgagcctgctgagccccggcgaggacgtgctgatcgacatcgacgacaaggagcccctgatccccatccaggaggaggagttcatcgactggtggagcaagttcttcgccagcatcggcgagagagagaagtgcggcagctacctggagaaggacttcgacaccctgaaggtgtacgacacccagctggagaacgtggaggccttcgagggcctgagcgacttctgcaacaccttcaagctgtacagaggcaagacccaggaggagaccgaggaccccagcgtgatcggcgagttcaagggcctgttcaagatctaccccctgcccgaggaccccgccatccccatgccccccagacagttccaccagctggccgcccagggcccccaggagtgcctggtgagaatctacatcgtgagagccttcggcctgcagcccaaggaccccaacggcaagtgcgacccctacatcaagatcagcatcggcaagaagagcgtgagcgaccaggacaactacatcccctgcaccctggagcccgtgttcggcaagatgttcgagctgacctgcaccctgcccctggagaaggacctgaagatcaccctgtacgactacgacctgctgagcaaggacgagaagatcggcgagaccgtggtggacctggagaacagactgctgagcaagttcggcgccagatgcggcctgccccagacctactgcgtgagcggccccaaccagtggagagaccagctgagacccagccagctgctgcacctgttctgccagcagcacagagtgaaggcccccgtgtacagaaccgacagagtgatgttccaggacaaggagtacagcatcgaggagatcgaggccggcagaatccccaacccccacctgggccccgtggaggagagactggccctgcacgtgctgcagcagcagggcctggtgcccgagcacgtggagagcagacccctgtacagccccctgcagcccgacatcgagcagggcaagctgcagatgtgggtggacctgttccccaaggccctgggcagacccggcccccccttcaacatcacccccagaagagccagaagattcttcctgagatgcatcatctggaacaccagagacgtgatcctggacgacctgagcctgaccggcgagaagatgagcgacatctacgtgaagggctggatgatcggcttcgaggagcacaagcagaagaccgacgtgcactacagaagcctgggcggcgagggcaacttcaactggagattcatcttccccttcgactacctgcccgccgagcaggtgtgcaccatcgccaagaaggacgccttctggagactggacaagaccgagagcaagatccccgccagagtggtgttccagatctgggacaacgacaagttcagcttcgacgacttcctgggcagcctgcagctggacctgaacagaatgcccaagcccgccaagaccgccaagaagtgcagcctggaccagctggacgacgccttccaccccgagtggttcgtgagcctgttcgagcagaagaccgtgaagggctggtggccctgcgtggccgaggagggcgagaagaagatcctggccggcaagctggagatgaccctggagatcgtggccgagagcgagcacgaggagagacccgccggccagggcagagacgagcccaacatgaaccccaagctggaggaccccagaagacccgacaccagcttcctgtggttcaccagcccctacaagaccatgaagttcatcctgtggagaagattcagatgggccatcatcctgttcatcatcctgttcatcctgctgctgttcctggccatcttcatctacgccttccccaactacgccgccatgaagctggtgaagcccttcagctag

SEQ ID NO: 1860 - DNA, 6360 bp, synthetic construct
  misc_feature 1..6360: note = source = /note="Description of Artificial Sequence: Synthetic coding sequence"
  source 1..6360: mol_type = other DNA
atgctgtgctgcctgctggtgagagccagcaacctgcccagcgccaagaaggacagaagaagcgaccccgtggccagcctgaccttcagaggcgtgaagaagagaaccaaggtgatcaagaacagcgtgaaccccgtgtggaacgagggcttcgagtgggacctgaagggcatccccctggaccagggcagcgagctgcacgtggtggtgaaggaccacgagaccatgggcagaaacagattcctgggcgaggccaaggtgcccctgagagaggtgctggccacccccagcctgagcgccagcttcaacgcccccctgctggacaccaagaagcagcccaccggcgccagcctggtgctgcaggtgagctacacccccctgcccggcgccgtgcccctgttccccccccccacccccctggagcccagccccaccctgcccgacctggacgtggtggccggcggcggccagagcagagccgagacctggagcctgctgagcgacagcaccatggacaccagatacagcggcaagaagtggcccgcccccaccgacaccggcggcgaggaggacaccgaggaccagggcctgaccggcgacgaggccgagcccttcctggaccagagcggcggccccggcgcccccaccacccccagaaagctgcccagcagaccccccccccactaccccggcatcaagagaaagagaagcgcccccaccagcagaaagctgctgagcgacaagccccaggacttccagatcagagtgcaggtgatcgagggcagacagctgcccggcgtgaacatcaagcccgtggtgaaggtgaccgccgccggccagaccaagagaaccagaatccacaagggcaacagccccctgttcaacgagaccctgttcttcaacctgttcgacagccccggcgagctgttcgacgagcccatcttcatcaccgtggtggacagcagaagcctgagaaccgacgccctgctgggcgagttcagaatggacgtgggcaccatctacagagagcccagacacgcctacctgagaaagtggctgctgctgagcgaccccgacgacttcagcgccggcgccagaggctacctgaagaccagcctgtgcgtgctgggccccggcgacgaggcccccctggagagaaaggaccccagcgaggacaaggaggacatcgagagcaacctgctgagacccaccggcgtggccctgagaggcgcccacttctgcctgaaggtgttcagagccgaggacctgccccagatggacgacgccgtgatggacaacgtgaagcagatcttcggcttcgagagcaacaagaagaacctggtggaccccttcgtggaggtgagcttcgccggcaagatgctgtgcagcaagatcctggagaagaccgccaacccccagtggaaccagaacatcaccctgcccgccatgttccccagcatgtgcgagaagatgagaatcagaatcatcgactgggacagactgacccacaacgacatcgtggccaccacctacctgagcatgagcaagatcagcgcccccggcggcgagatcgaggtggacgactacctgggcttcctgcccaccttcggcccctgctacatcaacctgtacggcagccccagagagttcaccggcttccccgacccctacaccgagctgaacaccggcaagggcgagggcgtggcctacagaggcagactgctgctgagcctggagaccaagctggtggagcacagcgagcagaaggtggaggacctgcccgccgacgacatcctgagagtggagaagtacctgagaagaagaaagtacagcctgttcgccgccttctacagcgccaccatgctgcaggacgtggacgacgccatccagttcgaggtgagcatcggcaactacggcaacaagttcgacatgacctgcctgcccctggccagcaccacccagtacagcagagccgtgttcgacggctgccactactactacctgccctggggcaacgtgaagcccgtggtggtgctgagcagctactgggaggacatcagccacagaatcgagacccagaaccagctgctgggcatcgccgacagactggaggccggcctggagcaggtgcacctggccctgaaggcccagtgcagcaccgaggacgtggacagcctggtggcccagctgaccgacgagctgatcgccggctgcagccagcccctgggcgacatccacgagacccccagcgccacccacctggaccagtacctgtaccagctgagaacccaccacctgagccagatcaccgaggccgccctggccctgaagctgggccacagcgagctgcccgccgccctggagcaggccgaggactggctgctgagactgagagccctggccgaggagccccagaacagcctgcccgacatcgtgatctggatgctgcagggcgacaagagagtggcctaccagagagtgcccgcccaccaggtgctgttcagcagaagaggcgccaactactgcggcaagaactgcggcaagctgcagaccatcttcctgaagtaccccatggagaaggtgcccggcgccagaatgcccgtgcagatcagagtgaagctgtggttcggcctgagcgtggacgagaaggagttcaaccagttcgccgagggcaagctgagcgtgttcgccgagacctacgagaacgagaccaagctggccctggtgggcaactggggcaccaccggcctgacctaccccaagttcagcgacgtgaccggcaagatcaagctgcccaaggacagcttcagacccagcgccggctggacctgggccggcgactggttcgtgtgccccgagaagaccctgctgcacgacatggacgccggccacctgagcttcgtggaggaggtgttcgagaaccagaccagactgcccggcggccagtggatctacatgagcgacaactacaccgacgtgaacggcgagaaggtgctgcccaaggacgacatcgagtgccccctgggctggaagtgggaggacgaggagtggagcaccgacctgaacagagccgtggacgagcagggctgggagtacagcatcaccatcccccccgagagaaagcccaagcactgggtgcccgccgagaagatgtactacacccacagaagaagaagatgggtgagactgagaagaagagacctgagccagatggaggccctgaagagacacagacaggccgaggccgagggcgagggctgggagtacgccagcctgttcggctggaagttccacctggagtacagaaagaccgacgccttcagaagaagaagatggagaagaagaatggagcccctggagaagaccggccccgccgccgtgttcgccctggagggcgccctgggcggcgtgatggacgacaagagcgaggacagcatgagcgtgagcaccctgagcttcggcgtgaacagacccaccatcagctgcatcttcgactacggcaacagataccacctgagatgctacatgtaccaggccagagacctggccgccatggacaaggacagcttcagcgacccctacgccatcgtgagcttcctgcaccagagccagaagaccgtggtggtgaagaacaccctgaaccccacctgggaccagaccctgatcttctacgagatcgagatcttcggcgagcccgccaccgtggccgagcagccccccagcatcgtggtggagctgtacgaccacgacacctacggcgccgacgagttcatgggcagatgcatctgccagcccagcctggagagaatgcccagactggcctggttccccctgaccagaggcagccagcccagcggcgagctgctggccagcttcgagctgatccagagagagaagcccgccatccaccacatccccggcttcgaggtgcaggagaccagcagaatcctggacgagagcgaggacaccgacctgccctacccccccccccagagagaggccaacatctacatggtgccccagaacatcaagcccgccctgcagagaaccgccatcgagatcctggcctggggcctgagaaacatgaagagctaccagctggccaacatcagcagccccagcctggtggtggagtgcggcggccagaccgtgcagagctgcgtgatcagaaacctgagaaagaaccccaacttcgacatctgcaccctgttcatggaggtgatgctgcccagagaggagctgtactgcccccccatcaccgtgaaggtgatcgacaacagacagttcggcagaagacccgtggtgggccagtgcaccatcagaagcctggagagcttcctgtgcgacccctacagcgccgagagccccagcccccagggcggccccgacgacgtgagcctgctgagccccggcgaggacgtgctgatcgacatcgacgacaaggagcccctgatccccatccagctggccgacggcctgagcagcctggcccccaccaacaccgccagcccccccagcagcccccacgaggaggagttcatcgactggtggagcaagttcttcgccagcatcggcgagagagagaagtgcggcagctacctggagaaggacttcgacaccctgaaggtgtacgacacccagctggagaacgtggaggccttcgagggcctgagcgacttctgcaacaccttcaagctgtacagaggcaagacccaggaggagaccgaggaccccagcgtgatcggcgagttcaagggcctgttcaagatctaccccctgcccgaggaccccgccatccccatgccccccagacagttccaccagctggccgcccagggcccccaggagtgcctggtgagaatctacatcgtgagagccttcggcctgcagcccaaggaccccaacggcaagtgcgacccctacatcaagatcagcatcggcaagaagagcgtgagcgaccaggacaactacatcccctgcaccctggagcccgtgttcggcaagatgttcgagctgacctgcaccctgcccctggagaaggacctgaagatcaccctgtacgactacgacctgctgagcaaggacgagaagatcggcgagaccgtggtggacctggagaacagactgctgagcaagttcggcgccagatgcggcctgccccagacctactgcgtgagcggccccaaccagtggagagaccagctgagacccagccagctgctgcacctgttctgccagcagcacagagtgaaggcccccgtgtacagaaccgacagagtgatgttccaggacaaggagtacagcatcgaggagatcgaggccggcagaatccccaacccccacctgggccccgtggaggagagactggccctgcacgtgctgcagcagcagggcctggtgcccgagcacgtggagagcagacccctgtacagccccctgcagcccgacatcgagcagggcaagctgcagatgtgggtggacctgttccccaaggccctgggcagacccggcccccccttcaacatcacccccagaagagccagaagattcttcctgagatgcatcatctggaacaccagagacgtgatcctggacgacctgagcctgaccggcgagaagatgagcgacatctacgtgaagggctggatgatcggcttcgaggagcacaagcagaagaccgacgtgcactacagaagcctgggcggcgagggcaacttcaactggagattcatcttccccttcgactacctgcccgccgagcaggtgtgcaccatcgccaagaaggacgccttctggagactggacaagaccgagagcaagatccccgccagagtggtgttccagatctgggacaacgacaagttcagcttcgacgacttcctgggcagcctgcagctggacctgaacagaatgcccaagcccgccaagaccgccaagaagtgcagcctggaccagctggacgacgccttccaccccgagtggttcgtgagcctgttcgagcagaagaccgtgaagggctggtggccctgcgtggccgaggagggcgagaagaagatcctggccggcaagctggagatgaccctggagatcgtggccgagagcgagcacgaggagagacccgccggccagggcagagacgagcccaacatgaaccccaagctggaggaccccagaagacccgacaccagcttcctgtggttcaccagcccctacaagaccatgaagttcatcctgtggagaagattcagatgggccatcatcctgttcatcatcctgttcatcctgctgctgttcctggccatcttcatctacgccttccccaactacgccgccatgaagctggtgaagcccttcagctag

SEQ ID NO: 1861 - DNA, 6297 bp, synthetic construct
  misc_feature 1..6297: note = source = /note="Description of Artificial Sequence: Synthetic coding sequence"
  source 1..6297: mol_type = other DNA
atgctgtgctgcctgctggtgagagccagcaacctgcccagcgccaagaaggacagaagaagcgaccccgtggccagcctgaccttcagaggcgtgaagaagagaaccaaggtgatcaagaacagcgtgaaccccgtgtggaacgagggcttcgagtgggacctgaagggcatccccctggaccagggcagcgagctgcacgtggtggtgaaggaccacgagaccatgggcagaaacagattcctgggcgaggccaaggtgcccctgagagaggtgctggccacccccagcctgagcgccagcttcaacgcccccctgctggacaccaagaagcagcccaccggcgccagcctggtgctgcaggtgagctacacccccctgcccggcgccgtgcccctgttccccccccccacccccctggagcccagccccaccctgcccgacctggacgtggtggccggcggcggccagagcagagccgagacctggagcctgctgagcgacagcaccatggacaccagatacagcggcaagaagtggcccgcccccaccgacaccggcggcgaggaggacaccgaggaccagggcctgaccggcgacgaggccgagcccttcctggaccagagcggcggccccggcgcccccaccacccccagaaagctgcccagcagaccccccccccactaccccggcatcaagagaaagagaagcgcccccaccagcagaaagctgctgagcgacaagccccaggacttccagatcagagtgcaggtgatcgagggcagacagctgcccggcgtgaacatcaagcccgtggtgaaggtgaccgccgccggccagaccaagagaaccagaatccacaagggcaacagccccctgttcaacgagaccctgttcttcaacctgttcgacagccccggcgagctgttcgacgagcccatcttcatcaccgtggtggacagcagaagcctgagaaccgacgccctgctgggcgagttcagaatggacgtgggcaccatctacagagagcccagacacgcctacctgagaaagtggctgctgctgagcgaccccgacgacttcagcgccggcgccagaggctacctgaagaccagcctgtgcgtgctgggccccggcgacgaggcccccctggagagaaaggaccccagcgaggacaaggaggacatcgagagcaacctgctgagacccaccggcgtggccctgagaggcgcccacttctgcctgaaggtgttcagagccgaggacctgccccagatggacgacgccgtgatggacaacgtgaagcagatcttcggcttcgagagcaacaagaagaacctggtggaccccttcgtggaggtgagcttcgccggcaagatgctgtgcagcaagatcctggagaagaccgccaacccccagtggaaccagaacatcaccctgcccgccatgttccccagcatgtgcgagaagatgagaatcagaatcatcgactgggacagactgacccacaacgacatcgtggccaccacctacctgagcatgagcaagatcagcgcccccggcggcgagatcgaggtggacgactacctgggcttcctgcccaccttcggcccctgctacatcaacctgtacggcagccccagagagttcaccggcttccccgacccctacaccgagctgaacaccggcaagggcgagggcgtggcctacagaggcagactgctgctgagcctggagaccaagctggtggagcacagcgagcagaaggtggaggacctgcccgccgacgacatcctgagagtggagaagtacctgagaagaagaaagtacagcctgttcgccgccttctacagcgccaccatgctgcaggacgtggacgacgccatccagttcgaggtgagcatcggcaactacggcaacaagttcgacatgacctgcctgcccctggccagcaccacccagtacagcagagccgtgttcgacggctgccactactactacctgccctggggcaacgtgaagcccgtggtggtgctgagcagctactgggaggacatcagccacagaatcgagacccagaaccagctgctgggcatcgccgacagactggaggccggcctggagcaggtgcacctggccctgaaggcccagtgcagcaccgaggacgtggacagcctggtggcccagctgaccgacgagctgatcgccggctgcagccagcccctgggcgacatccacgagacccccagcgccacccacctggaccagtacctgtaccagctgagaacccaccacctgagccagatcaccgaggccgccctggccctgaagctgggccacagcgagctgcccgccgccctggagcaggccgaggactggctgctgagactgagagccctggccgaggagccccagaacagcctgcccgacatcgtgatctggatgctgcagggcgacaagagagtggcctaccagagagtgcccgcccaccaggtgctgttcagcagaagaggcgccaactactgcggcaagaactgcggcaagctgcagaccatcttcctgaagtaccccatggagaaggtgcccggcgccagaatgcccgtgcagatcagagtgaagctgtggttcggcctgagcgtggacgagaaggagttcaaccagttcgccgagggcaagctgagcgtgttcgccgagacctacgagaacgagaccaagctggccctggtgggcaactggggcaccaccggcctgacctaccccaagttcagcgacgtgaccggcaagatcaagctgcccaaggacagcttcagacccagcgccggctggacctgggccggcgactggttcgtgtgccccgagaagaccctgctgcacgacatggacgccggccacctgagcttcgtggaggaggtgttcgagaaccagaccagactgcccggcggccagtggatctacatgagcgacaactacaccgacgtgaacggcgagaaggtgctgcccaaggacgacatcgagtgccccctgggctggaagtgggaggacgaggagtggagcaccgacctgaacagagccgtggacgagcagggctgggagtacagcatcaccatcccccccgagagaaagcccaagcactgggtgcccgccgagaagatgtactacacccacagaagaagaagatgggtgagactgagaagaagagacctgagccagatggaggccctgaagagacacagacaggccgaggccgagggcgagggctgggagtacgccagcctgttcggctggaagttccacctggagtacagaaagaccgacgccttcagaagaagaagatggagaagaagaatggagcccctggagaagaccggccccgccgccgtgttcgccctggagggcgccctgggcggcgtgatggacgacaagagcgaggacagcatgagcgtgagcaccctgagcttcggcgtgaacagacccaccatcagctgcatcttcgactacggcaacagataccacctgagatgctacatgtaccaggccagagacctggccgccatggacaaggacagcttcagcgacccctacgccatcgtgagcttcctgcaccagagccagaagaccgtggtggtgaagaacaccctgaaccccacctgggaccagaccctgatcttctacgagatcgagatcttcggcgagcccgccaccgtggccgagcagccccccagcatcgtggtggagctgtacgaccacgacacctacggcgccgacgagttcatgggcagatgcatctgccagcccagcctggagagaatgcccagactggcctggttccccctgaccagaggcagccagcccagcggcgagctgctggccagcttcgagctgatccagagagagaagcccgccatccaccacatccccggcttcgaggtgcaggagaccagcagaatcctggacgagagcgaggacaccgacctgccctacccccccccccagagagaggccaacatctacatggtgccccagaacatcaagcccgccctgcagagaaccgccatcgagatcctggcctggggcctgagaaacatgaagagctaccagctggccaacatcagcagccccagcctggtggtggagtgcggcggccagaccgtgcagagctgcgtgatcagaaacctgagaaagaaccccaacttcgacatctgcaccctgttcatggaggtgatgctgcccagagaggagctgtactgcccccccatcaccgtgaaggtgatcgacaacagacagttcggcagaagacccgtggtgggccagtgcaccatcagaagcctggagagcttcctgtgcgacccctacagcgccgagagccccagcccccagggcggccccgacgacgtgagcctgctgagccccggcgaggacgtgctgatcgacatcgacgacaaggagcccctgatccccatccaggaggaggagttcatcgactggtggagcaagttcttcgccagcatcggcgagagagagaagtgcggcagctacctggagaaggacttcgacaccctgaaggtgtacgacacccagctggagaacgtggaggccttcgagggcctgagcgacttctgcaacaccttcaagctgtacagaggcaagacccaggaggagaccgaggaccccagcgtgatcggcgagttcaagggcctgttcaagatctaccccctgcccgaggaccccgccatccccatgccccccagacagttccaccagctggccgcccagggcccccaggagtgcctggtgagaatctacatcgtgagagccttcggcctgcagcccaaggaccccaacggcaagtgcgacccctacatcaagatcagcatcggcaagaagagcgtgagcgaccaggacaactacatcccctgcaccctggagcccgtgttcggcaagatgttcgagctgacctgcaccctgcccctggagaaggacctgaagatcaccctgtacgactacgacctgctgagcaaggacgagaagatcggcgagaccgtggtggacctggagaacagactgctgagcaagttcggcgccagatgcggcctgccccagacctactgcgtgagcggccccaaccagtggagagaccagctgagacccagccagctgctgcacctgttctgccagcagcacagagtgaaggcccccgtgtacagaaccgacagagtgatgttccaggacaaggagtacagcatcgaggagatcgaggccggcagaatccccaacccccacctgggccccgtggaggagagactggccctgcacgtgctgcagcagcagggcctggtgcccgagcacgtggagagcagacccctgtacagccccctgcagcccgacatcgagcagggcaagctgcagatgtgggtggacctgttccccaaggccctgggcagacccggcccccccttcaacatcacccccagaagagccagaagattcttcctgagatgcatcatctggaacaccagagacgtgatcctggacgacctgagcctgaccggcgagaagatgagcgacatctacgtgaagggctggatgatcggcttcgaggagcacaagcagaagaccgacgtgcactacagaagcctgggcggcgagggcaacttcaactggagattcatcttccccttcgactacctgcccgccgagcaggtgtgcaccatcgccaagaaggacgccttctggagactggacaagaccgagagcaagatccccgccagagtggtgttccagatctgggacaacgacaagttcagcttcgacgacttcctgggcagcctgcagctggacctgaacagaatgcccaagcccgccaagaccgccaagaagtgcagcctggaccagctggacgacgccttccaccccgagtggttcgtgagcctgttcgagcagaagaccgtgaagggctggtggccctgcgtggccgaggagggcgagaagaagatcctggccggcaagctggagatgaccctggagatcgtggccgagagcgagcacgaggagagacccgccggccagggcagagacgagcccaacatgaaccccaagctggaggaccccagaagacccgacaccagcttcctgtggttcaccagcccctacaagaccatgaagttcatcctgtggagaagattcagatgggccatcatcctgttcatcatcctgttcatcctgctgctgttcctggccatcttcatctacgccttccccaactacgccgccatgaagctggtgaagcccttcagctag

SEQ ID NO: 1862 - DNA, 6336 bp, synthetic construct
  misc_feature 1..6336: note = source = /note="Description of Artificial Sequence: Synthetic coding sequence"
  source 1..6336: mol_type = other DNA
atgctgagagtgttcatcctgtacgccgagaacgtgcacacccccgacaccgacatcagcgacgcctactgcagcgccgtgttcgccggcgtgaagaagagaaccaaggtgatcaagaacagcgtgaaccccgtgtggaacgagggcttcgagtgggacctgaagggcatccccctggaccagggcagcgagctgcacgtggtggtgaaggaccacgagaccatgggcagaaacagattcctgggcgaggccaaggtgcccctgagagaggtgctggccacccccagcctgagcgccagcttcaacgcccccctgctggacaccaagaagcagcccaccggcgccagcctggtgctgcaggtgagctacacccccctgcccggcgccgtgcccctgttccccccccccacccccctggagcccagccccaccctgcccgacctggacgtggtggccggcggcggccagagcagagccgagacctggagcctgctgagcgacagcaccatggacaccagatacagcggcaagaagtggcccgcccccaccgacaccggcggcgaggaggacaccgaggaccagggcctgaccggcgacgaggccgagcccttcctggaccagagcggcggccccggcgcccccaccacccccagaaagctgcccagcagaccccccccccactaccccggcatcaagagaaagagaagcgcccccaccagcagaaagctgctgagcgacaagccccaggacttccagatcagagtgcaggtgatcgagggcagacagctgcccggcgtgaacatcaagcccgtggtgaaggtgaccgccgccggccagaccaagagaaccagaatccacaagggcaacagccccctgttcaacgagaccctgttcttcaacctgttcgacagccccggcgagctgttcgacgagcccatcttcatcaccgtggtggacagcagaagcctgagaaccgacgccctgctgggcgagttcagaatggacgtgggcaccatctacagagagcccagacacgcctacctgagaaagtggctgctgctgagcgaccccgacgacttcagcgccggcgccagaggctacctgaagaccagcctgtgcgtgctgggccccggcgacgaggcccccctggagagaaaggaccccagcgaggacaaggaggacatcgagagcaacctgctgagacccaccggcgtggccctgagaggcgcccacttctgcctgaaggtgttcagagccgaggacctgccccagatggacgacgccgtgatggacaacgtgaagcagatcttcggcttcgagagcaacaagaagaacctggtggaccccttcgtggaggtgagcttcgccggcaagatgctgtgcagcaagatcctggagaagaccgccaacccccagtggaaccagaacatcaccctgcccgccatgttccccagcatgtgcgagaagatgagaatcagaatcatcgactgggacagactgacccacaacgacatcgtggccaccacctacctgagcatgagcaagatcagcgcccccggcggcgagatcgaggaggagcccgccggcgccgtgaagcccagcaaggccagcgacctggacgactacctgggcttcctgcccaccttcggcccctgctacatcaacctgtacggcagccccagagagttcaccggcttccccgacccctacaccgagctgaacaccggcaagggcgagggcgtggcctacagaggcagactgctgctgagcctggagaccaagctggtggagcacagcgagcagaaggtggaggacctgcccgccgacgacatcctgagagtggagaagtacctgagaagaagaaagtacagcctgttcgccgccttctacagcgccaccatgctgcaggacgtggacgacgccatccagttcgaggtgagcatcggcaactacggcaacaagttcgacatgacctgcctgcccctggccagcaccacccagtacagcagagccgtgttcgacggctgccactactactacctgccctggggcaacgtgaagcccgtggtggtgctgagcagctactgggaggacatcagccacagaatcgagacccagaaccagctgctgggcatcgccgacagactggaggccggcctggagcaggtgcacctggccctgaaggcccagtgcagcaccgaggacgtggacagcctggtggcccagctgaccgacgagctgatcgccggctgcagccagcccctgggcgacatccacgagacccccagcgccacccacctggaccagtacctgtaccagctgagaacccaccacctgagccagatcaccgaggccgccctggccctgaagctgggccacagcgagctgcccgccgccctggagcaggccgaggactggctgctgagactgagagccctggccgaggagccccagaacagcctgcccgacatcgtgatctggatgctgcagggcgacaagagagtggcctaccagagagtgcccgcccaccaggtgctgttcagcagaagaggcgccaactactgcggcaagaactgcggcaagctgcagaccatcttcctgaagtaccccatggagaaggtgcccggcgccagaatgcccgtgcagatcagagtgaagctgtggttcggcctgagcgtggacgagaaggagttcaaccagttcgccgagggcaagctgagcgtgttcgccgagacctacgagaacgagaccaagctggccctggtgggcaactggggcaccaccggcctgacctaccccaagttcagcgacgtgaccggcaagatcaagctgcccaaggacagcttcagacccagcgccggctggacctgggccggcgactggttcgtgtgccccgagaagaccctgctgcacgacatggacgccggccacctgagcttcgtggaggaggtgttcgagaaccagaccagactgcccggcggccagtggatctacatgagcgacaactacaccgacgtgaacggcgagaaggtgctgcccaaggacgacatcgagtgccccctgggctggaagtgggaggacgaggagtggagcaccgacctgaacagagccgtggacgagcagggctgggagtacagcatcaccatcccccccgagagaaagcccaagcactgggtgcccgccgagaagatgtactacacccacagaagaagaagatgggtgagactgagaagaagagacctgagccagatggaggccctgaagagacacagacaggccgaggccgagggcgagggctgggagtacgccagcctgttcggctggaagttccacctggagtacagaaagaccgacgccttcagaagaagaagatggagaagaagaatggagcccctggagaagaccggccccgccgccgtgttcgccctggagggcgccctgggcggcgtgatggacgacaagagcgaggacagcatgagcgtgagcaccctgagcttcggcgtgaacagacccaccatcagctgcatcttcgactacggcaacagataccacctgagatgctacatgtaccaggccagagacctggccgccatggacaaggacagcttcagcgacccctacgccatcgtgagcttcctgcaccagagccagaagaccgtggtggtgaagaacaccctgaaccccacctgggaccagaccctgatcttctacgagatcgagatcttcggcgagcccgccaccgtggccgagcagccccccagcatcgtggtggagctgtacgaccacgacacctacggcgccgacgagttcatgggcagatgcatctgccagcccagcctggagagaatgcccagactggcctggttccccctgaccagaggcagccagcccagcggcgagctgctggccagcttcgagctgatccagagagagaagcccgccatccaccacatccccggcttcgaggtgcaggagaccagcagaatcctggacgagagcgaggacaccgacctgccctacccccccccccagagagaggccaacatctacatggtgccccagaacatcaagcccgccctgcagagaaccgccatcgagatcctggcctggggcctgagaaacatgaagagctaccagctggccaacatcagcagccccagcctggtggtggagtgcggcggccagaccgtgcagagctgcgtgatcagaaacctgagaaagaaccccaacttcgacatctgcaccctgttcatggaggtgatgctgcccagagaggagctgtactgcccccccatcaccgtgaaggtgatcgacaacagacagttcggcagaagacccgtggtgggccagtgcaccatcagaagcctggagagcttcctgtgcgacccctacagcgccgagagccccagcccccagggcggccccgacgacgtgagcctgctgagccccggcgaggacgtgctgatcgacatcgacgacaaggagcccctgatccccatccaggaggaggagttcatcgactggtggagcaagttcttcgccagcatcggcgagagagagaagtgcggcagctacctggagaaggacttcgacaccctgaaggtgtacgacacccagctggagaacgtggaggccttcgagggcctgagcgacttctgcaacaccttcaagctgtacagaggcaagacccaggaggagaccgaggaccccagcgtgatcggcgagttcaagggcctgttcaagatctaccccctgcccgaggaccccgccatccccatgccccccagacagttccaccagctggccgcccagggcccccaggagtgcctggtgagaatctacatcgtgagagccttcggcctgcagcccaaggaccccaacggcaagtgcgacccctacatcaagatcagcatcggcaagaagagcgtgagcgaccaggacaactacatcccctgcaccctggagcccgtgttcggcaagatgttcgagctgacctgcaccctgcccctggagaaggacctgaagatcaccctgtacgactacgacctgctgagcaaggacgagaagatcggcgagaccgtggtggacctggagaacagactgctgagcaagttcggcgccagatgcggcctgccccagacctactgcgtgagcggccccaaccagtggagagaccagctgagacccagccagctgctgcacctgttctgccagcagcacagagtgaaggcccccgtgtacagaaccgacagagtgatgttccaggacaaggagtacagcatcgaggagatcgaggccggcagaatccccaacccccacctgggccccgtggaggagagactggccctgcacgtgctgcagcagcagggcctggtgcccgagcacgtggagagcagacccctgtacagccccctgcagcccgacatcgagcagggcaagctgcagatgtgggtggacctgttccccaaggccctgggcagacccggcccccccttcaacatcacccccagaagagccagaagattcttcctgagatgcatcatctggaacaccagagacgtgatcctggacgacctgagcctgaccggcgagaagatgagcgacatctacgtgaagggctggatgatcggcttcgaggagcacaagcagaagaccgacgtgcactacagaagcctgggcggcgagggcaacttcaactggagattcatcttccccttcgactacctgcccgccgagcaggtgtgcaccatcgccaagaaggacgccttctggagactggacaagaccgagagcaagatccccgccagagtggtgttccagatctgggacaacgacaagttcagcttcgacgacttcctgggcagcctgcagctggacctgaacagaatgcccaagcccgccaagaccgccaagaagtgcagcctggaccagctggacgacgccttccaccccgagtggttcgtgagcctgttcgagcagaagaccgtgaagggctggtggccctgcgtggccgaggagggcgagaagaagatcctggccggcaagctggagatgaccctggagatcgtggccgagagcgagcacgaggagagacccgccggccagggcagagacgagcccaacatgaaccccaagctggaggaccccagaagacccgacaccagcttcctgtggttcaccagcccctacaagaccatgaagttcatcctgtggagaagattcagatgggccatcatcctgttcatcatcctgttcatcctgctgctgttcctggccatcttcatctacgccttccccaactacgccgccatgaagctggtgaagcccttcagctag

SEQ ID NO: 1863 - DNA, 6306 bp, synthetic construct
  misc_feature 1..6306: note = source = /note="Description of Artificial Sequence: Synthetic coding sequence"
  source 1..6306: mol_type = other DNA
atgctgagagtgttcatcctgtacgccgagaacgtgcacacccccgacaccgacatcagcgacgcctactgcagcgccgtgttcgccggcgtgaagaagagaaccaaggtgatcaagaacagcgtgaaccccgtgtggaacgagggcttcgagtgggacctgaagggcatccccctggaccagggcagcgagctgcacgtggtggtgaaggaccacgagaccatgggcagaaacagattcctgggcgaggccaaggtgcccctgagagaggtgctggccacccccagcctgagcgccagcttcaacgcccccctgctggacaccaagaagcagcccaccggcgccagcctggtgctgcaggtgagctacacccccctgcccggcgccgtgcccctgttccccccccccacccccctggagcccagccccaccctgcccgacctggacgtggtggccgacaccggcggcgaggaggacaccgaggaccagggcctgaccggcgacgaggccgagcccttcctggaccagagcggcggccccggcgcccccaccacccccagaaagctgcccagcagaccccccccccactaccccggcatcaagagaaagagaagcgcccccaccagcagaaagctgctgagcgacaagccccaggacttccagatcagagtgcaggtgatcgagggcagacagctgcccggcgtgaacatcaagcccgtggtgaaggtgaccgccgccggccagaccaagagaaccagaatccacaagggcaacagccccctgttcaacgagaccctgttcttcaacctgttcgacagccccggcgagctgttcgacgagcccatcttcatcaccgtggtggacagcagaagcctgagaaccgacgccctgctgggcgagttcagaatggacgtgggcaccatctacagagagcccagacacgcctacctgagaaagtggctgctgctgagcgaccccgacgacttcagcgccggcgccagaggctacctgaagaccagcctgtgcgtgctgggccccggcgacgaggcccccctggagagaaaggaccccagcgaggacaaggaggacatcgagagcaacctgctgagacccaccggcgtggccctgagaggcgcccacttctgcctgaaggtgttcagagccgaggacctgccccagatggacgacgccgtgatggacaacgtgaagcagatcttcggcttcgagagcaacaagaagaacctggtggaccccttcgtggaggtgagcttcgccggcaagatgctgtgcagcaagatcctggagaagaccgccaacccccagtggaaccagaacatcaccctgcccgccatgttccccagcatgtgcgagaagatgagaatcagaatcatcgactgggacagactgacccacaacgacatcgtggccaccacctacctgagcatgagcaagatcagcgcccccggcggcgagatcgaggaggagcccgccggcgccgtgaagcccagcaaggccagcgacctggacgactacctgggcttcctgcccaccttcggcccctgctacatcaacctgtacggcagccccagagagttcaccggcttccccgacccctacaccgagctgaacaccggcaagggcgagggcgtggcctacagaggcagactgctgctgagcctggagaccaagctggtggagcacagcgagcagaaggtggaggacctgcccgccgacgacatcctgagagtggagaagtacctgagaagaagaaagtacagcctgttcgccgccttctacagcgccaccatgctgcaggacgtggacgacgccatccagttcgaggtgagcatcggcaactacggcaacaagttcgacatgacctgcctgcccctggccagcaccacccagtacagcagagccgtgttcgacggctgccactactactacctgccctggggcaacgtgaagcccgtggtggtgctgagcagctactgggaggacatcagccacagaatcgagacccagaaccagctgctgggcatcgccgacagactggaggccggcctggagcaggtgcacctggccctgaaggcccagtgcagcaccgaggacgtggacagcctggtggcccagctgaccgacgagctgatcgccggctgcagccagcccctgggcgacatccacgagacccccagcgccacccacctggaccagtacctgtaccagctgagaacccaccacctgagccagatcaccgaggccgccctggccctgaagctgggccacagcgagctgcccgccgccctggagcaggccgaggactggctgctgagactgagagccctggccgaggagccccagaacagcctgcccgacatcgtgatctggatgctgcagggcgacaagagagtggcctaccagagagtgcccgcccaccaggtgctgttcagcagaagaggcgccaactactgcggcaagaactgcggcaagctgcagaccatcttcctgaagtaccccatggagaaggtgcccggcgccagaatgcccgtgcagatcagagtgaagctgtggttcggcctgagcgtggacgagaaggagttcaaccagttcgccgagggcaagctgagcgtgttcgccgagacctacgagaacgagaccaagctggccctggtgggcaactggggcaccaccggcctgacctaccccaagttcagcgacgtgaccggcaagatcaagctgcccaaggacagcttcagacccagcgccggctggacctgggccggcgactggttcgtgtgccccgagaagaccctgctgcacgacatggacgccggccacctgagcttcgtggaggaggtgttcgagaaccagaccagactgcccggcggccagtggatctacatgagcgacaactacaccgacgtgaacggcgagaaggtgctgcccaaggacgacatcgagtgccccctgggctggaagtgggaggacgaggagtggagcaccgacctgaacagagccgtggacgagcagggctgggagtacagcatcaccatcccccccgagagaaagcccaagcactgggtgcccgccgagaagatgtactacacccacagaagaagaagatgggtgagactgagaagaagagacctgagccagatggaggccctgaagagacacagacaggccgaggccgagggcgagggctgggagtacgccagcctgttcggctggaagttccacctggagtacagaaagaccgacgccttcagaagaagaagatggagaagaagaatggagcccctggagaagaccggccccgccgccgtgttcgccctggagggcgccctgggcggcgtgatggacgacaagagcgaggacagcatgagcgtgagcaccctgagcttcggcgtgaacagacccaccatcagctgcatcttcgactacggcaacagataccacctgagatgctacatgtaccaggccagagacctggccgccatggacaaggacagcttcagcgacccctacgccatcgtgagcttcctgcaccagagccagaagaccgtggtggtgaagaacaccctgaaccccacctgggaccagaccctgatcttctacgagatcgagatcttcggcgagcccgccaccgtggccgagcagccccccagcatcgtggtggagctgtacgaccacgacacctacggcgccgacgagttcatgggcagatgcatctgccagcccagcctggagagaatgcccagactggcctggttccccctgaccagaggcagccagcccagcggcgagctgctggccagcttcgagctgatccagagagagaagcccgccatccaccacatccccggcttcgaggtgcaggagaccagcagaatcctggacgagagcgaggacaccgacctgccctacccccccccccagagagaggccaacatctacatggtgccccagaacatcaagcccgccctgcagagaaccgccatcgagatcctggcctggggcctgagaaacatgaagagctaccagctggccaacatcagcagccccagcctggtggtggagtgcggcggccagaccgtgcagagctgcgtgatcagaaacctgagaaagaaccccaacttcgacatctgcaccctgttcatggaggtgatgctgcccagagaggagctgtactgcccccccatcaccgtgaaggtgatcgacaacagacagttcggcagaagacccgtggtgggccagtgcaccatcagaagcctggagagcttcctgtgcgacccctacagcgccgagagccccagcccccagggcggccccgacgacgtgagcctgctgagccccggcgaggacgtgctgatcgacatcgacgacaaggagcccctgatccccatccagctggccgacggcctgagcagcctggcccccaccaacaccgccagcccccccagcagcccccacgaggaggagttcatcgactggtggagcaagttcttcgccagcatcggcgagagagagaagtgcggcagctacctggagaaggacttcgacaccctgaaggtgtacgacacccagctggagaacgtggaggccttcgagggcctgagcgacttctgcaacaccttcaagctgtacagaggcaagacccaggaggagaccgaggaccccagcgtgatcggcgagttcaagggcctgttcaagatctaccccctgcccgaggaccccgccatccccatgccccccagacagttccaccagctggccgcccagggcccccaggagtgcctggtgagaatctacatcgtgagagccttcggcctgcagcccaaggaccccaacggcaagtgcgacccctacatcaagatcagcatcggcaagaagagcgtgagcgaccaggacaactacatcccctgcaccctggagcccgtgttcggcaagatgttcgagctgacctgcaccctgcccctggagaaggacctgaagatcaccctgtacgactacgacctgctgagcaaggacgagaagatcggcgagaccgtggtggacctggagaacagactgctgagcaagttcggcgccagatgcggcctgccccagacctactgcgtgagcggccccaaccagtggagagaccagctgagacccagccagctgctgcacctgttctgccagcagcacagagtgaaggcccccgtgtacagaaccgacagagtgatgttccaggacaaggagtacagcatcgaggagatcgaggccggcagaatccccaacccccacctgggccccgtggaggagagactggccctgcacgtgctgcagcagcagggcctggtgcccgagcacgtggagagcagacccctgtacagccccctgcagcccgacatcgagcagggcaagctgcagatgtgggtggacctgttccccaaggccctgggcagacccggcccccccttcaacatcacccccagaagagccagaagattcttcctgagatgcatcatctggaacaccagagacgtgatcctggacgacctgagcctgaccggcgagaagatgagcgacatctacgtgaagggctggatgatcggcttcgaggagcacaagcagaagaccgacgtgcactacagaagcctgggcggcgagggcaacttcaactggagattcatcttccccttcgactacctgcccgccgagcaggtgtgcaccatcgccaagaaggacgccttctggagactggacaagaccgagagcaagatccccgccagagtggtgttccagatctgggacaacgacaagttcagcttcgacgacttcctgggcagcctgcagctggacctgaacagaatgcccaagcccgccaagaccgccaagaagtgcagcctggaccagctggacgacgccttccaccccgagtggttcgtgagcctgttcgagcagaagaccgtgaagggctggtggccctgcgtggccgaggagggcgagaagaagatcctggccggcaagctggagatgaccctggagatcgtggccgagagcgagcacgaggagagacccgccggccagggcagagacgagcccaacatgaaccccaagctggaggaccccagaagacccgacaccagcttcctgtggttcaccagcccctacaagaccatgaagttcatcctgtggagaagattcagatgggccatcatcctgttcatcatcctgttcatcctgctgctgttcctggccatcttcatctacgccttccccaactacgccgccatgaagctggtgaagcccttcagctag

SEQ ID NO: 1864 - DNA, 447 bp, synthetic construct
  misc_feature 1..447: note = source = /note="Description of Artificial Sequence: Synthetic coding sequence"
  source 1..447: mol_type = other DNA
atgggctaccccgaggtggagagaagagagctgctgcccgccgccgcccccagagagagaggcagccagggctgcggctgcggcggcgcccccgccagagccggcgagggcaacagctgcctgctgttcctgggcttcttcggcctgagcctggccctgcacctgctgaccctgtgctgctacctggagctgagaagcgagctgagaagagagagaggcgccgagagcagactgggcggcagcggcacccccggcaccagcggcaccctgagcagcctgggcggcctggaccccgacagccccatcaccagccacctgggccagcccagccccaagcagcagcccctggagcccggcgaggccgccctgcacagcgacagccaggacggccaccaggacttcgactacatcatcagcttcagctacggcctgcagggcttctgctag

SEQ ID NO: 1865 - DNA, 1176 bp, synthetic construct
  misc_feature 1..1176: note = source = /note="Description of Artificial Sequence: Synthetic coding sequence"
  source 1..1176: mol_type = other DNA
atgggctaccccgaggtggagagaagagagctgctgcccgccgccgcccccagagagagaggcagccagggctgcggctgcggcggcgcccccgccagagccggcgagggcaacagctgcctgctgttcctgggcttcttcggcctgagcctggccctgcacctgctgaccctgtgctgctacctggagctgagaagcgagctgagaagagagagaggcgccgagagcagactgggcggcagcggcacccccggcaccagcggcaccctgagcagcctgggcggcctggaccccgacagccccatcaccagccacctgggccagcccagccccaagcagcagcccctggagcccggcgaggccgccctgcacagcgacagccaggacggccaccagatggccctgctgaacttcttcttccccgacgagaagccctacagcgaggaggagagcagaagagtgagaagaaacaagagaagcaagagcaacgagggcgccgacggccccgtgaagaacaagaagaagggcaagaaggccggcccccccggccccaacggcccccccggcccccccggcccccccggcccccagggcccccccggcatccccggcatccccggcatccccggcaccaccgtgatgggcccccccggcccccccggcccccccggcccccagggcccccccggcctgcagggccccagcggcgccgccgacaaggccggcaccagagagaaccagcccgccgtggtgcacctgcagggccagggcagcgccatccaggtgaagaacgacctgagcggcggcgtgctgaacgactggagcagaatcaccatgaaccccaaggtgttcaagctgcaccccagaagcggcgagctggaggtgctggtggacggcacctacttcatctacagccaggtggaggtgtactacatcaacttcaccgacttcgccagctacgaggtggtggtggacgagaagcccttcctgcagtgcaccagaagcatcgagaccggcaagaccaactacaacacctgctacaccgccggcgtgtgcctgctgaaggccagacagaagatcgccgtgaagatggtgcacgccgacatcagcatcaacatgagcaagcacaccaccttcttcggcgccatcagactgggcgaggcccccgccagctag

SEQ ID NO: 1866 - DNA, 1170 bp, synthetic construct
  misc_feature 1..1170: note = source = /note="Description of Artificial Sequence: Synthetic coding sequence"
  source 1..1170: mol_type = other DNA
atgggctaccccgaggtggagagaagagagctgctgcccgccgccgcccccagagagagaggcagccagggctgcggctgcggcggcgcccccgccagagccggcgagggcaacagctgcctgctgttcctgggcttcttcggcctgagcctggccctgcacctgctgaccctgtgctgctacctggagctgagaagcgagctgagaagagagagaggcgccgagagcagactgggcggcagcggcacccccggcaccagcggcaccctgagcagcctgggcggcctggaccccgacagccccatcaccagccacctgggccagcccagccccaagcagcagcccctggagcccggcgaggccgccctgcacagcgacagccaggacggccaccagatggccctgctgaacttcttcttccccgacgagaagccctacagcgaggaggagagcagaagagtgagaagaaacaagagaagcaagagcaacgagggcgccgacggccccgtgaagaacaagaagaagggcaagaaggccggcccccccggccccaacggcccccccggcccccccggcccccccggcccccagggcccccccggcatccccggcatccccggcatccccggcaccaccgtgatgggcccccccggcccccccggcccccccggcccccagggcccccccggcctgcagggccccagcggcgccgccgacaaggccggcaccagagagaaccagcccgccgtggtgcacctgcagggccagggcagcgccatccaggtgaagaacgacctgagcggcggcgtgctgaacgactggagcagaatcaccatgaaccccaaggtgttcaagctgcaccccagaagcggcgagctggaggtgctggtggacggcacctacttcatctacagccaggtgtactacatcaacttcaccgacttcgccagctacgaggtggtggtggacgagaagcccttcctgcagtgcaccagaagcatcgagaccggcaagaccaactacaacacctgctacaccgccggcgtgtgcctgctgaaggccagacagaagatcgccgtgaagatggtgcacgccgacatcagcatcaacatgagcaagcacaccaccttcttcggcgccatcagactgggcgaggcccccgccagctag

SEQ ID NO: 1867 - DNA, 408 bp, synthetic construct
  misc_feature 1..408: note = source = /note="Description of Artificial Sequence: Synthetic coding sequence"
  source 1..408: mol_type = other DNA
atgggctaccccgaggtggagagaagagagctgctgcccgccgccgcccccagagagagaggcagccagggctgcggctgcggcggcgcccccgccagagccggcgagggcaacagctgcctgctgttcctgggcttcttcggcctgagcctggccctgcacctgctgaccctgtgctgctacctggagctgagaagcgagctgagaagagagagaggcgccgagagcagactgggcggcagcggcacccccggcaccagcggcaccctgagcagcctgggcggcctggaccccgacagccccatcaccagccacctgggccagcccagccccaagcagcagcccctggagcccggcgaggccgccctgcacagcgacagccaggacggccaccagggccaccagtag

SEQ ID NO: 1868 - DNA, 1161 bp, synthetic construct
  misc_feature 1..1161: note = source = /note="Description of Artificial Sequence: Synthetic coding sequence"
  source 1..1161: mol_type = other DNA
atgggctaccccgaggtggagagaagagagctgctgcccgccgccgcccccagagagagaggcagccagggctgcggctgcggcggcgcccccgccagagccggcgagggcaacagctgcctgctgttcctgggcttcttcggcctgagcctggccctgcacctgctgaccctgtgctgctacctggagctgagaagcgagctgagaagagagagaggcgccgagagcagactgggcggcagcggcacccccggcaccagcggcaccctgagcagcctgggcggcctggaccccgacagccccatcaccagccacctgggccagcccagccccaagcagcagcccctggagcccggcgaggccgccctgcacagcgacagccaggacggccaccagatggccctgctgaacttcttcttccccgacgagaagccctacagcgaggaggagagcagaagagtgagaagaaacaagagaagcaagagcaacgagggcgccgacggccccgtgaagaacaagaagaagggcaagaaggccggcccccccggccccaacggcccccccggcccccccggcccccccggcccccagggcccccccggcatccccggcatccccggcatccccggcaccaccgtgatgggcccccccggcccccccggcccccccggcccccagggcccccccggcctgcagggccccagcggcgccgccgacaaggccggcaccagagagaaccagcccgccgtggtgcacctgcagggccagggcagcgccatccaggtgaagaacggcggcgtgctgaacgactggagcagaatcaccatgaaccccaaggtgttcaagctgcaccccagaagcggcgagctggaggtgctggtggacggcacctacttcatctacagccaggtgtactacatcaacttcaccgacttcgccagctacgaggtggtggtggacgagaagcccttcctgcagtgcaccagaagcatcgagaccggcaagaccaactacaacacctgctacaccgccggcgtgtgcctgctgaaggccagacagaagatcgccgtgaagatggtgcacgccgacatcagcatcaacatgagcaagcacaccaccttcttcggcgccatcagactgggcgaggcccccgccagctag

SEQ ID NO: 1869 - DNA, 447 bp, synthetic construct; identical to SEQ ID NO: 1864
  misc_feature 1..447: note = source = /note="Description of Artificial Sequence: Synthetic coding sequence"
  source 1..447: mol_type = other DNA

SEQ ID NO: 1870 - DNA, 3429 bp, synthetic construct
  misc_feature 1..3429: note = source = /note="Description of Artificial Sequence: Synthetic coding sequence"
  source 1..3429: mol_type = other DNA
atgctggtgctgagatgcagactgggcaccagcttccccaagctggacaacctggtgcccaagggcaagatgaagatcctgctggtgttcctgggcctgctgggcaacagcgtggccatgcccatgcacatgcccagaatgcccggcttcagcagcaagagcgaggagatgatgagatacaaccagttcaacttcatgaacggcccccacatggcccacctgggccccttcttcggcaacggcctgccccagcagttcccccagtaccagatgcccatgtggccccagcccccccccaacacctggcaccccagaaagagcagcgcccccaagagacacaacaagaccgaccagacccaggagacccagaagcccaaccagacccagagcaagaagcccccccagaagagacccctgaagcagcccagccacaaccagccccagcccgaggaggaggcccagcccccccaggccttcccccccttcggcaacggcctgttcccctaccagcagcccccctggcagatcccccagagactgcccccccccggctacggcagaccccccatcagcaacgaggagggcggcaacccctacttcggctacttcggctaccacggcttcggcggcagacccccctactacagcgaggagatgttcgagcaggacttcgagaagcccaaggaggaggacccccccaaggccgagagccccggcaccgagcccaccgccaacagcaccgtgaccgagaccaacagcacccagcccaaccccaagggcagccagggcggcaacgacaccagccccaccggcaacagcacccccggcctgaacaccggcaacaacccccccgcccagaacggcatcggccccctgcccgccgtgaacgccagcggccagggcggccccggcagccagatcccctggagacccagccagcccaacatcagagagaaccacccctaccccaacatcagaaacttccccagcggcagacagtggtacttcaccggcaccgtgatgggccacagacagaacagacccttctacagaaaccagcaggtgcagagaggccccagatggaacttcttcgcctgggagagaaagcaggtggccagacccggcaaccccgtgtaccacaaggcctacccccccaccagcagaggcaactaccccaactacgccggcaaccccgccaacctgagaagaaagccccagggccccaacaagcaccccgtgggcaccaccgtggcccccctgggccccaagcccggccccgtggtgagaaacgagaagatccagaaccccaaggagaagcccctgggccccaaggagcagatcatcgtgcccaccaagaaccccaccagcccctggagaaacagccagcagtacgaggtgaacaagagcaactacaagctgccccacagcgagggctacatgcccgtgcccaacttcaacagcgtggaccagcacgagaacagctactaccccagaggcgacagcagaaaggtgcccaacagcgacggccagacccagagccagaacctgcccaagggcatcgtgctgggcagcagaagaatgccctacgagagcgagaccaaccagagcgagctgaagcacagcagctaccagcccgccgtgtaccccgaggagatccccagccccgccaaggagcacttccccgccggcagaaacacctgggaccaccaggagatcagcccccccttcaaggaggaccccggcagacaggaggagcacctgccccaccccagccacggcagcagaggcagcgtgttctaccccgagtacaacccctacgaccccagagagaacagcccctacctgagaggcaacacctgggacgagagagacgacagccccaacaccatgggccagaaggagagccccctgtaccccatcaacacccccgaccagaaggagatcgtgccctacaacgaggaggaccccgtggaccccaccggcgacgaggtgttccccggccagaacagatggggcgaggagctgagcttcaagggcggccccaccgtgagacactacgagggcgagcagtacaccagcaaccagcccaaggagtacctgccctacagcctggacaaccccagcaagcccagagaggacttctactacagcgagttctacccctggagccccgacgagaacttccccagctacaacaccgccagcaccatgcccccccccatcgagagcagaggctactacgtgaacaacgccgccggccccgaggagagcaccctgttccccagcagaaacagctgggaccacagaatccaggcccagggccagagagagagaagaccctacttcaacagaaacatctgggaccaggccacccacctgcagaaggcccccgccagaccccccgaccagaagggcaaccagccctactacagcaacacccccgccggcctgcagaagaaccccatctggcacgagggcgagaacctgaactacggcatgcagatcaccagaatgaacagccccgagagagagcacagcagcttccccaacttcatcccccccagctaccccagcggccagaaggaggcccacctgttccacctgagccagagaggcagctgctgcgccggcagcagcaccggccccaaggacaaccccctggccctgcaggactacacccccagctacggcctggcccccggcgagaaccaggacaccagccccctgtacaccgacggcagccacaccaagcagaccagagacatcatcagccccaccagcatcctgcccggccagagaaacagcagcgagaagagagagagccagaaccccttcagagacgacgtgagcaccctgagaagaaacaccccctgcagcatcaagaaccagctgggccagaaggagatcatgcccttccccgaggccagcagcctgcagagcaagaacaccccctgcctgaagaacgacctgggcggcgacggcaacaacatcctggagcaggtgttcgaggacaaccagctgaacgagagaaccgtggacctgacccccgagcagctggtgatcggcacccccgacgagggcagcaaccccgagggcatccagagccaggtgcaggagaacgagagcgagagacagcagcagagacccagcaacatcctgcacctgccctgcttcggcagcaagctggccaagcaccacagcagcaccaccggcacccccagcagcgacggcagacagagccccttcgacggcgacagcatcacccccaccgagaaccccaacaccctggtggagctggccaccgaggagcagttcaagagcatcaacgtggaccccctggacgccgacgagcacagccccttcgagttcctgcagagaggcaccaacgtgcaggaccaggtgcaggactgcctgctgctgcaggcctag

SEQ ID NO: 1871 - DNA, 582 bp, synthetic construct
  misc_feature 1..582: note = source = /note="Description of Artificial Sequence: Synthetic coding sequence"
  source 1..582: mol_type = other DNA
atgggcgtgcacgagtgccccgcctggctgtggctgctgctgagcctgctgagcctgcccctgggcctgcccgtgctgggcgccccccccagactgatctgcgacagcagagtgctggagagatacctgctggaggccaaggaggccgagaacatcaccaccggctgcgccgagcactgcagcctgaacgagaacatcaccgtgcccgacaccaaggtgaacttctacgcctggaagagaatggaggtgggccagcaggccgtggaggtgtggcagggcctggccctgctgagcgaggccgtgctgagaggccaggccctgctggtgaacagcagccagccctgggagcccctgcagctgcacgtggacaaggccgtgagcggcctgagaagcctgaccaccctgctgagagccctgggcgcccagaaggaggccatcagcccccccgacgccgccagcgccgcccccctgagaaccatcaccgccgacaccttcagaaagctgttcagagtgtacagcaacttcctgagaggcaagctgaagctgtacaccggcgaggcctgcagaaccggcgacagatag

SEQ ID NO: 1872 - DNA, 192 bp, synthetic construct
  misc_feature 1..192: note = source = /note="Description of Artificial Sequence: Synthetic coding sequence"
  source 1..192: mol_type = other DNA
atgcccagcagcgtgagctggggcatcctgctgctggccggcctgtgctgcctggtgcccgtgagcctggcccacggcgagggcaccttcaccagcgacctgagcaagcagatggaggaggaggccgtgagactgttcatcgagtggctgaagaacggcggccccagcagcggcgcccccccccccagctag

SEQ ID NO: 1873 - DNA, 1050 bp, synthetic construct
  misc_feature 1..1050: note = source = /note="Description of Artificial Sequence: Synthetic coding sequence"
  source 1..1050: mol_type = other DNA
atggaggccgtgaaggccgaggcctgggagggcgccgccgtggcccaggacctgctggccctgggctacggcggcgtgcccggcgccgccagcagaggcgccagctgccccgacttcagaggcctgtgcgtgagactggccgccgagctggccaccctgggcgccctggagcagcagagagaggccggcgccgaggtgctgagcgccggcgacggccccggcgccgaggaggacttcctgagacagctgggcagcctgctgagagagctgcactgccccgacagagccctgtgcggcggcgacggcgccgccgccctgagagagcccggcgccggcctgagactgctgagattcctgtgcagcgagctgcaggccaccagactgctgtgcctgagaagcctgctggaccccagccccagaccccccctgggcgagggcgtggtggagggcgccggcatggtgcaggagctggacctgaccctgcaggccctgggcctgcccagacccgcccccggcacccccgccagccagctgctgcaggagctgcacgccaagatcagcgagctgcagcccagcctgccccccggcagcctgcagcccctgctgagctgcagcctggacgcccccagatgggaggccctggagagcctgagccagagcctgagagaccagtacagatgcagaagatgcctgctgctgaagagactggacctgaccaccagcgccttccactggagcgacagagccgaggcccagggcgaggccatgagagccgtgctgatccccatcagagaggtgctgacccccgagagcgacatcagcatcgcccacgtgctggccgccagagccgacctgagctgcctggtgcccgccaccagcgtggccgtgagaagaggcacctgctgcgccatcaacaaggtgctgatgggcaacgtgcccgacagaggcggcagacccaacgagctggagccccccatgcccacctggagaagcagaagagaggacggcggcccccagtgctggggcagaaagaagaagaagaagaagtag

SEQ ID NO: 1874 - DNA, 804 bp, synthetic construct
  misc_feature 1..804: note = source = /note="Description of Artificial Sequence: Synthetic coding sequence"
  source 1..804: mol_type = other DNA
atggaggccgtgaaggccgaggcctgggagggcgccgccgtggcccaggacctgctggccctgggctacggcggcgtgcccggcgccgccagcagaggcgccagctgccccgacttcagaggcctgtgcgtgagactggccgccgagctggccaccctgggcgccctggagcagcagagagaggccggcgccgaggtgctgagcgccggcgacggccccggcgccgaggaggacttcctgagacagctgggcagcctgctgagagagctgcactgccccgacagagccctgtgcggcggcgacggcgccgccgccctgagagagcccggcgccggcctgagactgctgagattcctgtgcagcgagctgcaggccaccagactgctgtgcctgagaagcctgctggaccccagccccagaccccccctgggcgagggcgtggtggagggcgccggcatggtgcaggagctggacctgaccctgcaggccctgggcctgcccagacccgcccccggcacccccgccagccagctgctgcaggagctgcacgccaaggaggccctggagagcctgagccagagcctgagagaccagtacagatgcagaagatgcctgctgctgaagagactggacctgaccaccagcgccttccactggagcgacagagccgaggtgctgatgggcaacgtgcccgacagaggcggcagacccaacgagctggagccccccatgcccacctggagaagcagaagagaggacggcggcccccagtgctggggcagaaagaagaagaagaagaagtag

SEQ ID NO: 1875 - DNA, 2601 bp, synthetic construct
  misc_feature 1..2601: note = source = /note="Description of Artificial Sequence: Synthetic coding sequence"
  source 1..2601: mol_type = other DNA
atgttcagcatgagaatcgtgtgcctggtgctgagcgtggtgggcaccgcctggaccgccgacagcggcgagggcgacttcctggccgagggcggcggcgtgagaggccccagagtggtggagagacaccagagcgcctgcaaggacagcgactggcccttctgcagcgacgaggactggaactacaagtgccccagcggctgcagaatgaagggcctgatcgacgaggtgaaccaggacttcaccaacagaatcaacaagctgaagaacagcctgttcgagtaccagaagaacaacaaggacagccacagcctgaccaccaacatcatggagatcctgagaggcgacttcagcagcgccaacaacagagacaacacctacaacagagtgagcgaggacctgagaagcagaatcgaggtgctgaagagaaaggtgatcgagaaggtgcagcacatccagctgctgcagaagaacgtgagagcccagctggtggacatgaagagactggaggtggacatcgacatcaagatcagaagctgcagaggcagctgcagcagagccctggccagagaggtggacctgaaggactacgaggaccagcagaagcagctggagcaggtgatcgccaaggacctgctgcccagcagagacagacagcacctgcccctgatcaagatgaagcccgtgcccgacctggtgcccggcaacttcaagagccagctgcagaaggtgccccccgagtggaaggccctgaccgacatgccccagatgagaatggagctggagagacccggcggcaacgagatcaccagaggcggcagcaccagctacggcaccggcagcgagaccgagagccccagaaaccccagcagcgccggcagctggaacagcggcagcagcggccccggcagcaccggcaacagaaaccccggcagcagcggcaccggcggcaccgccacctggaagcccggcagcagcggccccggcagcaccggcagctggaacagcggcagcagcggcaccggcagcaccggcaaccagaaccccggcagccccagacccggcagcaccggcacctggaaccccggcagcagcgagagaggcagcgccggccactggaccagcgagagcagcgtgagcggcagcaccggccagtggcacagcgagagcggcagcttcagacccgacagccccggcagcggcaacgccagacccaacaaccccgactggggcaccttcgaggaggtgagcggcaacgtgagccccggcaccagaagagagtaccacaccgagaagctggtgaccagcaagggcgacaaggagctgagaaccggcaaggagaaggtgaccagcggcagcaccaccaccaccagaagaagctgcagcaagaccgtgaccaagaccgtgatcggccccgacggccacaaggaggtgaccaaggaggtggtgaccagcgaggacggcagcgactgccccgaggccatggacctgggcaccctgagcggcatcggcaccctggacggcttcagacacagacaccccgacgaggccgccttcttcgacaccgccagcaccggcaagaccttccccggcttcttcagccccatgctgggcgagttcgtgagcgagaccgagagcagaggcagcgagagcggcatcttcaccaacaccaaggagagcagcagccaccaccccggcatcgccgagttccccagcagaggcaagagcagcagctacagcaagcagttcaccagcagcaccagctacaacagaggcgacagcaccttcgagagcaagagctacaagatggccgacgaggccggcagcgaggccgaccacgagggcacccacagcaccaagagaggccacgccaagagcagacccgtgagagactgcgacgacgtgctgcagacccaccccagcggcacccagagcggcatcttcaacatcaagctgcccggcagcagcaagatcttcagcgtgtactgcgaccaggagaccagcctgggcggctggctgctgatccagcagagaatggacggcagcctgaacttcaacagaacctggcaggactacaagagaggcttcggcagcctgaacgacgagggcgagggcgagttctggctgggcaacgactacctgcacctgctgacccagagaggcagcgtgctgagagtggagctggaggactgggccggcaacgaggcctacgccgagtaccacttcagagtgggcagcgaggccgagggctacgccctgcaggtgagcagctacgagggcaccgccggcgacgccctgatcgagggcagcgtggaggagggcgccgagtacaccagccacaacaacatgcagttcagcaccttcgacagagacgccgaccagtgggaggagaactgcgccgaggtgtacggcggcggctggtggtacaacaactgccaggccgccaacctgaacggcatctactaccccggcggcagctacgaccccagaaacaacagcccctacgagatcgagaacggcgtggtgtgggtgagcttcagaggcgccgactacagcctgagagccgtgagaatgaagatcagacccctggtgacccagtag

SEQ ID NO: 1876 - DNA, 1935 bp, synthetic construct
  misc_feature 1..1935: note = source = /note="Description of Artificial Sequence: Synthetic coding sequence"
  source 1..1935: mol_type = other DNA
atgttcagcatgagaatcgtgtgcctggtgctgagcgtggtgggcaccgcctggaccgccgacagcggcgagggcgacttcctggccgagggcggcggcgtgagaggccccagagtggtggagagacaccagagcgcctgcaaggacagcgactggcccttctgcagcgacgaggactggaactacaagtgccccagcggctgcagaatgaagggcctgatcgacgaggtgaaccaggacttcaccaacagaatcaacaagctgaagaacagcctgttcgagtaccagaagaacaacaaggacagccacagcctgaccaccaacatcatggagatcctgagaggcgacttcagcagcgccaacaacagagacaacacctacaacagagtgagcgaggacctgagaagcagaatcgaggtgctgaagagaaaggtgatcgagaaggtgcagcacatccagctgctgcagaagaacgtgagagcccagctggtggacatgaagagactggaggtggacatcgacatcaagatcagaagctgcagaggcagctgcagcagagccctggccagagaggtggacctgaaggactacgaggaccagcagaagcagctggagcaggtgatcgccaaggacctgctgcccagcagagacagacagcacctgcccctgatcaagatgaagcccgtgcccgacctggtgcccggcaacttcaagagccagctgcagaaggtgccccccgagtggaaggccctgaccgacatgccccagatgagaatggagctggagagacccggcggcaacgagatcaccagaggcggcagcaccagctacggcaccggcagcgagaccgagagccccagaaaccccagcagcgccggcagctggaacagcggcagcagcggccccggcagcaccggcaacagaaaccccggcagcagcggcaccggcggcaccgccacctggaagcccggcagcagcggccccggcagcaccggcagctggaacagcggcagcagcggcaccggcagcaccggcaaccagaaccccggcagccccagacccggcagcaccggcacctggaaccccggcagcagcgagagaggcagcgccggccactggaccagcgagagcagcgtgagcggcagcaccggccagtggcacagcgagagcggcagcttcagacccgacagccccggcagcggcaacgccagacccaacaaccccgactggggcaccttcgaggaggtgagcggcaacgtgagccccggcaccagaagagagtaccacaccgagaagctggtgaccagcaagggcgacaaggagctgagaaccggcaaggagaaggtgaccagcggcagcaccaccaccaccagaagaagctgcagcaagaccgtgaccaagaccgtgatcggccccgacggccacaaggaggtgaccaaggaggtggtgaccagcgaggacggcagcgactgccccgaggccatggacctgggcaccctgagcggcatcggcaccctggacggcttcagacacagacaccccgacgaggccgccttcttcgacaccgccagcaccggcaagaccttccccggcttcttcagccccatgctgggcgagttcgtgagcgagaccgagagcagaggcagcgagagcggcatcttcaccaacaccaaggagagcagcagccaccaccccggcatcgccgagttccccagcagaggcaagagcagcagctacagcaagcagttcaccagcagcaccagctacaacagaggcgacagcaccttcgagagcaagagctacaagatggccgacgaggccggcagcgaggccgaccacgagggcacccacagcaccaagagaggccacgccaagagcagacccgtgagaggcatccacaccagccccctgggcaagcccagcctgagcccctag

SEQ ID NO: 1877 - DNA, 870 bp, synthetic construct
  misc_feature 1..870: note = source = /note="Description of Artificial Sequence: Synthetic coding sequence"
  source 1..870: mol_type = other DNA
atgttcagcatgagaatcgtgtgcctggtgctgagcgtggtgggcaccgcctggaccgccgacagcggcgagggcgacttcctggccgagggcggcggcgtgagaggccccagagtggtggagagacaccagagcgcctgcaaggacagcgactggcccttctgcagcgacgaggactggaactacaagtgccccagcggctgcagaatgaagggcctgatcgacgaggtgaaccaggacttcaccaacagaatcaacaagctgaagaacagcctgttcgagtaccagaagaacaacaaggacagccacagcctgaccaccaacatcatggagatcctgagaggcgacttcagcagcgccaacaacagagacaacacctacaacagagtgagcgaggacctgagaagcagaatcgaggtgctgaagagaaaggtgatcgagaaggtgcagcacatccagctgctgcagaagaacgtgagagcccagctggtggacatgaagagactggaggtggacatcgacatcaagatcagaagctgcagaggcagctgcagcagagccctggccagagaggtggacctgaaggactacgaggaccagcagaagcagctggagcaggtgatcgccaaggacctgctgcccgtggtgaacctgcaggtgaccgccaacaacctgctggtggccagagtgaccaccgaggagaccccccacctgaaggccagagccatcaagtggcagatgagacccgaggtgaagcccatcatgaaggagcacatcgcccccagagaggccatgctgaacctggccctgagcgaggtgagcaccctgctgctgtggggcagcctgccctgcccccccagactgagctag

SEQ ID NO: 1878 - DNA, 1476 bp, synthetic construct
  misc_feature 1..1476: note = source = /note="Description of Artificial Sequence: Synthetic coding sequence"
  source 1..1476: mol_type = other DNA
atgaagagaatggtgagctggagcttccacaagctgaagaccatgaagcacctgctgctgctgctgctgtgcgtgttcctggtgaagagccagggcgtgaacgacaacgaggagggcttcttcagcgccagaggccacagacccctggacaagaagagagaggaggcccccagcctgagacccgcccccccccccatcagcggcggcggctacagagccagacccgccaaggccgccgccacccagaagaaggtggagagaaaggcccccgacgccggcggctgcctgcacgccgaccccgacctgggcgtgctgtgccccaccggctgccagctgcaggaggccctgctgcagcaggagagacccatcagaaacagcgtggacgagctgaacaacaacgtggaggccgtgagccagaccagcagcagcagcttccagtacatgtacctgctgaaggacctgtggcagaagagacagaagcaggtgaaggacaacgagaacgtggtgaacgagtacagcagcgagctggagaagcaccagctgtacatcgacgagaccgtgaacagcaacatccccaccaacctgagagtgctgagaagcatcctggagaacctgagaagcaagatccagaagctggagagcgacgtgagcgcccagatggagtactgcagaaccccctgcaccgtgagctgcaacatccccgtggtgagcggcaaggagtgcgaggagatcatcagaaagggcggcgagaccagcgagatgtacctgatccagcccgacagcagcgtgaagccctacagagtgtactgcgacatgaacaccgagaacggcggctggaccgtgatccagaacagacaggacggcagcgtggacttcggcagaaagtgggacccctacaagcagggcttcggcaacgtggccaccaacaccgacggcaagaactactgcggcctgcccggcgagtactggctgggcaacgacaagatcagccagctgaccagaatgggccccaccgagctgctgatcgagatggaggactggaagggcgacaaggtgaaggcccactacggcggcttcaccgtgcagaacgaggccaacaagtaccagatcagcgtgaacaagtacagaggcaccgccggcaacgccctgatggacggcgccagccagctgatgggcgagaacagaaccatgaccatccacaacggcatgttcttcagcacctacgacagagacaacgacggctggctgaccagcgaccccagaaagcagtgcagcaaggaggacggcggcggctggtggtacaacagatgccacgccgccaaccccaacggcagatactactggggcggccagtacacctgggacatggccaagcacggcaccgacgacggcgtggtgtggatgaactggaagggcagctggtacagcatgagaaagatgagcatgaagatcagacccttcttcccccagcagtag

SEQ ID NO: 1879 - DNA, 1425 bp, synthetic construct
  misc_feature 1..1425: note = source = /note="Description of Artificial Sequence: Synthetic coding sequence"
  source 1..1425: mol_type = other DNA
atgaagagaatggtgagctggagcttccacaagctgaagaccatgaagcacctgctgctgctgctgctgtgcgtgttcctggtgaagagccagggcgtgaacgacaacgaggagggcttcttcagcgccagaggccacagacccctggacaagaagagagaggaggccagacccgccaaggccgccgccacccagaagaaggtggagagaaaggcccccgacgccggcggctgcctgcacgccgaccccgacctgggcgtgctgtgccccaccggctgccagctgcaggaggccctgctgcagcaggagagacccatcagaaacagcgtggacgagctgaacaacaacgtggaggccgtgagccagaccagcagcagcagcttccagtacatgtacctgctgaaggacctgtggcagaagagacagaagcaggtgaaggacaacgagaacgtggtgaacgagtacagcagcgagctggagaagcaccagctgtacatcgacgagaccgtgaacagcaacatccccaccaacctgagagtgctgagaagcatcctggagaacctgagaagcaagatccagaagctggagagcgacgtgagcgcccagatggagtactgcagaaccccctgcaccgtgagctgcaacatccccgtggtgagcggcaaggagtgcgaggagatcatcagaaagggcggcgagaccagcgagatgtacctgatccagcccgacagcagcgtgaagccctacagagtgtactgcgacatgaacaccgagaacggcggctggaccgtgatccagaacagacaggacggcagcgtggacttcggcagaaagtgggacccctacaagcagggcttcggcaacgtggccaccaacaccgacggcaagaactactgcggcctgcccggcgagtactggctgggcaacgacaagatcagccagctgaccagaatgggccccaccgagctgctgatcgagatggaggactggaagggcgacaaggtgaaggcccactacggcggcttcaccgtgcagaacgaggccaacaagtaccagatcagcgtgaacaagtacagaggcaccgccggcaacgccctgatggacggcgccagccagctgatgggcgagaacagaaccatgaccatccacaacggcatgttcttcagcacctacgacagagacaacgacggctggctgaccagcgaccccagaaagcagtgcagcaaggaggacggcggcggctggtggtacaacagatgccacgccgccaaccccaacggcagatactactggggcggccagtacacctgggacatggccaagcacggcaccgacgacggcgtggtgtggatgaactggaagggcagctggtacagcatgagaaagatgagcatgaagatcagacccttcttcccccagcagtag

SEQ ID NO: 1880 - DNA, 1362 bp, synthetic construct
  misc_feature 1..1362: note = source = /note="Description of Artificial Sequence: Synthetic coding sequence"
  source 1..1362: mol_type = other DNA
atgagctggagcctgcaccccagaaacctgatcctgtacttctacgccctgctgttcctgagcagcacctgcgtggcctacgtggccaccagagacaactgctgcatcctggacgagagattcggcagctactgccccaccacctgcggcatcgccgacttcctgagcacctaccagaccaaggtggacaaggacctgcagagcctggaggacatcctgcaccaggtggagaacaagaccagcgaggtgaagcagctgatcaaggccatccagctgacctacaaccccgacgagagcagcaagcccaacatgatcgacgccgccaccctgaagagcagaaagatgctggaggagatcatgaagtacgaggccagcatcctgacccacgacagcagcatcagatacctgcaggagatctacaacagcaacaaccagaagatcgtgaacctgaaggagaaggtggcccagctggaggcccagtgccaggagccctgcaaggacaccgtgcagatccacgacatcaccggcaaggactgccaggacatcgccaacaagggcgccaagcagagcggcctgtacttcatcaagcccctgaaggccaaccagcagttcctggtgtactgcgagatcgacggcagcggcaacggctggaccgtgttccagaagagactggacggcagcgtggacttcaagaagaactggatccagtacaaggagggcttcggccacctgagccccaccggcaccaccgagttctggctgggcaacgagaagatccacctgatcagcacccagagcgccatcccctacgccctgagagtggagctggaggactggaacggcagaaccagcaccgccgactacgccatgttcaaggtgggccccgaggccgacaagtacagactgacctacgcctacttcgccggcggcgacgccggcgacgccttcgacggcttcgacttcggcgacgaccccagcgacaagttcttcaccagccacaacggcatgcagttcagcacctgggacaacgacaacgacaagttcgagggcaactgcgccgagcaggacggcagcggctggtggatgaacaagtgccacgccggccacctgaacggcgtgtactaccagggcggcacctacagcaaggccagcacccccaacggctacgacaacggcatcatctgggccacctggaagaccagatggtacagcatgaagaagaccaccatgaagatcatccccttcaacagactgaccatcggcgagggccagcagcaccacctgggcggcgccaagcaggtgagacccgagcaccccgccgagaccgagtacgacagcctgtaccccgaggacgacctgtag

SEQ ID NO: 1881 - DNA, 1314 bp, synthetic construct
  misc_feature 1..1314: note = source = /note="Description of Artificial Sequence: Synthetic coding sequence"
  source 1..1314: mol_type = other DNA
atgagctggagcctgcaccccagaaacctgatcctgtacttctacgccctgctgttcctgagcagcacctgcgtggcctacgtggccaccagagacaactgctgcatcctggacgagagattcggcagctactgccccaccacctgcggcatcgccgacttcctgagcacctaccagaccaaggtggacaaggacctgcagagcctggaggacatcctgcaccaggtggagaacaagaccagcgaggtgaagcagctgatcaaggccatccagctgacctacaaccccgacgagagcagcaagcccaacatgatcgacgccgccaccctgaagagcagaaagatgctggaggagatcatgaagtacgaggccagcatcctgacccacgacagcagcatcagatacctgcaggagatctacaacagcaacaaccagaagatcgtgaacctgaaggagaaggtggcccagctggaggcccagtgccaggagccctgcaaggacaccgtgcagatccacgacatcaccggcaaggactgccaggacatcgccaacaagggcgccaagcagagcggcctgtacttcatcaagcccctgaaggccaaccagcagttcctggtgtactgcgagatcgacggcagcggcaacggctggaccgtgttccagaagagactggacggcagcgtggacttcaagaagaactggatccagtacaaggagggcttcggccacctgagccccaccggcaccaccgagttctggctgggcaacgagaagatccacctgatcagcacccagagcgccatcccctacgccctgagagtggagctggaggactggaacggcagaaccagcaccgccgactacgccatgttcaaggtgggccccgaggccgacaagtacagactgacctacgcctacttcgccggcggcgacgccggcgacgccttcgacggcttcgacttcggcgacgaccccagcgacaagttcttcaccagccacaacggcatgcagttcagcacctgggacaacgacaacgacaagttcgagggcaactgcgccgagcaggacggcagcggctggtggatgaacaagtgccacgccggccacctgaacggcgtgtactaccagggcggcacctacagcaaggccagcacccccaacggctacgacaacggcatcatctgggccacctggaagaccagatggtacagcatgaagaagaccaccatgaagatcatccccttcaacagactgaccatcggcgagggccagcagcaccacctgggcggcgccaagcaggccggcgacgtgtag

SEQ ID NO: 1882 - DNA, 2892 bp, synthetic construct
  misc_feature 1..2892: note = source = /note="Description of Artificial Sequence: Synthetic coding sequence"
  source 1..2892: mol_type = other DNA
atgctgagcggcgagagaaaggagggcggcagccccagattcggcaagctgcacctgcccgtgggcctgtggatcaacagccccagaaagcagctggccaagctgggcagaagatggcccagcgccgccagcgtgaagagcagcagcagcgacaccggcagcagaagcagcgagcccctgccccccccccccccccacgtggagctgagaagagtgggcgccgtgaaggccgccggcggcgccagcggcagcagagccaagagaatcagccagctgttcagaggcagcggcaccggcaccaccggcagcagcggcgccggcggccccggcacccccggcggcgcccagagatgggccagcgagaagaagctgcccgagctggccgccggcgtggcccccgagccccccctggccaccagagccaccgccccccccggcgtgctgaagatcttcggcgccggcctggccagcggcgccaactacaagagcgtgctggccaccgccagaagcaccgccagagagctggtggccgaggccctggagagatacggcctggccggcagccccggcggcggccccggcgagagcagctgcgtggacgccttcgccctgtgcgacgccctgggcagacccgccgccgccggcgtgggcagcggcgagtggagagccgagcacctgagagtgctgggcgacagcgagagacccctgctggtgcaggagctgtggagagccagacccggctgggccagaagattcgagctgagaggcagagaggaggccagaagactggagcaggaggccttcggcgccgccgacagcgagggcaccggcgcccccagctggagaccccagaagaacagaagcagagccgccagcggcggcgccgccctggccagccccggccccggcaccggcagcggcgcccccgccggcagcggcggcaaggagagaagcgagaacctgagcctgagaagaagcgtgagcgagctgagcctgcagggcagaagaagaagacagcaggagagaagacagcaggccctgagcatggcccccggcgccgccgacgcccagatcggcaccgccgaccccggcgacttcgaccagctgacccagtgcctgatccaggcccccagcaacagaccctacttcctgctgctgcagggctaccaggacgcccaggacttcgtggtgtacgtgatgaccagagagcagcacgtgttcggcagaggcggcaacagcagcggcagaggcggcagccccgccccctacgtggacaccttcctgaacgcccccgacatcctgcccagacactgcaccgtgagagccggccccgagcaccccgccatggtgagacccagcagaggcgcccccgtgacccacaacggctgcctgctgctgagagaggccgagctgcaccccggcgacctgctgggcctgggcgagcacttcctgttcatgtacaaggaccccagaaccggcggcagcggccccgccagacccccctggctgcccgccagacccggcgccaccccccccggccccggctgggccttcagctgcagactgtgcggcagaggcctgcaggagagaggcgaggccctggccgcctacctggacggcagagagcccgtgctgagattcagacccagagaggaggaggccctgctgggcgagatcgtgagagccgccgccgccggcagcggcgacctgccccccctgggccccgccaccctgctggccctgtgcgtgcagcacagcgccagagagctggagctgggccacctgcccagactgctgggcagactggccagactgatcaaggaggccgtgtgggagaagatcaaggagatcggcgacagacagcccgagaaccaccccgagggcgtgcccgaggtgcccctgacccccgaggccgtgagcgtggagctgagacccctgatgctgtggatggccaacaccaccgagctgctgagcttcgtgcaggagaaggtgctggagatggagaaggaggccgaccaggaggacccccagctgtgcaacgacctggagctgtgcgacgaggccatggccctgctggacgaggtgatcatgtgcaccttccagcagagcgtgtactacctgaccaagaccctgtacagcaccctgcccgccctgctggacagcaaccccttcaccgccggcgccgagctgcccggccccggcgccgagctgggcgccatgccccccggcctgagacccaccctgggcgtgttccaggccgccctggagctgaccagccagtgcgagctgcaccccgacctggtgagccagaccttcggctacctgttcttcttcagcaacgccagcctgctgaacagcctgatggagagaggccagggcagacccttctaccagtggagcagagccgtgcagatcagaaccaacctggacctggtgctggactggctgcagggcgccggcctgggcgacatcgccaccgagttcttcagaaagctgagcatggccgtgaacctgctgtgcgtgcccagaaccagcctgctgaaggccagctggagcagcctgagaaccgaccaccccaccctgacccccgcccagctgcaccacctgctgagccactaccagctgggccccggcagaggcccccccgccgcctgggaccccccccccgccgagagagaggccgtggacaccggcgacatcttcgagagcttcagcagccacccccccctgatcctgcccctgggcagcagcagactgagactgaccggccccgtgaccgacgacgccctgcacagagagctgagaagactgagaagactgctgtgggacctggagcagcaggagctgcccgccaactacagacacggcccccccgtggccaccagcccctag

SEQ ID NO: 1883 - DNA, 630 bp, synthetic construct
  misc_feature 1..630: note = source = /note="Description of Artificial Sequence: Synthetic coding sequence"
  source 1..630: mol_type = other DNA
atggacagcgacgagaccggcttcgagcacagcggcctgtgggtgagcgtgctggccggcctgctgctgggcgcctgccaggcccaccccatccccgacagcagccccctgctgcagttcggcggccaggtgagacagagatacctgtacaccgacgacgcccagcagaccgaggcccacctggagatcagagaggacggcaccgtgggcggcgccgccgaccagagccccgagagcctgctgcagctgaaggccctgaagcccggcgtgatccagatcctgggcgtgaagaccagcagattcctgtgccagagacccgacggcgccctgtacggcagcctgcacttcgaccccgaggcctgcagcttcagagagctgctgctggaggacggctacaacgtgtaccagagcgaggcccacggcctgcccctgcacctgcccggcaacaagagcccccacagagaccccgcccccagaggccccgccagattcctgcccctgcccggcctgccccccgccctgcccgagccccccggcatcctggccccccagccccccgacgtgggcagcagcgaccccctgagcatggtgggccccagccagggcagaagccccagctacgccagctag

SEQ ID NO: 1884 - DNA, 321 bp, synthetic construct
  misc_feature 1..321: note = source = /note="Description of Artificial Sequence: Synthetic coding sequence"
  source 1..321: mol_type = other DNA
atgctgagattcatccaggaggtgaacaccaccaccagaagctgcgccctgtgggacctggaggaggacaccgagtacatcgtgcacgtgcaggccatcagcatccagggccagagccccgccagcgagcccgtgctgttcaagacccccagagaggccgagaagatggccagcaagaacaaggacgaggtgaccatgaaggagatgggcagaaaccagcagctgagaaccggcgaggtgctgatcatcgtggtggtgctgttcatgtgggccggcgtgatcgccctgttctgcagacagtacgacatcatcgaggcctag

SEQ ID NO: 1885 - DNA, 414 bp, synthetic construct
  misc_feature 1..414: note = source = /note="Description of Artificial Sequence: Synthetic coding sequence"
  source 1..414: mol_type = other DNA
atgctgagattcatccaggaggtgaacaccaccaccagaagctgcgccctgtgggacctggaggaggacaccgagtacatcgtgcacgtgcaggccatcagcatccagggccagagccccgccagcgagcccgtgctgttcaagacccccagagaggccgagaagatggccagcaagaacaaggacgaggtgaccatgaaggagatgggcagaaaccagcagctgagaaccggcgaggtgctgatcatcgtggtggtgctgttcatgtgggccggcgtgatcgccctgttctgcagacagtacgacatcatcaaggacaacgagcccaacaacaacaaggagaagaccaagagcgccagcgagaccagcacccccgagcaccagggcggcggcctgctgagaagcaagatctag

SEQ ID NO: 1886 - DNA, 390 bp, synthetic construct
  misc_feature 1..390: note = source = /note="Description of Artificial Sequence: Synthetic coding sequence"
  source 1..390: mol_type = other DNA
atgaagaccctgcagttcttcttcctgttctgctgctggaaggccatctgctgcaacagctgcgagctgaccaacatcaccatcgccatcgagaaggaggagtgcagattctgcatcagcatcaacaccacctggtgcgccggctactgctacaccagagacctggtgtacaaggaccccgccagacccaagatccagaagacctgcaccttcaaggagctggtgtacgagaccgtgagagtgcccggctgcgcccaccacgccgacagcctgtacacctaccccgtggccacccagtgccactgcggcaagtgcgacagcgacagcaccgactgcaccgtgagaggcctgggccccagctactgcagcttcggcgagatgaaggagtag

SEQ ID NO: 1887 - DNA, 390 bp, synthetic construct; identical to SEQ ID NO: 1886
  misc_feature 1..390: note = source = /note="Description of Artificial Sequence: Synthetic coding sequence"
  source 1..390: mol_type = other DNA

SEQ ID NO: 1888 - DNA, 390 bp, synthetic construct; identical to SEQ ID NO: 1886
  misc_feature 1..390: note = source = /note="Description of Artificial Sequence: Synthetic coding sequence"
  source 1..390: mol_type = other DNA

SEQ ID NO: 1889 - DNA, 1260 bp, synthetic construct
  misc_feature 1..1260: note = source = /note="Description of Artificial Sequence: Synthetic coding sequence"
  source 1..1260: mol_type = other DNA
atgagcttcatccccgtggccgaggacagcgacttccccatccacaacctgccctacggcgtgttcagcaccagaggcgaccccagacccagaatcggcgtggccatcggcgaccagatcctggacctgagcatcatcaagcacctgttcaccggccccgtgctgagcaagcaccaggacgtgttcaaccagcccaccctgaacagcttcatgggcctgggccaggccgcctggaaggaggccagagtgttcctgcagaacctgctgagcgtgagccaggccagactgagagacgacaccgagctgagaaagtgcgccttcatcagccaggccagcgccaccatgcacctgcccgccaccatcggcgactacaccgacttctacagcagcagacagcacgccaccaacgtgggcatcatgttcagagacaaggagaacgccctgatgcccaactggctgcacctgcccgtgggctaccacggcagagccagcagcgtggtggtgagcggcacccccatcagaagacccatgggccagatgaagcccgacgacagcaagccccccgtgtacggcgcctgcaagctgctggacatggagctggagatggccttcttcgtgggccccggcaacagactgggcgagcccatccccatcagcaaggcccacgagcacatcttcggcatggtgctgatgaacgactggagcgccagagacatccagaagtgggagtacgtgcccctgggccccttcctgggcaagagcttcggcaccaccgtgagcccctgggtggtgcccatggacgccctgatgcccttcgccgtgcccaaccccaagcaggaccccagacccctgccctacctgtgccacgacgagccctacaccttcgacatcaacctgagcgtgaacctgaagggcgagggcatgagccaggccgccaccatctgcaagagcaacttcaagtacatgtactggaccatgctgcagcagctgacccaccacagcgtgaacggctgcaacctgagacccggcgacctgctggccagcggcaccatcagcggccccgagcccgagaacttcggcagcatgctggagctgagctggaagggcaccaagcccatcgacctgggcaacggccagaccagaaagttcctgctggacggcgacgaggtgatcatcaccggctactgccagggcgacggctacagaatcggcttcggccagtgcgccggcaaggtgctgcccgccctgctgcccagctag

SEQ ID NO: 1890 - DNA, 1260 bp, synthetic construct; identical to SEQ ID NO: 1889
  misc_feature 1..1260: note = source = /note="Description of Artificial Sequence: Synthetic coding sequence"
  source 1..1260: mol_type = other DNA

SEQ ID NO: 1891 - DNA, 1260 bp, synthetic construct; identical to SEQ ID NO: 1889
  misc_feature 1..1260: note = source = /note="Description of Artificial Sequence: Synthetic coding sequence"
  source 1..1260: mol_type = other DNA

SEQ ID NO: 1892 - DNA, 759 bp, synthetic construct
  misc_feature 1..759: note = source = /note="Description of Artificial Sequence: Synthetic coding sequence"
  source 1..759: mol_type = other DNA
atggaggccatgtggctgctgtgcgtggccctggccgtgctggcctggggcttcctgtgggtgtgggacagcagcgagagaatgaagagcagagagcagggcggcagactgggcgccgagagcagaaccctgctggtgatcgcccaccccgacgacgaggccatgttcttcgcccccaccgtgctgggcctggccagactgagacactgggtgtacctgctgtgcttcagcgccggcaactactacaaccagggcgagaccagaaagaaggagctgctgcagagctgcgacgtgctgggcatccccctgagcagcgtgatgatcatcgacaacagagacttccccgacgaccccggcatgcagtgggacaccgagcacgtggccagagtgctgctgcagcacatcgaggtgaacggcatcaacctggtggtgaccttcgacgccggcggcgtgagcggccacagcaaccacatcgccctgtacgccgccgtgagagccctgcacagcgagggcaagctgcccaagggctgcagcgtgctgaccctgcagagcgtgaacgtgctgagaaagtacatcagcctgctggacctgcccctgagcctgctgcacacccaggacgtgctgttcgtgctgaacagcaaggaggtggcccaggccaagaaggccatgagctgccacagaagccagctgctgtggttcagaagactgtacatcatcttcagcagatacatgagaatcaacagcctgagcttcctgtag

SEQ ID NO: 1893 - DNA, 1203 bp, synthetic construct
  misc_feature 1..1203: note = source = /note="Description of Artificial Sequence: Synthetic coding sequence"
  source 1..1203: mol_type = other DNA
atggccgccctgagacagccccaggtggccgagctgctggccgaggccagaagagccttcagagaggagttcggcgccgagcccgagctggccgtgagcgcccccggcagagtgaacctgatcggcgagcacaccgactacaaccagggcctggtgctgcccatgagagacagactgttccccaccctggagggcagaaagagaggcagcggcagagagagagtgagaggcagactgctggcccaggccagacccctgggcgccggcgcccccagactgcagcccggcagcatgttccccctgaactgcgaggccctgtgcgccacccagaagggcaccctgagagccagcggccacagaggcgcccccaccgccgacctgggcgagagaagcctgctggcccagcccgtgcagttcaccgaggaggagaccggcggcgccttcagacccatctgcagcctgggcagcgcccaggccagcagccccccctgccccaccgcccagggcagagtgcaggacggcctggtgagcctgctgaccaccagcgagggcgccgacgagccccagagactgcagttccccctgcccaccgcccagagaagcctggagcccggcacccccagatgggccaactacgtgaagggcgtgatccagtactaccccgccgcccccctgcccggcttcagcgccgtggtggtgagcagcgtgcccctgggcggcggcctgagcagcagcgccagcctggaggtggccacctacaccttcctgcagcagctgtgccccgacagcggcaccatcgccgccagagcccaggtgtgccagcaggccgagcacagcttcgccggcatgccctgcggcatcatggaccagttcatcagcctgatgggccagaagggccacgccctgctgatcgactgcagaagcctggagaccagcctggtgcccctgagcgaccccaagctggccgtgctgatcaccaacagcaacgtgagacacagcctggccagcagcgagtaccccgtgagaagaagacagtgcgaggaggtggccagagccctgggcaaggagagcctgagagaggtgcagctggaggagctggaggccgccagagacctggtgagcaaggagggcttcagaagagccagacacgtggtgggcgagatcagaagaaccgccgacggcgccaaggtgctgtgcctgtag

SEQ ID NO: 1894 - DNA, 1269 bp, synthetic construct
  misc_feature 1..1269: note = source = /note="Description of Artificial Sequence: Synthetic coding sequence"
  source 1..1269: mol_type = other DNA
atgtgcgccccccccagaggcgccccccccgagcaccccgcccccaccggcctgtgcagaagcagctgcgccgagctgcaggccagagtgatggccgccctgagacagccccaggtggccgagctgctggccgaggccagaagagccttcagagaggagttcggcgccgagcccgagctggccgtgagcgcccccggcagagtgaacctgatcggcgagcacaccgactacaaccagggcctggtgctgcccatggccctggagctgatgaccgtgctggtgggcagccccagaaaggacggcctggtgagcctgctgaccaccagcgagggcgccgacgagccccagagactgcagttccccctgcccaccgcccagagaagcctggagcccggcacccccagatgggccaactacgtgaagggcgtgatccagtactaccccgccgcccccctgcccggcttcagcgccgtggtggtgagcagcgtgcccctgggcggcggcctgagcagcagcgccagcctggaggtggccacctacaccttcctgcagcagctgtgccccgacagcggcaccatcgccgccagagcccaggtgtgccagcaggccgagcacagcttcgccggcatgccctgcggcatcatggaccagttcatcagcctgatgggccagaagggccacgccctgctgatcgactgcagaagcctggagaccagcctggtgcccctgagcgaccccaagctggccgtgctgatcaccaacagcaacgtgagacacagcctggccagcagcgagtaccccgtgagaagaagacagtgcgaggaggtggccagagccctgggcaaggagagcctgagagaggtgcagctggaggagctggaggccgccagagacctggtgagcaaggagggcttcagaagagccagacacgtggtgggcgagatcagaagaaccgcccaggccgccgccgccctgagaagaggcgactacagagccttcggcagactgatggtggagagccacagaagcctgagagacgactacgaggtgagctgccccgagctggaccagctggtggaggccgccctggccgtgcccggcgtgtacggcagcagaatgaccggcggcggcttcggcggctgcaccgtgaccctgctggaggccagcgccgccccccacgccatgagacacatccaggagcactacggcggcaccgccaccttctacctgagccaggccgccgacggcgccaaggtgctgtgcctgtag

SEQ ID NO: 1895 - DNA, 1179 bp, synthetic construct
  misc_feature 1..1179: note = source = /note="Description of Artificial Sequence: Synthetic coding sequence"
  source 1..1179: mol_type = other DNA
atggccgccctgagacagccccaggtggccgagctgctggccgaggccagaagagccttcagagaggagttcggcgccgagcccgagctggccgtgagcgcccccggcagagtgaacctgatcggcgagcacaccgactacaaccagggcctggtgctgcccatggccctggagctgatgaccgtgctggtgggcagccccagaaaggacggcctggtgagcctgctgaccaccagcgagggcgccgacgagccccagagactgcagttccccctgcccaccgcccagagaagcctggagcccggcacccccagatgggccaactacgtgaagggcgtgatccagtactaccccgccgcccccctgcccggcttcagcgccgtggtggtgagcagcgtgcccctgggcggcggcctgagcagcagcgccagcctggaggtggccacctacaccttcctgcagcagctgtgccccgacagcggcaccatcgccgccagagcccaggtgtgccagcaggccgagcacagcttcgccggcatgccctgcggcatcatggaccagttcatcagcctgatgggccagaagggccacgccctgctgatcgactgcagaagcctggagaccagcctggtgcccctgagcgaccccaagctggccgtgctgatcaccaacagcaacgtgagacacagcctggccagcagcgagtaccccgtgagaagaagacagtgcgaggaggtggccagagccctgggcaaggagagcctgagagaggtgcagctggaggagctggaggccgccagagacctggtgagcaaggagggcttcagaagagccagacacgtggtgggcgagatcagaagaaccgcccaggccgccgccgccctgagaagaggcgactacagagccttcggcagactgatggtggagagccacagaagcctgagagacgactacgaggtgagctgccccgagctggaccagctggtggaggccgccctggccgtgcccggcgtgtacggcagcagaatgaccggcggcggcttcggcggctgcaccgtgaccctgctggaggccagcgccgccccccacgccatgagacacatccaggagcactacggcggcaccgccaccttctacctgagccaggccgccgacggcgccaaggtgctgtgcctgtag

SEQ ID NO: 1896 - DNA, 1569 bp, synthetic construct
  misc_feature 1..1569: note = source = /note="Description of Artificial Sequence: Synthetic coding sequence"
  source 1..1569: mol_type = other DNA
atggccgccgtggtggccgccaccagatggtggcagctgctgctggtgctgagcgccgccggcatgggcgccagcggcgccccccagccccccaacatcctgctgctgctgatggacgacatgggctggggcgacctgggcgtgtacggcgagcccagcagagagacccccaacctggacagaatggccgccgagggcctgctgttccccaacttctacagcgccaaccccctgtgcagccccagcagagccgccctgctgaccggcagactgcccatcagaaacggcttctacaccaccaacgcccacgccagaaacgcctacaccccccaggagatcgtgggcggcatccccgacagcgagcagctgctgcccgagctgctgaagaaggccggctacgtgagcaagatcgtgggcaagtggcacctgggccacagaccccagttccaccccctgaagcacggcttcgacgagtggttcggcagccccaactgccacttcggcccctacgacaacaaggccagacccaacatccccgtgtacagagactgggagatggtgggcagatactacgaggagttccccatcaacctgaagaccggcgaggccaacctgacccagatctacctgcaggaggccctggacttcatcaagagacaggccagacaccaccccttcttcctgtactgggccgtggacgccacccacgcccccgtgtacgccagcaagcccttcctgggcaccagccagagaggcagatacggcgacgccgtgagagagatcgacgacagcatcggcaagatcctggagctgctgcaggacctgcacgtggccgacaacaccttcgtgttcttcaccagcgacaacggcgccgccctgatcagcgcccccgagcagggcggcagcaacggccccttcctgtgcggcaagcagaccaccttcgagggcggcatgagagagcccgccctggcctggtggcccggccacgtgaccgccggccaggtgagccaccagctgggcagcatcatggacctgttcaccaccagcctggccctggccggcctgaccccccccagcgacagagccatcgacggcctgaacctgctgcccaccctgctgcagggcagactgatggacagacccatcttctactacagaggcgacaccctgatggccgccaccctgggccagcacaaggcccacttctggacctggaccaacagctgggagaacttcagacagggcatcgacttctgccccggccagaacgtgagcggcgtgaccacccacaacctggaggaccacaccaagctgcccctgatcttccacctgggcagagaccccggcgagagattccccctgagcttcgccagcgccgagtaccaggaggccctgagcagaatcaccagcgtggtgcagcagcaccaggaggccctggtgcccgcccagccccagctgaacgtgtgcaactgggccgtgatgaactgggccccccccggctgcgagaagctgggcaagtgcctgaccccccccgagagcatccccaagaagtgcctgtggagccactag

SEQ ID NO: 1897 - DNA, 261 bp, synthetic construct
  misc_feature 1..261: note = source = /note="Description of Artificial Sequence: Synthetic coding sequence"
  source 1..261: mol_type = other DNA
atggccgccgtggtggccgccaccagatggtggcagctgctgctggtgctgagcgccgccggcatgggcgccagcggcgccccccagccccccaacatcctgctgctgctgatggacgacagaggcagacactgcagccaggacggctaccccagcgccatggccagcaccccccccacccccatgcccgagacccccacccacagaagaagactgtgggccgccagccagaccagaagcagcagctgcagaagcttctag

SEQ ID NO: 1898 - DNA, 1344 bp, synthetic construct
  misc_feature 1..1344: note = source = /note="Description of Artificial Sequence: Synthetic coding sequence"
  source 1..1344: mol_type = other DNA
atggccgccgtggtggccgccaccagatggtggcagctgctgctggtgctgagcgccgccggcatgggcgccagcggcgcccccggccagagagcctacaccccccaggagatcgtgggcggcatccccgacagcgagcagctgctgcccgagctgctgaagaaggccggctacgtgagcaagatcgtgggcaagtggcacctgggccacagaccccagttccaccccctgaagcacggcttcgacgagtggttcggcagccccaactgccacttcggcccctacgacaacaaggccagacccaacatccccgtgtacagagactgggagatggtgggcagatactacgaggagttccccatcaacctgaagaccggcgaggccaacctgacccagatctacctgcaggaggccctggacttcatcaagagacaggccagacaccaccccttcttcctgtactgggccgtggacgccacccacgcccccgtgtacgccagcaagcccttcctgggcaccagccagagaggcagatacggcgacgccgtgagagagatcgacgacagcatcggcaagatcctggagctgctgcaggacctgcacgtggccgacaacaccttcgtgttcttcaccagcgacaacggcgccgccctgatcagcgcccccgagcagggcggcagcaacggccccttcctgtgcggcaagcagaccaccttcgagggcggcatgagagagcccgccctggcctggtggcccggccacgtgaccgccggccaggtgagccaccagctgggcagcatcatggacctgttcaccaccagcctggccctggccggcctgaccccccccagcgacagagccatcgacggcctgaacctgctgcccaccctgctgcagggcagactgatggacagacccatcttctactacagaggcgacaccctgatggccgccaccctgggccagcacaaggcccacttctggacctggaccaacagctgggagaacttcagacagggcatcgacttctgccccggccagaacgtgagcggcgtgaccacccacaacctggaggaccacaccaagctgcccctgatcttccacctgggcagagaccccggcgagagattccccctgagcttcgccagcgccgagtaccaggaggccctgagcagaatcaccagcgtggtgcagcagcaccaggaggccctggtgcccgcccagccccagctgaacgtgtgcaactgggccgtgatgaactgggccccccccggctgcgagaagctgggcaagtgcctgaccccccccgagagcatccccaagaagtgcctgtggagccactag

SEQ ID NO: 1899 - DNA, 1140 bp, synthetic construct
  misc_feature 1..1140: note = source = /note="Description of Artificial Sequence: Synthetic coding sequence"
  source 1..1140: mol_type = other DNA
atgagcagaagcggcaccgacccccagcagagacagcaggccagcgaggccgacgccgccgccgccaccttcagagccaacgaccaccagcacatcagatacaaccccctgcaggacgagtgggtgctggtgagcgcccacagaatgaagagaccctggcagggccaggtggagccccagctgctgaagaccgtgcccagacacgaccccctgaaccccctgtgccccggcgccatcagagccaacggcgaggtgaacccccagtacgacagcaccttcctgttcgacaacgacttccccgccctgcagcccgacgcccccagccccggccccagcgaccaccccctgttccaggccaagagcgccagaggcgtgtgcaaggtgatgtgcttccacccctggagcgacgtgaccctgcccctgatgagcgtgcccgagatcagagccgtggtggacgcctgggccagcgtgaccgaggagctgggcgcccagtacccctgggtgcagatcttcgagaacaagggcgccatgatgggctgcagcaacccccacccccactgccaggtgtgggccagcagcttcctgcccgacatcgcccagagagaggagagaagccagcaggcctacaagagccagcacggcgagcccctgctgatggagtacagcagacaggagctgctgagaaaggagagactggtgctgaccagcgagcactggctggtgctggtgcccttctgggccacctggccctaccagaccctgctgctgcccagaagacacgtgagaagactgcccgagctgacccccgccgagagagacgacctggccagcatcatgaagaagctgctgaccaagtacgacaacctgttcgagaccagcttcccctacagcatgggctggcacggcgcccccaccggcagcgaggccggcgccaactggaaccactggcagctgcacgcccactactacccccccctgctgagaagcgccaccgtgagaaagttcatggtgggctacgagatgctggcccaggcccagagagacctgacccccgagcaggccgccgagagactgagagccctgcccgaggtgcactaccacctgggccagaaggacagagagaccgccaccatcgcctag

SEQ ID NO: 1900 - DNA, 813 bp, synthetic construct
  misc_feature 1..813: note = source = /note="Description of Artificial Sequence: Synthetic coding sequence"
  source 1..813: mol_type = other DNA
atgaccctgagcaccctgtgcgtgctgggccccagcgagcccaccgagagcaaggtgatgtgcttccacccctggagcgacgtgaccctgcccctgatgagcgtgcccgagatcagagccgtggtggacgcctgggccagcgtgaccgaggagctgggcgcccagtacccctgggtgcagatcttcgagaacaagggcgccatgatgggctgcagcaacccccacccccactgccaggtgtgggccagcagcttcctgcccgacatcgcccagagagaggagagaagccagcaggcctacaagagccagcacggcgagcccctgctgatggagtacagcagacaggagctgctgagaaaggagagactggtgctgaccagcgagcactggctggtgctggtgcccttctgggccacctggccctaccagaccctgctgctgcccagaagacacgtgagaagactgcccgagctgacccccgccgagagagacgacctggccagcatcatgaagaagctgctgaccaagtacgacaacctgttcgagaccagcttcccctacagcatgggctggcacggcgcccccaccggcagcgaggccggcgccaactggaaccactggcagctgcacgcccactactacccccccctgctgagaagcgccaccgtgagaaagttcatggtgggctacgagatgctggcccaggcccagagagacctgacccccgagcaggccgccgagagactgagagccctgcccgaggtgcactaccacctgggccagaaggacagagagaccgccaccatcgcctag

SEQ ID NO: 1901 - DNA, 255 bp, synthetic construct
  misc_feature 1..255: note = source = /note="Description of Artificial Sequence: Synthetic coding sequence"
  source 1..255: mol_type = other DNA
atgagcagaagcggcaccgacccccagcagagacagcaggccagcgaggccgacgccgccgccgccaccttcagagccaacgaccaccagcacatcagatacaaccccctgcaggacgagtgggtgctggtgagcgcccacagaatgaagagaccctggcagggccaggtggagccccagctgctgaagaccgtgcccagacacgaccccctgaaccccctgtgccccggcgccatcagagccaacggcgagtag

SEQ ID NO: 1902 - DNA, 2229 bp, synthetic construct
  misc_feature 1..2229: note = source = /note="Description of Artificial Sequence: Synthetic coding sequence"
  source 1..2229: mol_type = other DNA
atgagcccccagaagagagtgaagaacgtgcaggcccagaacagaaccagccagggcagcagcagcttccagaccaccctgagcgcctggaaggtgaagcaggaccccagcaacagcaagaacatcagcaagcacggccagaacaaccccgtgggcgactacgagcacgccgacgaccaggccgaggaggacgccctgcagatggccgtgggctacttcgagaagggccccatcaaggccagccagaacaaggacaagaccctggagaagcacctgaagaccgtggagaacgtggcctggaagaacggcctggccagcgaggagatcgacatcctgctgaacatcgccctgagcggcaagttcggcaacgccgtgaacaccagaatcctgaagtgcatgatccccgccaccgtgatcagcgaggacagcgtggtgaaggccgtgagctggctgtgcgtgggcaagtgcagcggcagcaccaaggtgctgttctacagatggctggtggccatgttcgacttcatcgacagaaaggagcagatcaacctgctgtacggcttcttcttcgccagcctgcaggacgacgccctgtgcccctacgtgtgccacctgctgtacctgctgaccaagaaggagaacgtgaagcccttcagagtgagaaagctgctggacctgcaggccaagatgggcatgcagccccacctgcaggccctgctgagcctgtacaagttcttcgcccccgccctgatcagcgtgagcctgcccgtgagaaagaagatctacttcaagaacagcgagaacctgtggaagaccgccctgctggccgtgaagcagagaaacagaggccccagccccgagcccctgaagctgatgctgggccccgccaacgtgagacccctgaagagaaagtggaacagcctgagcgtgatccccgtgctgaacagcagcagctacaccaaggagtgcggcaagaaggagatgagcctgagcgactgcctgaacagaagcggcagcttccccctggagcagctgcagagcttcccccagctgctgcagaacatccactgcctggagctgcccagccagatgggcagcgtgctgaacaacagcctgctgctgcactacatcaactgcgtgagagacgagcccgtgctgctgagattctactactggctgagccagaccctgcaggaggagtgcatctggtacaaggtgaacaactacgagcacggcaaggagttcaccaacttcctggacaccatcatcagagccgagtgcttcctgcaggagggcttctacagctgcgaggccttcctgtacaagagcctgcccctgtgggacggcctgtgctgcagaagccagttcctgcagctggtgagctggatccccttcagcagcttcagcgaggtgaagcccctgctgttcgaccacctggcccagctgttcttcaccagcaccatctacttcaagtgcagcgtgctgcagagcctgaaggagctgctgcagaactggctgctgtggctgagcatggacatccacatgaagcccgtgaccaacagccccctggagaccaccctgggcggcagcatgaacagcgtgagcaagctgatccactacgtgggctggctgagcaccaccgccatgagactggagagcaacaacaccttcctgctgcacttcatcctggacttctacgagaaggtgtgcgacatctacatcaactacaacctgcccctggtggtgctgttcccccccggcatcttctacagcgccctgctgagcctggacaccagcatcctgaaccagctgtgcttcatcatgcacagatacagaaagaacctgaccgccgccaagaagaacgagctggtgcagaagaccaagagcgagttcaacttcagcagcaagacctaccaggagttcaaccactacctgaccagcatggtgggctgcctgtggaccagcaagcccttcggcaagggcatctacatcgaccccgagatcctggagaagaccggcgtggccgagtacaagaacagcctgaacgtggtgcaccaccccagcttcctgagctacgccgtgagcttcctgctgcagggcaagaagtggagctggtacctggactacctgttcagccagggcctgcagggcctgaagctgttcatcagaagcagcgtgcaccacagcagcatccccagagccgagggcatcaactgcaacaaccagtactag

SEQ ID NO: 1903 - DNA, 636 bp, synthetic construct
  misc_feature 1..636: note = source = /note="Description of Artificial Sequence: Synthetic coding sequence"
  source 1..636: mol_type = other DNA
atgaagctgtgggacgtggtggccgtgtgcctggtgctgctgcacaccgccagcgccttccccctgcccgccggcaagagaccccccgaggcccccgccgaggacagaagcctgggcagaagaagagcccccttcgccctgagcagcgacagcaacatgcccgaggactaccccgaccagttcgacgacgtgatggacttcatccaggccaccatcaagagactgaagagaagccccgacaagcagatggccgtgctgcccagaagagagagaaacagacaggccgccgccgccaaccccgagaacagcagaggcaagggcagaagaggccagagaggcaagaacagaggctgcgtgctgaccgccatccacctgaacgtgaccgacctgggcctgggctacgagaccaaggaggagctgatcttcagatactgcagcggcagctgcgacgccgccgagaccacctacgacaagatcctgaagaacctgagcagaaacagaagactggtgagcgacaaggtgggccaggcctgctgcagacccatcgccttcgacgacgacctgagcttcctggacgacaacctggtgtaccacatcctgagaaagcacagcgccaagagatgcggctgcatctag

SEQ ID NO: 1904 - DNA, 558 bp, synthetic construct
  misc_feature 1..558: note = source = /note="Description of Artificial Sequence: Synthetic coding sequence"
  source 1..558: mol_type = other DNA
atgaagctgtgggacgtggtggccgtgtgcctggtgctgctgcacaccgccagcgccttccccctgcccgccgccaacatgcccgaggactaccccgaccagttcgacgacgtgatggacttcatccaggccaccatcaagagactgaagagaagccccgacaagcagatggccgtgctgcccagaagagagagaaacagacaggccgccgccgccaaccccgagaacagcagaggcaagggcagaagaggccagagaggcaagaacagaggctgcgtgctgaccgccatccacctgaacgtgaccgacctgggcctgggctacgagaccaaggaggagctgatcttcagatactgcagcggcagctgcgacgccgccgagaccacctacgacaagatcctgaagaacctgagcagaaacagaagactggtgagcgacaaggtgggccaggcctgctgcagacccatcgccttcgacgacgacctgagcttcctggacgacaacctggtgtaccacatcctgagaaagcacagcgccaagagatgcggctgcatctag

SEQ ID NO: 1905 - DNA, 687 bp, synthetic construct
  misc_feature 1..687: note = source = /note="Description of Artificial Sequence: Synthetic coding sequence"
  source 1..687: mol_type = other DNA
atgcagagcctgcccaacagcaacggcgccgccgccggcagagacttcaagatgaagctgtgggacgtggtggccgtgtgcctggtgctgctgcacaccgccagcgccttccccctgcccgccggcaagagaccccccgaggcccccgccgaggacagaagcctgggcagaagaagagcccccttcgccctgagcagcgacagcaacatgcccgaggactaccccgaccagttcgacgacgtgatggacttcatccaggccaccatcaagagactgaagagaagccccgacaagcagatggccgtgctgcccagaagagagagaaacagacaggccgccgccgccaaccccgagaacagcagaggcaagggcagaagaggccagagaggcaagaacagaggctgcgtgctgaccgccatccacctgaacgtgaccgacctgggcctgggctacgagaccaaggaggagctgatcttcagatactgcagcggcagctgcgacgccgccgagaccacctacgacaagatcctgaagaacctgagcagaaacagaagactggtgagcgacaaggtgggccaggcctgctgcagacccatcgccttcgacgacgacctgagcttcctggacgacaacctggtgtaccacatcctgagaaagcacagcgccaagagatgcggctgcatctag

SEQ ID NO: 1906 - DNA, 186 bp, synthetic construct
  misc_feature 1..186: note = source = /note="Description of Artificial Sequence: Synthetic coding sequence"
  source 1..186: mol_type = other DNA
atgaagctgtgggacgtggtggccgtgtgcctggtgctgctgcacaccgccagcgccttccccctgcccgccgccaacatgcccgaggactaccccgaccagttcgacgacgtgatggacttcatccaggccaccatcaagagactgaagagaagccccgacaagcagatggccgtgctgccctag

SEQ ID NO: 1907 - DNA, 186 bp, synthetic construct; identical to SEQ ID NO: 1906
  misc_feature 1..186: note = source = /note="Description of Artificial Sequence: Synthetic coding sequence"
  source 1..186: mol_type = other DNA

SEQ ID NO: 1908 - DNA, 558 bp, synthetic construct; identical to SEQ ID NO: 1904
  misc_feature 1..558: note = source = /note="Description of Artificial Sequence: Synthetic coding sequence"
  source 1..558: mol_type = other DNA

SEQ ID NO: 1909 - DNA, 609 bp, synthetic construct
  misc_feature 1..609: note = source = /note="Description of Artificial Sequence: Synthetic coding sequence"
  source 1..609: mol_type = other DNA
atgcagagcctgcccaacagcaacggcgccgccgccggcagagacttcaagatgaagctgtgggacgtggtggccgtgtgcctggtgctgctgcacaccgccagcgccttccccctgcccgccgccaacatgcccgaggactaccccgaccagttcgacgacgtgatggacttcatccaggccaccatcaagagactgaagagaagccccgacaagcagatggccgtgctgcccagaagagagagaaacagacaggccgccgccgccaaccccgagaacagcagaggcaagggcagaagaggccagagaggcaagaacagaggctgcgtgctgaccgccatccacctgaacgtgaccgacctgggcctgggctacgagaccaaggaggagctgatcttcagatactgcagcggcagctgcgacgccgccgagaccacctacgacaagatcctgaagaacctgagcagaaacagaagactggtgagcgacaaggtgggccaggcctgctgcagacccatcgccttcgacgacgacctgagcttcctggacgacaacctggtgtaccacatcctgagaaagcacagcgccaagagatgcggctgcatctag

SEQ ID NO: 1910 - DNA, 543 bp, synthetic construct
  misc_feature 1..543: note = source = /note="Description of Artificial Sequence: Synthetic coding sequence"
  source 1..543: mol_type = other DNA
atgaagagcatctacttcgtggccggcctgttcgtgatgctggtgcagggcagctggcagagaagcctgcaggacaccgaggagaagagcagaagcttcagcgccagccaggccgaccccctgagcgaccccgaccagatgaacgaggacaagagacacagccagggcaccttcaccagcgactacagcaagtacctggacagcagaagagcccaggacttcgtgcagtggctgatgaacaccaagagaaacagaaacaacatcgccaagagacacgacgagttcgagagacacgccgagggcaccttcaccagcgacgtgagcagctacctggagggccaggccgccaaggagttcatcgcctggctggtgaagggcagaggcagaagagacttccccgaggaggtggccatcgtggaggagctgggcagaagacacgccgacggcagcttcagcgacgagatgaacaccatcctggacaacctggccgccagagacttcatcaactggctgatccagaccaagatcaccgacagaaagtag

SEQ ID NO: 1911 - DNA, 543 bp, synthetic construct; identical to SEQ ID NO: 1910
  misc_feature 1..543: note = source = /note="Description of Artificial Sequence: Synthetic coding sequence"
  source 1..543: mol_type = other DNA

SEQ ID NO: 1912 - DNA, 2262 bp, synthetic construct
  misc_feature 1..2262: note = source = /note="Description of Artificial Sequence: Synthetic coding sequence"
  source 1..2262: mol_type = other DNA
agagcccccgacagaagaggcagccccagactggccagcaccagactgggcgccctgagactgagacccagcagaagagtgcccgccagagcccccgcccccgcccaggcccccctgcccctgggccccagactgctgggcctgagaagaaacatggccgcccccatgacccccgccgccagacccgaggactacgaggccgccctgaacgccgccctggccgacgtgcccgagctggccagactgctggagatcgacccctacctgaagccctacgccgtggacttccagagaagatacaagcagttcagccagatcctgaagaacatcggcgagaacgagggcggcatcgacaagttcagcagaggctacgagagcttcggcgtgcacagatgcgccgacggcggcctgtactgcaaggagtgggcccccggcgccgagggcgtgttcctgaccggcgacttcaacggctggaaccccttcagctacccctacaagaagctggactacggcaagtgggagctgtacatcccccccaagcagaacaagagcgtgctggtgccccacggcagcaagctgaaggtggtgatcaccagcaagagcggcgagatcctgtacagaatcagcccctgggccaagtacgtggtgagagagggcgacaacgtgaactacgactggatccactgggaccccgagcacagctacgagttcaagcacagcagacccaagaagcccagaagcctgagaatctacgagagccacgtgggcatcagcagccacgagggcaaggtggccagctacaagcacttcacctgcaacgtgctgcccagaatcaagggcctgggctacaactgcatccagctgatggccatcatggagcacgcctactacgccagcttcggctaccagatcaccagcttcttcgccgccagcagcagatacggcacccccgaggagctgcaggagctggtggacaccgcccacagcatgggcatcatcgtgctgctggacgtggtgcacagccacgccagcaagaacagcgccgacggcctgaacatgttcgacggcaccgacagctgctacttccacagcggccccagaggcacccacgacctgtgggacagcagactgttcgcctacagcagctgggagatcctgagattcctgctgagcaacatcagatggtggctggaggagtacagattcgacggcttcagattcgacggcgtgaccagcatgctgtaccaccaccacggcgtgggccagggcttcagcggcgactacagcgagtacttcggcctgcaggtggacgaggacgccctgacctacctgatgctggccaaccacctggtgcacaccctgtgccccgacagcatcaccatcgccgaggacgtgagcggcatgcccgccctgtgcagccccatcagccagggcggcggcggcttcgactacagactggccatggccatccccgacaagtggatccagctgctgaaggagttcaaggacgaggactggaacatgggcgacatcgtgtacaccctgaccaacagaagatacctggagaagtgcatcgcctacgccgagagccacgaccaggccctggtgggcgacaagagcctggccttctggctgatggacgccgagatgtacaccaacatgagcgtgctgacccccttcacccccgtgatcgacagaggcatccagctgcacaagatgatcagactgatcacccacggcctgggcggcgagggctacctgaacttcatgggcaacgagttcggccaccccgagtggctggacttccccagaaagggcaacaacgagagctaccactacgccagaagacagttccacctgaccgacgacgacctgctgagatacaagttcctgaacaacttcgacagagacatgaacagactggaggagagatacggctggctggccgccccccaggcctacgtgagcgagaagcacgagggcaacaagatcatcgccttcgagagagccggcctgctgttcatcttcaacttccaccccagcaagagctacaccgactacagagtgggcaccgccctgcccggcaagttcaagatcgtgctggacagcgacgccgccgagtacggcggccaccagagactggaccacagcaccgacttcttcagcgaggccttcgagcacaacggcagaccctacagcctgctggtgtacatccccagcagagtggccctgatcctgcagaacgtggacctgcccaactag

SEQ ID NO: 1913 - DNA, 2109 bp, synthetic construct
  misc_feature 1..2109: note = source = /note="Description of Artificial Sequence: Synthetic coding sequence"
  source 1..2109: mol_type = other DNA
atggccgcccccatgacccccgccgccagacccgaggactacgaggccgccctgaacgccgccctggccgacgtgcccgagctggccagactgctggagatcgacccctacctgaagccctacgccgtggacttccagagaagatacaagcagttcagccagatcctgaagaacatcggcgagaacgagggcggcatcgacaagttcagcagaggctacgagagcttcggcgtgcacagatgcgccgacggcggcctgtactgcaaggagtgggcccccggcgccgagggcgtgttcctgaccggcgacttcaacggctggaaccccttcagctacccctacaagaagctggactacggcaagtgggagctgtacatcccccccaagcagaacaagagcgtgctggtgccccacggcagcaagctgaaggtggtgatcaccagcaagagcggcgagatcctgtacagaatcagcccctgggccaagtacgtggtgagagagggcgacaacgtgaactacgactggatccactgggaccccgagcacagctacgagttcaagcacagcagacccaagaagcccagaagcctgagaatctacgagagccacgtgggcatcagcagccacgagggcaaggtggccagctacaagcacttcacctgcaacgtgctgcccagaatcaagggcctgggctacaactgcatccagctgatggccatcatggagcacgcctactacgccagcttcggctaccagatcaccagcttcttcgccgccagcagcagatacggcacccccgaggagctgcaggagctggtggacaccgcccacagcatgggcatcatcgtgctgctggacgtggtgcacagccacgccagcaagaacagcgccgacggcctgaacatgttcgacggcaccgacagctgctacttccacagcggccccagaggcacccacgacctgtgggacagcagactgttcgcctacagcagctgggagatcctgagattcctgctgagcaacatcagatggtggctggaggagtacagattcgacggcttcagattcgacggcgtgaccagcatgctgtaccaccaccacggcgtgggccagggcttcagcggcgactacagcgagtacttcggcctgcaggtggacgaggacgccctgacctacctgatgctggccaaccacctggtgcacaccctgtgccccgacagcatcaccatcgccgaggacgtgagcggcatgcccgccctgtgcagccccatcagccagggcggcggcggcttcgactacagactggccatggccatccccgacaagtggatccagctgctgaaggagttcaaggacgaggactggaacatgggcgacatcgtgtacaccctgaccaacagaagatacctggagaagtgcatcgcctacgccgagagccacgaccaggccctggtgggcgacaagagcctggccttctggctgatggacgccgagatgtacaccaacatgagcgtgctgacccccttcacccccgtgatcgacagaggcatccagctgcacaagatgatcagactgatcacccacggcctgggcggcgagggctacctgaacttcatgggcaacgagttcggccaccccgagtggctggacttccccagaaagggcaacaacgagagctaccactacgccagaagacagttccacctgaccgacgacgacctgctgagatacaagttcctgaacaacttcgacagagacatgaacagactggaggagagatacggctggctggccgccccccaggcctacgtgagcgagaagcacgagggcaacaagatcatcgccttcgagagagccggcctgctgttcatcttcaacttccaccccagcaagagctacaccgactacagagtgggcaccgccctgcccggcaagttcaagatcgtgctggacagcgacgccgccgagtacggcggccaccagagactggaccacagcaccgacttcttcagcgaggccttcgagcacaacggcagaccctacagcctgctggtgtacatccccagcagagtggccctgatcctgcagaacgtggacctgcccaactag

SEQ ID NO: 1914 - DNA, 1398 bp, synthetic construct
  misc_feature 1..1398: note = source = /note="Description of Artificial Sequence: Synthetic coding sequence"
  source 1..1398: mol_type = other DNA
atggccatcatggagcacgcctactacgccagcttcggctaccagatcaccagcttcttcgccgccagcagcagatacggcacccccgaggagctgcaggagctggtggacaccgcccacagcatgggcatcatcgtgctgctggacgtggtgcacagccacgccagcaagaacagcgccgacggcctgaacatgttcgacggcaccgacagctgctacttccacagcggccccagaggcacccacgacctgtgggacagcagactgttcgcctacagcagctgggagatcctgagattcctgctgagcaacatcagatggtggctggaggagtacagattcgacggcttcagattcgacggcgtgaccagcatgctgtaccaccaccacggcgtgggccagggcttcagcggcgactacagcgagtacttcggcctgcaggtggacgaggacgccctgacctacctgatgctggccaaccacctggtgcacaccctgtgccccgacagcatcaccatcgccgaggacgtgagcggcatgcccgccctgtgcagccccatcagccagggcggcggcggcttcgactacagactggccatggccatccccgacaagtggatccagctgctgaaggagttcaaggacgaggactggaacatgggcgacatcgtgtacaccctgaccaacagaagatacctggagaagtgcatcgcctacgccgagagccacgaccaggccctggtgggcgacaagagcctggccttctggctgatggacgccgagatgtacaccaacatgagcgtgctgacccccttcacccccgtgatcgacagaggcatccagctgcacaagatgatcagactgatcacccacggcctgggcggcgagggctacctgaacttcatgggcaacgagttcggccaccccgagtggctggacttccccagaaagggcaacaacgagagctaccactacgccagaagacagttccacctgaccgacgacgacctgctgagatacaagttcctgaacaacttcgacagagacatgaacagactggaggagagatacggctggctggccgccccccaggcctacgtgagcgagaagcacgagggcaacaagatcatcgccttcgagagagccggcctgctgttcatcttcaacttccaccccagcaagagctacaccgactacagagtgggcaccgccctgcccggcaagttcaagatcgtgctggacagcgacgccgccgagtacggcggccaccagagactggaccacagcaccgacttcttcagcgaggccttcgagcacaacggcagaccctacagcctgctggtgtacatccccagcagagtggccctgatcctgcagaacgtggacctgcccaactag

SEQ ID NO: 1915 - DNA, 1074 bp, synthetic construct
  misc_feature 1..1074: note = source = /note="Description of Artificial Sequence: Synthetic coding sequence"
  source 1..1074: mol_type = other DNA
atggaggagggcatgaacgtgctgcacgacttcggcatccagagcacccactacctgcaggtgaactaccaggacagccaggactggttcatcctggtgagcgtgatcgccgacctgagaaacgccttctacgtgctgttccccatctggttccacctgcaggaggccgtgggcatcaagctgctgtgggtggccgtgatcggcgactggctgaacctggtgttcaagtggatcctgttcggccagagaccctactggtgggtgctggacaccgactactacagcaacaccagcgtgcccctgatcaagcagttccccgtgacctgcgagaccggccccggcagccccagcggccacgccatgggcaccgccggcgtgtactacgtgatggtgaccagcaccctgagcatcttccagggcaagatcaagcccacctacagattcagatgcctgaacgtgatcctgtggctgggcttctgggccgtgcagctgaacgtgtgcctgagcagaatctacctggccgcccacttcccccaccaggtggtggccggcgtgctgagcggcatcgccgtggccgagaccttcagccacatccacagcatctacaacgccagcctgaagaagtacttcctgatcaccttcttcctgttcagcttcgccatcggcttctacctgctgctgaagggcctgggcgtggacctgctgtggaccctggagaaggcccagagatggtgcgagcagcccgagtgggtgcacatcgacaccacccccttcgccagcctgctgaagaacctgggcaccctgttcggcctgggcctggccctgaacagcagcatgtacagagagagctgcaagggcaagctgagcaagtggctgcccttcagactgagcagcatcgtggccagcctggtgctgctgcacgtgttcgacagcctgaagccccccagccaggtggagctggtgttctacgtgctgagcttctgcaagagcgccgtggtgcccctggccagcgtgagcgtgatcccctactgcctggcccaggtgctgggccagccccacaagaagagcctgtag

SEQ ID NO: 1916 - DNA, 2859 bp, synthetic construct
  misc_feature 1..2859: note = source = /note="Description of Artificial Sequence: Synthetic coding sequence"
  source 1..2859: mol_type = other DNA
atgggcgtgagacaccccccctgcagccacagactgctggccgtgtgcgccctggtgagcctggccaccgccgccctgctgggccacatcctgctgcacgacttcctgctggtgcccagagagctgagcggcagcagccccgtgctggaggagacccaccccgcccaccagcagggcgccagcagacccggccccagagacgcccaggcccaccccggcagacccagagccgtgcccacccagtgcgacgtgccccccaacagcagattcgactgcgcccccgacaaggccatcacccaggagcagtgcgaggccagaggctgctgctacatccccgccaagcagggcctgcagggcgcccagatgggccagccctggtgcttcttcccccccagctaccccagctacaagctggagaacctgagcagcagcgagatgggctacaccgccaccctgaccagaaccacccccaccttcttccccaaggacatcctgaccctgagactggacgtgatgatggagaccgagaacagactgcacttcaccatcaaggaccccgccaacagaagatacgaggtgcccctggagaccccccacgtgcacagcagagcccccagccccctgtacagcgtggagttcagcgaggagcccttcggcgtgatcgtgagaagacagctggacggcagagtgctgctgaacaccaccgtggcccccctgttcttcgccgaccagttcctgcagctgagcaccagcctgcccagccagtacatcaccggcctggccgagcacctgagccccctgatgctgagcaccagctggaccagaatcaccctgtggaacagagacctggcccccacccccggcgccaacctgtacggcagccaccccttctacctggccctggaggacggcggcagcgcccacggcgtgttcctgctgaacagcaacgccatggacgtggtgctgcagcccagccccgccctgagctggagaagcaccggcggcatcctggacgtgtacatcttcctgggccccgagcccaagagcgtggtgcagcagtacctggacgtggtgggctaccccttcatgcccccctactggggcctgggcttccacctgtgcagatggggctacagcagcaccgccatcaccagacaggtggtggagaacatgaccagagcccacttccccctggacgtgcagtggaacgacctggactacatggacagcagaagagacttcaccttcaacaaggacggcttcagagacttccccgccatggtgcaggagctgcaccagggcggcagaagatacatgatgatcgtggaccccgccatcagcagcagcggccccgccggcagctacagaccctacgacgagggcctgagaagaggcgtgttcatcaccaacgagaccggccagcccctgatcggcaaggtgtggcccggcagcaccgccttccccgacttcaccaaccccaccgccctggcctggtgggaggacatggtggccgagttccacgaccaggtgcccttcgacggcatgtggatcgacatgaacgagcccagcaacttcatcagaggcagcgaggacggctgccccaacaacgagctggagaaccccccctacgtgcccggcgtggtgggcggcaccctgcaggccgccaccatctgcgccagcagccaccagttcctgagcacccactacaacctgcacaacctgtacggcctgaccgaggccatcgccagccacagagccctggtgaaggccagaggcaccagacccttcgtgatcagcagaagcaccttcgccggccacggcagatacgccggccactggaccggcgacgtgtggagcagctgggagcagctggccagcagcgtgcccgagatcctgcagttcaacctgctgggcgtgcccctggtgggcgccgacgtgtgcggcttcctgggcaacaccagcgaggagctgtgcgtgagatggacccagctgggcgccttctaccccttcatgagaaaccacaacagcctgctgagcctgccccaggagccctacagcttcagcgagcccgcccagcaggccatgagaaaggccctgaccctgagatacgccctgctgccccacctgtacaccctgttccaccaggcccacgtggccggcgagaccgtggccagacccctgttcctggagttccccaaggacagcagcacctggaccgtggaccaccagctgctgtggggcgaggccctgctgatcacccccgtgctgcaggccggcaaggccgaggtgaccggctacttccccctgggcacctggtacgacctgcagaccgtgcccgtggaggccctgggcagcctgccccccccccccgccgcccccagagagcccgccatccacagcgagggccagtgggtgaccctgcccgcccccctggacaccatcaacgtgcacctgagagccggctacatcatccccctgcagggccccggcctgaccaccaccgagagcagacagcagcccatggccctggccgtggccctgaccaagggcggcgaggccagaggcgagctgttctgggacgacggcgagagcctggaggtgctggagagaggcgcctacacccaggtgatcttcctggccagaaacaacaccatcgtgaacgagctggtgagagtgaccagcgagggcgccggcctgcagctgcagaaggtgaccgtgctgggcgtggccaccgccccccagcaggtgctgagcaacggcgtgcccgtgagcaacttcacctacagccccgacaccaaggtgctggacatctgcgtgagcctgctgatgggcgagcagttcctggtgagctggtgctag

SEQ ID NO: 1917 - DNA, 2859 bp, synthetic construct; identical to SEQ ID NO: 1916
  misc_feature 1..2859: note = source = /note="Description of Artificial Sequence: Synthetic coding sequence"
  source 1..2859: mol_type = other DNA

SEQ ID NO: 1918 - DNA, 1611 bp, synthetic construct
  misc_feature 1..1611: note = source = /note="Description of Artificial Sequence: Synthetic coding sequence"
  source 1..1611: mol_type = other DNA
atggagttcagcagccccagcagagaggagtgccccaagcccctgagcagagtgagcatcatggccggcagcctgaccggcctgctgctgctgcaggccgtgagctgggccagcggcgccagaccctgcatccccaagagcttcggctacagcagcgtggtgtgcgtgtgcaacgccacctactgcgacagcttcgacccccccaccttccccgccctgggcaccttcagcagatacgagagcaccagaagcggcagaagaatggagctgagcatgggccccatccaggccaaccacaccggcaccggcctgctgctgaccctgcagcccgagcagaagttccagaaggtgaagggcttcggcggcgccatgaccgacgccgccgccctgaacatcctggccctgagcccccccgcccagaacctgctgctgaagagctacttcagcgaggagggcatcggctacaacatcatcagagtgcccatggccagctgcgacttcagcatcagaacctacacctacgccgacacccccgacgacttccagctgcacaacttcagcctgcccgaggaggacaccaagctgaagatccccctgatccacagagccctgcagctggcccagagacccgtgagcctgctggccagcccctggaccagccccacctggctgaagaccaacggcgccgtgaacggcaagggcagcctgaagggccagcccggcgacatctaccaccagacctgggccagatacttcgtgaagttcctggacgcctacgccgagcacaagctgcagttctgggccgtgaccgccgagaacgagcccagcgccggcctgctgagcggctaccccttccagtgcctgggcttcacccccgagcaccagagagacttcatcgccagagacctgggccccaccctggccaacagcacccaccacaacgtgagactgctgatgctggacgaccagagactgctgctgccccactgggccaaggtggtgctgaccgaccccgaggccgccaagtacgtgcacggcatcgccgtgcactggtacctggacttcctggcccccgccaaggccaccctgggcgagacccacagactgttccccaacaccatgctgttcgccagcgaggcctgcgtgggcagcaagttctgggagcagagcgtgagactgggcagctgggacagaggcatgcagtacagccacagcatcatcaccaacctgctgtaccacgtggtgggctggaccgactggaacctggccctgaaccccgagggcggccccaactgggtgagaaacttcgtggacagccccatcatcgtggacatcaccaaggacaccttctacaagcagcccatgttctaccacctgggccacttcagcaagttcatccccgagggcagccagagagtgggcctggtggccagccagaagaacgacctggacgccgtggccctgatgcaccccgacggcagcgccgtggtggtggtgctgaacagaagcagcaaggacgtgcccctgaccatcaaggaccccgccgtgggcttcctggagaccatcagccccggctacagcatccacacctacctgtggagaagacagtag

SEQ ID NO: 1919 - DNA, 1611 bp, synthetic construct; identical to SEQ ID NO: 1918
  misc_feature 1..1611: note = source = /note="Description of Artificial Sequence: Synthetic coding sequence"
  source 1..1611: mol_type = other DNA

SEQ ID NO: 1920 - DNA, 1566 bp, synthetic construct
  misc_feature 1..1566: note = source = /note="Description of Artificial Sequence: Synthetic coding sequence"
  source 1..1566: mol_type = other DNA
atggagttcagcagccccagcagagaggagtgccccaagcccctgagcagagtgagcatcatggccggcagcctgaccggcctgctgctgctgcaggccgtgagctgggccagcggcgccagaccctgcatccccaagagcttcggctacagcagcgtggtgtgcgtgtgcaacgccacctactgcgacagcttcgacccccccaccttccccgccctgggcaccttcagcagatacgagagcaccagaagcggcagaagaatggagctgagcatgggccccatccaggccaaccacaccggcaccggcctgctgctgaccctgcagcccgacgccgccgccctgaacatcctggccctgagcccccccgcccagaacctgctgctgaagagctacttcagcgaggagggcatcggctacaacatcatcagagtgcccatggccagctgcgacttcagcatcagaacctacacctacgccgacacccccgacgacttccagctgcacaacttcagcctgcccgaggaggacaccaagctgaagatccccctgatccacagagccctgcagctggcccagagacccgtgagcctgctggccagcccctggaccagccccacctggctgaagaccaacggcgccgtgaacggcaagggcagcctgaagggccagcccggcgacatctaccaccagacctgggccagatacttcgtgaagttcctggacgcctacgccgagcacaagctgcagttctgggccgtgaccgccgagaacgagcccagcgccggcctgctgagcggctaccccttccagtgcctgggcttcacccccgagcaccagagagacttcatcgccagagacctgggccccaccctggccaacagcacccaccacaacgtgagactgctgatgctggacgaccagagactgctgctgccccactgggccaaggtggtgctgaccgaccccgaggccgccaagtacgtgcacggcatcgccgtgcactggtacctggacttcctggcccccgccaaggccaccctgggcgagacccacagactgttccccaacaccatgctgttcgccagcgaggcctgcgtgggcagcaagttctgggagcagagcgtgagactgggcagctgggacagaggcatgcagtacagccacagcatcatcaccaacctgctgtaccacgtggtgggctggaccgactggaacctggccctgaaccccgagggcggccccaactgggtgagaaacttcgtggacagccccatcatcgtggacatcaccaaggacaccttctacaagcagcccatgttctaccacctgggccacttcagcaagttcatccccgagggcagccagagagtgggcctggtggccagccagaagaacgacctggacgccgtggccctgatgcaccccgacggcagcgccgtggtggtggtgctgaacagaagcagcaaggacgtgcccctgaccatcaaggaccccgccgtgggcttcctggagaccatcagccccggctacagcatccacacctacctgtggagaagacagtag

SEQ ID NO: 1921 - DNA, 1464 bp, synthetic construct
  misc_feature 1..1464: note = source = /note="Description of Artificial Sequence: Synthetic coding sequence"
  source 1..1464: mol_type = other DNA
atggagttcagcagccccagcagagaggagtgccccaagcccctgagcagagtgagcatcatggccggcagcctgaccggcctgctgctgctgcaggccgtgagctgggccagcggcgccagaccctgcatccccaagagcttcggctacagcagcgtggtgtgcgtgtgcaacgccacctactgcgacagcttcgacccccccaccttccccgccctgggcaccttcagcagatacgagagcaccagaagcggcagaagaatggagctgagcatgggccccatccaggccaaccacaccggcaccggcatcggctacaacatcatcagagtgcccatggccagctgcgacttcagcatcagaacctacacctacgccgacacccccgacgacttccagctgcacaacttcagcctgcccgaggaggacaccaagctgaagatccccctgatccacagagccctgcagctggcccagagacccgtgagcctgctggccagcccctggaccagccccacctggctgaagaccaacggcgccgtgaacggcaagggcagcctgaagggccagcccggcgacatctaccaccagacctgggccagatacttcgtgaagttcctggacgcctacgccgagcacaagctgcagttctgggccgtgaccgccgagaacgagcccagcgccggcctgctgagcggctaccccttccagtgcctgggcttcacccccgagcaccagagagacttcatcgccagagacctgggccccaccctggccaacagcacccaccacaacgtgagactgctgatgctggacgaccagagactgctgctgccccactgggccaaggtggtgctgaccgaccccgaggccgccaagtacgtgcacggcatcgccgtgcactggtacctggacttcctggcccccgccaaggccaccctgggcgagacccacagactgttccccaacaccatgctgttcgccagcgaggcctgcgtgggcagcaagttctgggagcagagcgtgagactgggcagctgggacagaggcatgcagtacagccacagcatcatcaccaacctgctgtaccacgtggtgggctggaccgactggaacctggccctgaaccccgagggcggccccaactgggtgagaaacttcgtggacagccccatcatcgtggacatcaccaaggacaccttctacaagcagcccatgttctaccacctgggccacttcagcaagttcatccccgagggcagccagagagtgggcctggtggccagccagaagaacgacctggacgccgtggccctgatgcaccccgacggcagcgccgtggtggtggtgctgaacagaagcagcaaggacgtgcccctgaccatcaaggaccccgccgtgggcttcctggagaccatcagccccggctacagcatccacacctacctgtggagaagacagtag

SEQ ID NO: 1922 - DNA, 1350 bp, synthetic construct
  misc_feature 1..1350: note = source = /note="Description of Artificial Sequence: Synthetic coding sequence"
  source 1..1350: mol_type = other DNA
atggagctgagcatgggccccatccaggccaaccacaccggcaccggcctgctgctgaccctgcagcccgagcagaagttccagaaggtgaagggcttcggcggcgccatgaccgacgccgccgccctgaacatcctggccctgagcccccccgcccagaacctgctgctgaagagctacttcagcgaggagggcatcggctacaacatcatcagagtgcccatggccagctgcgacttcagcatcagaacctacacctacgccgacacccccgacgacttccagctgcacaacttcagcctgcccgaggaggacaccaagctgaagatccccctgatccacagagccctgcagctggcccagagacccgtgagcctgctggccagcccctggaccagccccacctggctgaagaccaacggcgccgtgaacggcaagggcagcctgaagggccagcccggcgacatctaccaccagacctgggccagatacttcgtgaagttcctggacgcctacgccgagcacaagctgcagttctgggccgtgaccgccgagaacgagcccagcgccggcctgctgagcggctaccccttccagtgcctgggcttcacccccgagcaccagagagacttcatcgccagagacctgggccccaccctggccaacagcacccaccacaacgtgagactgctgatgctggacgaccagagactgctgctgccccactgggccaaggtggtgctgaccgaccccgaggccgccaagtacgtgcacggcatcgccgtgcactggtacctggacttcctggcccccgccaaggccaccctgggcgagacccacagactgttccccaacaccatgctgttcgccagcgaggcctgcgtgggcagcaagttctgggagcagagcgtgagactgggcagctgggacagaggcatgcagtacagccacagcatcatcaccaacctgctgtaccacgtggtgggctggaccgactggaacctggccctgaaccccgagggcggccccaactgggtgagaaacttcgtggacagccccatcatcgtggacatcaccaaggacaccttctacaagcagcccatgttctaccacctgggccacttcagcaagttcatccccgagggcagccagagagtgggcctggtggccagccagaagaacgacctggacgccgtggccctgatgcaccccgacggcagcgccgtggtggtggtgctgaacagaagcagcaaggacgtgcccctgaccatcaaggaccccgccgtgggcttcctggagaccatcagccccggctacagcatccacacctacctgtggagaagacagtag

SEQ ID NO: 1923 - DNA, 1482 bp, synthetic construct
  misc_feature 1..1482: note = source = /note="Description of Artificial Sequence: Synthetic coding sequence"
  source 1..1482: mol_type = other DNA
atgaccctgagaggctggagcttccaggtgctgcccgagagcaacgccacctactgcgacagcttcgacccccccaccttccccgccctgggcaccttcagcagatacgagagcaccagaagcggcagaagaatggagctgagcatgggccccatccaggccaaccacaccggcaccggcctgctgctgaccctgcagcccgagcagaagttccagaaggtgaagggcttcggcggcgccatgaccgacgccgccgccctgaacatcctggccctgagcccccccgcccagaacctgctgctgaagagctacttcagcgaggagggcatcggctacaacatcatcagagtgcccatggccagctgcgacttcagcatcagaacctacacctacgccgacacccccgacgacttccagctgcacaacttcagcctgcccgaggaggacaccaagctgaagatccccctgatccacagagccctgcagctggcccagagacccgtgagcctgctggccagcccctggaccagccccacctggctgaagaccaacggcgccgtgaacggcaagggcagcctgaagggccagcccggcgacatctaccaccagacctgggccagatacttcgtgaagttcctggacgcctacgccgagcacaagctgcagttctgggccgtgaccgccgagaacgagcccagcgccggcctgctgagcggctaccccttccagtgcctgggcttcacccccgagcaccagagagacttcatcgccagagacctgggccccaccctggccaacagcacccaccacaacgtgagactgctgatgctggacgaccagagactgctgctgccccactgggccaaggtggtgctgaccgaccccgaggccgccaagtacgtgcacggcatcgccgtgcactggtacctggacttcctggcccccgccaaggccaccctgggcgagacccacagactgttccccaacaccatgctgttcgccagcgaggcctgcgtgggcagcaagttctgggagcagagcgtgagactgggcagctgggacagaggcatgcagtacagccacagcatcatcaccaacctgctgtaccacgtggtgggctggaccgactggaacctggccctgaaccccgagggcggccccaactgggtgagaaacttcgtggacagccccatcatcgtggacatcaccaaggacaccttctacaagcagcccatgttctaccacctgggccacttcagcaagttcatccccgagggcagccagagagtgggcctggtggccagccagaagaacgacctggacgccgtggccctgatgcaccccgacggcagcgccgtggtggtggtgctgaacagaagcagcaaggacgtgcccctgaccatcaaggaccccgccgtgggcttcctggagaccatcagccccggctacagcatccacacctacctgtggagaagacagtag

SEQ ID NO: 1924 - DNA, 1272 bp, synthetic construct
  misc_feature 1..1272: note = source = /note="Description of Artificial Sequence: Synthetic coding sequence"
  source 1..1272: mol_type = other DNA
atggagttcagcagccccagcagagaggagtgccccaagcccctgagcagagtgagcatcatggccggcagcctgaccggcctgctgctgctgcaggccgtgagctgggccagcggcatcggctacaacatcatcagagtgcccatggccagctgcgacttcagcatcagaacctacacctacgccgacacccccgacgacttccagctgcacaacttcagcctgcccgaggaggacaccaagctgaagatccccctgatccacagagccctgcagctggcccagagacccgtgagcctgctggccagcccctggaccagccccacctggctgaagaccaacggcgccgtgaacggcaagggcagcctgaagggccagcccggcgacatctaccaccagacctgggccagatacttcgtgaagttcctggacgcctacgccgagcacaagctgcagttctgggccgtgaccgccgagaacgagcccagcgccggcctgctgagcggctaccccttccagtgcctgggcttcacccccgagcaccagagagacttcatcgccagagacctgggccccaccctggccaacagcacccaccacaacgtgagactgctgatgctggacgaccagagactgctgctgccccactgggccaaggtggtgctgaccgaccccgaggccgccaagtacgtgcacggcatcgccgtgcactggtacctggacttcctggcccccgccaaggccaccctgggcgagacccacagactgttccccaacaccatgctgttcgccagcgaggcctgcgtgggcagcaagttctgggagcagagcgtgagactgggcagctgggacagaggcatgcagtacagccacagcatcatcaccaacctgctgtaccacgtggtgggctggaccgactggaacctggccctgaaccccgagggcggccccaactgggtgagaaacttcgtggacagccccatcatcgtggacatcaccaaggacaccttctacaagcagcccatgttctaccacctgggccacttcagcaagttcatccccgagggcagccagagagtgggcctggtggccagccagaagaacgacctggacgccgtggccctgatgcaccccgacggcagcgccgtggtggtggtgctgaacagaagcagcaaggacgtgcccctgaccatcaaggaccccgccgtgggcttcctggagaccatcagccccggctacagcatccacacctacctgtggagaagacagtag

SEQ ID NO: 1925 - DNA, 2112 bp, synthetic construct
  misc_feature 1..2112: note = source = /note="Description of Artificial Sequence: Synthetic coding sequence"
  source 1..2112: mol_type = other DNA
atgctgagaggcagaagcctgagcgtgaccagcctgggcggcctgccccagtgggaggtggaggagctgcccgtggaggagctgctgctgttcgaggtggcctgggaggtgaccaacaaggtgggcggcatctacaccgtgatccagaccaaggccaagaccaccgccgacgagtggggcgagaactacttcctgatcggcccctacttcgagcacaacatgaagacccaggtggagcagtgcgagcccgtgaacgacgccgtgagaagagccgtggacgccatgaacaagcacggctgccaggtgcacttcggcagatggctgatcgagggcagcccctacgtggtgctgttcgacatcggctacagcgcctggaacctggacagatggaagggcgacctgtgggaggcctgcagcgtgggcatcccctaccacgacagagaggccaacgacatgctgatcttcggcagcctgaccgcctggttcctgaaggaggtgaccgaccacgccgacggcaagtacgtggtggcccagttccacgagtggcaggccggcatcggcctgatcctgagcagagccagaaagctgcccatcgccaccatcttcaccacccacgccaccctgctgggcagatacctgtgcgccgccaacatcgacttctacaaccacctggacaagttcaacatcgacaaggaggccggcgagagacagatctaccacagatactgcatggagagagccagcgtgcactgcgcccacgtgttcaccaccgtgagcgagatcaccgccatcgaggccgagcacatgctgaagagaaagcccgacgtggtgacccccaacggcctgaacgtgaagaagttcagcgccgtgcacgagttccagaacctgcacgccatgtacaaggccagaatccaggacttcgtgagaggccacttctacggccacctggacttcgacctggagaagaccctgttcctgttcatcgccggcagatacgagttcagcaacaagggcgccgacatcttcctggagagcctgagcagactgaacttcctgctgagaatgcacaagagcgacatcaccgtgatggtgttcttcatcatgcccgccaagaccaacaacttcaacgtggagaccctgaagggccaggccgtgagaaagcagctgtgggacgtggcccacagcgtgaaggagaagttcggcaagaagctgtacgacgccctgctgagaggcgagatccccgacctgaacgacatcctggacagagacgacctgaccatcatgaagagagccatcttcagcacccagagacagagcctgccccccgtgaccacccacaacatgatcgacgacagcaccgaccccatcctgagcaccatcagaagaatcggcctgttcaacaacagaaccgacagagtgaaggtgatcctgcaccccgagttcctgagcagcaccagccccctgctgcccatggactacgaggagttcgtgagaggctgccacctgggcgtgttccccagctactacgagccctggggctacacccccgccgagtgcaccgtgatgggcatccccagcgtgaccaccaacctgagcggcttcggctgcttcatgcaggagcacgtggccgaccccaccgcctacggcatctacatcgtggacagaagattcagaagccccgacgacagctgcaaccagctgaccaagttcctgtacggcttctgcaagcagagcagaagacagagaatcatccagagaaacagaaccgagagactgagcgacctgctggactggagatacctgggcagatactaccagcacgccagacacctgaccctgagcagagccttccccgacaagttccacgtggagctgaccagcccccccaccaccgagggcttcaagtaccccagacccagcagcgtgccccccagccccagcggcagccaggccagcagcccccagagcagcgacgtggaggacgaggtggaggacgagagatacgacgaggaggaggaggccgagagagacagactgaacatcaagagccccttcagcctgagccacgtgccccacggcaagaagaagctgcacggcgagtacaagaactag

SEQ ID NO: 1926 - DNA, 351 bp, synthetic construct
  misc_feature 1..351: note = source = /note="Description of Artificial Sequence: Synthetic coding sequence"
  source 1..351: mol_type = other DNA
atggactactacagaaagtacgccgccatcttcctggtgaccctgagcgtgttcctgcacgtgctgcacagcgcccccgacgtgcaggactgccccgagtgcaccctgcaggagaaccccttcttcagccagcccggcgcccccatcctgcagtgcatgggctgctgcttcagcagagcctaccccacccccctgagaagcaagaagaccatgctggtgcagaagaacgtgaccagcgagagcacctgctgcgtggccaagagctacaacagagtgaccgtgatgggcggcttcaaggtggagaaccacaccgcctgccactgcagcacctgctactaccacaagagctag

SEQ ID NO: 1927 - DNA, 654 bp, synthetic construct
  misc_feature 1..654: note = source = /note="Description of Artificial Sequence: Synthetic coding sequence"
  source 1..654: mol_type = other DNA
atggccaccggcagcagaaccagcctgctgctggccttcggcctgctgtgcctgccctggctgcaggagggcagcgccttccccaccatccccctgagcagactgttcgacaacgccatgctgagagcccacagactgcaccagctggccttcgacacctaccaggagttcgaggaggcctacatccccaaggagcagaagtacagcttcctgcagaacccccagaccagcctgtgcttcagcgagagcatccccacccccagcaacagagaggagacccagcagaagagcaacctggagctgctgagaatcagcctgctgctgatccagagctggctggagcccgtgcagttcctgagaagcgtgttcgccaacagcctggtgtacggcgccagcgacagcaacgtgtacgacctgctgaaggacctggaggagggcatccagaccctgatgggcagactggaggacggcagccccagaaccggccagatcttcaagcagacctacagcaagttcgacaccaacagccacaacgacgacgccctgctgaagaactacggcctgctgtactgcttcagaaaggacatggacaaggtggagaccttcctgagaatcgtgcagtgcagaagcgtggagggcagctgcggcttctag

SEQ ID NO: 1928 - DNA, 369 bp, synthetic construct
  misc_feature 1..369: note = source = /note="Description of Artificial Sequence: Synthetic coding sequence"
  source 1..369: mol_type = other DNA
atggccaccggcagcagaaccagcctgctgctggccttcggcctgctgtgcctgccctggctgcaggagggcagcgccttccccaccatccccctgagcagactgttcgacaacgccatgctgagagcccacagactgcaccagctggccttcgacacctaccaggagttcagactggaggacggcagccccagaaccggccagatcttcaagcagacctacagcaagttcgacaccaacagccacaacgacgacgccctgctgaagaactacggcctgctgtactgcttcagaaaggacatggacaaggtggagaccttcctgagaatcgtgcagtgcagaagcgtggagggcagctgcggcttctag

SEQ ID NO: 1929 - DNA, 534 bp, synthetic construct
  misc_feature 1..534: note = source = /note="Description of Artificial Sequence: Synthetic coding sequence"
  source 1..534: mol_type = other DNA
atggccaccggcagcagaaccagcctgctgctggccttcggcctgctgtgcctgccctggctgcaggagggcagcgccttccccaccatccccctgagcagactgttcgacaacgccatgctgagagcccacagactgcaccagctggccttcgacacctaccaggagttcaacctggagctgctgagaatcagcctgctgctgatccagagctggctggagcccgtgcagttcctgagaagcgtgttcgccaacagcctggtgtacggcgccagcgacagcaacgtgtacgacctgctgaaggacctggaggagggcatccagaccctgatgggcagactggaggacggcagccccagaaccggccagatcttcaagcagacctacagcaagttcgacaccaacagccacaacgacgacgccctgctgaagaactacggcctgctgtactgcttcagaaaggacatggacaaggtggagaccttcctgagaatcgtgcagtgcagaagcgtggagggcagctgcggcttctag

SEQ ID NO: 1930 - DNA, 609 bp, synthetic construct
  misc_feature 1..609: note = source = /note="Description of Artificial Sequence: Synthetic coding sequence"
  source 1..609: mol_type = other DNA
atggccaccggcagcagaaccagcctgctgctggccttcggcctgctgtgcctgccctggctgcaggagggcagcgccttccccaccatccccctgagcagactgttcgacaacgccatgctgagagcccacagactgcaccagctggccttcgacacctaccaggagttcaacccccagaccagcctgtgcttcagcgagagcatccccacccccagcaacagagaggagacccagcagaagagcaacctggagctgctgagaatcagcctgctgctgatccagagctggctggagcccgtgcagttcctgagaagcgtgttcgccaacagcctggtgtacggcgccagcgacagcaacgtgtacgacctgctgaaggacctggaggagggcatccagaccctgatgggcagactggaggacggcagccccagaaccggccagatcttcaagcagacctacagcaagttcgacaccaacagccacaacgacgacgccctgctgaagaactacggcctgctgtactgcttcagaaaggacatggacaaggtggagaccttcctgagaatcgtgcagtgcagaagcgtggagggcagctgcggcttctag

SEQ ID NO: 1931 - DNA, 771 bp, synthetic construct
  misc_feature 1..771: note = source = /note="Description of Artificial Sequence: Synthetic coding sequence"
  source 1..771: mol_type = other DNA
atggccgccggcagcagaaccagcctgctgctggccttcggcctgctgtgcctgagctggctgcaggagggcagcgccttccccaccatccccctgagcagactgttcgacaacgccatgctgagagccagaagactgtaccagctggcctacgacacctaccaggagttcgaggaggcctacatcctgaaggagcagaagtacagcttcctgcagaacccccagaccagcctgtgcttcagcgagagcatccccacccccagcaacagagtgaagacccagcagaagagcaacctggagctgctgagaatcagcctgctgctgatccagagctggctggagcccgtgcagctgctgagaagcgtgttcgccaacagcctggtgtacggcgccagcgacagcaacgtgtacagacacctgaaggacctggaggagggcatccagaccctgatgtgggtgagagtggcccccggcatccccaaccccggcgcccccctggccagcagagactggggcgagaagcactgctgccccctgttcagcagccaggccctgacccaggagaacagcccctacagcagcttccccctggtgaacccccccggcctgagcctgcagcccggcggcgagggcggcaagtggatgaacgagagaggcagagagcagtgccccagcgcctggcccctgctgctgttcctgcacttcgccgaggccggcagatggcagccccccgactgggccgacctgcagagcgtgctgcagcaggtgtag

SEQ ID NO: 1932 - DNA, 654 bp, synthetic construct
  misc_feature 1..654: note = source = /note="Description of Artificial Sequence: Synthetic coding sequence"
  source 1..654: mol_type = other DNA
atggccgccggcagcagaaccagcctgctgctggccttcggcctgctgtgcctgagctggctgcaggagggcagcgccttccccaccatccccctgagcagactgttcgacaacgccatgctgagagccagaagactgtaccagctggcctacgacacctaccaggagttcgaggaggcctacatcctgaaggagcagaagtacagcttcctgcagaacccccagaccagcctgtgcttcagcgagagcatccccacccccagcaacagagtgaagacccagcagaagagcaacctggagctgctgagaatcagcctgctgctgatccagagctggctggagcccgtgcagctgctgagaagcgtgttcgccaacagcctggtgtacggcgccagcgacagcaacgtgtacagacacctgaaggacctggaggagggcatccagaccctgatgtggagactggaggacggcagccccagaaccggccagatcttcaaccagagctacagcaagttcgacaccaagagccacaacgacgacgccctgctgaagaactacggcctgctgtactgcttcagaaaggacatggacaaggtggagaccttcctgagaatcgtgcagtgcagaagcgtggagggcagctgcggcttctag

SEQ ID NO: 1933 - DNA, 609 bp, synthetic construct
  misc_feature 1..609: note = source = /note="Description of Artificial Sequence: Synthetic coding sequence"
  source 1..609: mol_type = other DNA
atggccgccggcagcagaaccagcctgctgctggccttcggcctgctgtgcctgagctggctgcaggagggcagcgccttccccaccatccccctgagcagactgttcgacaacgccatgctgagagccagaagactgtaccagctggcctacgacacctaccaggagttcaacccccagaccagcctgtgcttcagcgagagcatccccacccccagcaacagagtgaagacccagcagaagagcaacctggagctgctgagaatcagcctgctgctgatccagagctggctggagcccgtgcagctgctgagaagcgtgttcgccaacagcctggtgtacggcgccagcgacagcaacgtgtacagacacctgaaggacctggaggagggcatccagaccctgatgtggagactggaggacggcagccccagaaccggccagatcttcaaccagagctacagcaagttcgacaccaagagccacaacgacgacgccctgctgaagaactacggcctgctgtactgcttcagaaaggacatggacaaggtggagaccttcctgagaatcgtgcagtgcagaagcgtggagggcagctgcggcttctag

SEQ ID NO: 1934 - DNA, 738 bp, synthetic construct
  misc_feature 1..738: note = source = /note="Description of Artificial Sequence: Synthetic coding sequence"
  source 1..738: mol_type = other DNA
atggccgccggcagcagaaccagcctgctgctggccttcggcctgctgtgcctgagctggctgcaggagggcagcgccttccccaccatccccctgagcagactgttcgacaacgccatgctgagagccagaagactgtaccagctggcctacgacacctaccaggagttcgaggaggcctacatcctgaaggagcagaagtacagcttcctgcagaacccccagaccagcctgtgcttcagcgagagcatccccacccccagcaacagagtgaagacccagcagaagagcaacctggagctgctgagaatcagcctgctgctgatccagagctggctggagcccgtgcagctgctgagaagcgtgttcgccaacagcctggtgtacggcgccagcgacagcaacgtgtacagacacctgaaggacctggaggagggcatccagaccctgatcggctggaagatggccgcccccggcctgggcagaagcagcatcagccccaccgccagcctgacccagaacagaaccaccatgacccactgcagcagaaccaccggctgcagcaccgccagcggcagaacctggaccagaagcagacacagctgcgccagctgcagcgccgccctgtggagagccgccgtggccagcagctgccccggcggcatccccgtgacccccccccagtgcctgagctggagctggaaggtgctgctgcagtgcccccccgccctgagctag

SEQ ID NO: 1935 - DNA, 753 bp, synthetic construct
  misc_feature 1..753: note = source = /note="Description of Artificial Sequence: Synthetic coding sequence"
  source 1..753: mol_type = other DNA
atggagaagggccccgtgagagcccccgccgagaagcccagaggcgccagatgcagcaacggcttccccgagagagacccccccagacccggccccagcagacccgccgagaagccccccagacccgaggccaagagcgcccagcccgccgacggctggaagggcgagagacccagaagcgaggaggacaacgagctgaacctgcccaacctggccgccgcctacagcagcatcctgagcagcctgggcgagaacccccagagacagggcctgctgaagaccccctggagagccgccagcgccatgcagttcttcaccaagggctaccaggagaccatcagcgacgtgctgaacgacgccatcttcgacgaggaccacgacgagatggtgatcgtgaaggacatcgacatgttcagcatgtgcgagcaccacctggtgcccttcgtgggcaaggtgcacatcggctacctgcccaacaagcaggtgctgggcctgagcaagctggccagaatcgtggagatctacagcagaagactgcaggtgcaggagagactgaccaagcagatcgccgtggccatcaccgaggccctgagacccgccggcgtgggcgtggtggtggaggccacccacatgtgcatggtgatgagaggcgtgcagaagatgaacagcaagaccgtgaccagcaccatgctgggcgtgttcagagaggaccccaagaccagagaggagttcctgaccctgatcagaagctag

SEQ ID NO: 1936 - DNA, 693 bp, synthetic construct
  misc_feature 1..693: note = source = /note="Description of Artificial Sequence: Synthetic coding sequence"
  source 1..693: mol_type = other DNA
atggagaagggccccgtgagagcccccgccgagaagcccagaggcgccagatgcagcaacggcttccccgagagagacccccccagacccggccccagcagacccgccgagaagccccccagacccgaggccaagagcgcccagcccgccgacggctggaagggcgagagacccagaagcgaggaggacaacgagctgaacctgcccaacctggccgccgcctacagcagcatcctgagcagcctgggcgagaacccccagagacagggcctgctgaagaccccctggagagccgccagcgccatgcagttcttcaccaagggctaccaggagaccatcagcgacgtgctgaacgacgccatcttcgacgaggaccacgacgagatggtgatcgtgaaggacatcgacatgttcagcatgtgcgagcaccacctggtgcccttcgtgggcaaggtgcacatcggctacctgcccaacaagcaggtgctgggcctgagcaagctggccagaatcgtggagatctacagcagaagactgcaggtgcaggagagactgaccaagcagatcgccgtggccatcaccgaggccctgagacccgccggcgtgggcgtggtggtggaggccaccaagagcaacaagtacaacaagggcctgagctacttcctgctggccaccttcctgtggcagtactag

SEQ ID NO: 1937 - DNA, 753 bp, synthetic construct; identical to SEQ ID NO: 1935
  misc_feature 1..753: note = source = /note="Description of Artificial Sequence: Synthetic coding sequence"
  source 1..753: mol_type = other DNA

SEQ ID NO: 1938 - DNA, 642 bp, synthetic construct
  misc_feature 1..642: note = source = /note="Description of Artificial Sequence: Synthetic coding sequence"
  source 1..642: mol_type = other DNA
atggagaagggccccgtgagagcccccgccgagaagcccagaggcgccagatgcagcaacggcttccccgagagagacccccccagacccggccccagcagacccgccgagaagccccccagacccgaggccaagagcgcccagcccgccgacggctggaagggcgagagacccagaagcgaggaggacaacgagctgaacctgcccaacctggccgccgcctacagcagcatcctgagcagcctgggcgagaacccccagagacagggcctgctgaagaccccctggagagccgccagcgccatgcagttcttcaccaagggctaccaggagaccatcagcgacgtgctgaacgacgccatcttcgacgaggaccacgacgagatggtgatcgtgaaggacatcgacatgttcagcatgtgcgagcaccacctggtgcccttcgtgggcaaggtgcacatcggctacctgcccaacaagcaggtgctgggcctgagcaagctggccagaatcgtggagatctacagcagaagactgcaggtgcaggagagactgaccaagcagatcgccgtggccatcaccgaggccctgagacccgccggcgtgggcgtggtggtggaggccaccagcgccgagccctag

SEQ ID NO: 1939 - DNA, 702 bp, synthetic construct
  misc_feature 1..702: note = source = /note="Description of Artificial Sequence: Synthetic coding sequence"
  source 1..702: mol_type = other DNA
atggagaagggccccgtgagagcccccgccgagaagcccagaggcgccagatgcagcaacggcttccccgagagagacccccccagacccggccccagcagacccgccgagaagccccccagacccgaggccaagagcgcccagcccgccgacggctggaagggcgagagacccagaagcgaggaggacaacgagctgaacctgcccaacctggccgccgcctacagcagcatcctgagcagcctgggcgagaacccccagagacagggcctgctgaagaccccctggagagccgccagcgccatgcagttcttcaccaagggctaccaggagaccatcagcgacgtgctgaacgacgccatcttcgacgaggaccacgacgagatggtgatcgtgaaggacatcgacatgttcagcatgtgcgagcaccacctggtgcccttcgtgggcaaggtgcacatcggctacctgcccaacaagcaggtgctgggcctgagcaagctggccagaatcgtggagatctacagcagaagactgcaggtgcaggagagactgaccaagcagatcgccgtggccatcaccgaggccctgagacccgccggcgtgggcgtggtggtggaggccaccaagagcaacaagtacaacaagggcctgagccccctgctgagcagctgccacctgttcgtggccatcctgaagtag

SEQ ID NO: 1940 - DNA, 1014 bp, synthetic construct
  misc_feature 1..1014: note = source = /note="Description of Artificial Sequence: Synthetic coding sequence"
  source 1..1014: mol_type = other DNA
atgggccccagagccagacccgccctgctgctgctgatgctgctgcagaccgccgtgctgcagggcagactgctgagaagccacagcctgcactacctgttcatgggcgccagcgagcaggacctgggcctgagcctgttcgaggccctgggctacgtggacgaccagctgttcgtgttctacgaccacgagagcagaagagtggagcccagaaccccctgggtgagcagcagaatcagcagccagatgtggctgcagctgagccagagcctgaagggctgggaccacatgttcaccgtggacttctggaccatcatggagaaccacaaccacagcaaggagagccacaccctgcaggtgatcctgggctgcgagatgcaggaggacaacagcaccgagggctactggaagtacggctacgacggccaggaccacctggagttctgccccgacaccctggactggagagccgccgagcccagagcctggcccaccaagctggagtgggagagacacaagatcagagccagacagaacagagcctacctggagagagactgccccgcccagctgcagcagctgctggagctgggcagaggcgtgctggaccagcaggtgccccccctggtgaaggtgacccaccacgtgaccagcagcgtgaccaccctgagatgcagagccctgaactactacccccagaacatcaccatgaagtggctgaaggacaagcagcccatggacgccaaggagttcgagcccaaggacgtgctgcccaacggcgacggcacctaccagggctggatcaccctggccgtgccccccggcgaggagcagagatacacctgccaggtggagcaccccggcctggaccagcccctgatcgtgatctgggagcccagccccagcggcaccctggtgatcggcgtgatcagcggcatcgccgtgttcgtggtgatcctgttcatcggcatcctgttcatcatcctgagaaagagacagggcagcagcttctag

SEQ ID NO: 1941 - DNA, 771 bp, synthetic construct
  misc_feature 1..771: note = source = /note="Description of Artificial Sequence: Synthetic coding sequence"
  source 1..771: mol_type = other DNA
atgggccccagagccagacccgccctgctgctgctgatgctgctgcagaccgccgtgctgcagggcagactgctgagaagccacagcctgcactacctgttcatgggcgccagcgagcaggacctgggcctgagcctgttcgaggccctgggctacgtggacgaccagctgttcgtgttctacgaccacgagagcagaagagtggagcccagaaccccctgggtgagcagcagaatcagcagccagatgtggctgcagctgagccagagcctgaagggctgggaccacatgttcaccgtggacttctggaccatcatggagaaccacaaccacagcaaggtgccccccctggtgaaggtgacccaccacgtgaccagcagcgtgaccaccctgagatgcagagccctgaactactacccccagaacatcaccatgaagtggctgaaggacaagcagcccatggacgccaaggagttcgagcccaaggacgtgctgcccaacggcgacggcacctaccagggctggatcaccctggccgtgccccccggcgaggagcagagatacacctgccaggtggagcaccccggcctggaccagcccctgatcgtgatctgggagcccagccccagcggcaccctggtgatcggcgtgatcagcggcatcgccgtgttcgtggtgatcctgttcatcggcatcctgttcatcatcctgagaaagagacagggcagcagaggcgccatgggccactacgtgctggccgagagagagtag

SEQ ID NO: 1942 - DNA, 729 bp, synthetic construct
  misc_feature 1..729: note = source = /note="Description of Artificial Sequence: Synthetic coding sequence"
  source 1..729: mol_type = other DNA
atgggccccagagccagacccgccctgctgctgctgatgctgctgcagaccgccgtgctgcagggcagactgctgagaagccacagcctgcactacctgttcatgggcgccagcgagcaggacctgggcctgagcctgttcgaggccctgggctacgtggacgaccagctgttcgtgttctacgaccacgagagcagaagagtggagcccagaaccccctgggtgagcagcagaatcagcagccagatgtggctgcagctgagccagagcctgaagggctgggaccacatgttcaccgtggacttctggaccatcatggagaaccacaaccacagcaaggtgaccaccctgagatgcagagccctgaactactacccccagaacatcaccatgaagtggctgaaggacaagcagcccatggacgccaaggagttcgagcccaaggacgtgctgcccaacggcgacggcacctaccagggctggatcaccctggccgtgccccccggcgaggagcagagatacacctgccaggtggagcaccccggcctggaccagcccctgatcgtgatctgggagcccagccccagcggcaccctggtgatcggcgtgatcagcggcatcgccgtgttcgtggtgatcctgttcatcggcatcctgttcatcatcctgagaaagagacagggcagcagaggcgccatgggccactacgtgctggccgagagagagtag

SEQ ID NO: 1943 - DNA, 783 bp, synthetic construct
  misc_feature 1..783: note = source = /note="Description of Artificial Sequence: Synthetic coding sequence"
  source 1..783: mol_type = other DNA
atgggccccagagccagacccgccctgctgctgctgatgctgctgcagaccgccgtgctgcagggcagactgctgcagagccacaccctgcaggtgatcctgggctgcgagatgcaggaggacaacagcaccgagggctactggaagtacggctacgacggccaggaccacctggagttctgccccgacaccctggactggagagccgccgagcccagagcctggcccaccaagctggagtgggagagacacaagatcagagccagacagaacagagcctacctggagagagactgccccgcccagctgcagcagctgctggagctgggcagaggcgtgctggaccagcaggtgccccccctggtgaaggtgacccaccacgtgaccagcagcgtgaccaccctgagatgcagagccctgaactactacccccagaacatcaccatgaagtggctgaaggacaagcagcccatggacgccaaggagttcgagcccaaggacgtgctgcccaacggcgacggcacctaccagggctggatcaccctggccgtgccccccggcgaggagcagagatacacctgccaggtggagcaccccggcctggaccagcccctgatcgtgatctgggagcccagccccagcggcaccctggtgatcggcgtgatcagcggcatcgccgtgttcgtggtgatcctgttcatcggcatcctgttcatcatcctgagaaagagacagggcagcagaggcgccatgggccactacgtgctggccgagagagagtag

SEQ ID NO: 1944 - DNA, 231 bp, synthetic construct
  misc_feature 1..231: note = source = /note="Description of Artificial Sequence: Synthetic coding sequence"
  source 1..231: mol_type = other DNA
atgggccccagagccagacccgccctgctgctgctgatgctgctgcagaccgccgtgctgcagggcagactgctgcagcccagccccagcggcaccctggtgatcggcgtgatcagcggcatcgccgtgttcgtggtgatcctgttcatcggcatcctgttcatcatcctgagaaagagacagggcagcagaggcgccatgggccactacgtgctggccgagagagagtag

SEQ ID NO: 1945 - DNA, 507 bp, synthetic construct
  misc_feature 1..507: note = source = /note="Description of Artificial Sequence: Synthetic coding sequence"
  source 1..507: mol_type = other DNA
atgggccccagagccagacccgccctgctgctgctgatgctgctgcagaccgccgtgctgcagggcagactgctgctgccccccctggtgaaggtgacccaccacgtgaccagcagcgtgaccaccctgagatgcagagccctgaactactacccccagaacatcaccatgaagtggctgaaggacaagcagcccatggacgccaaggagttcgagcccaaggacgtgctgcccaacggcgacggcacctaccagggctggatcaccctggccgtgccccccggcgaggagcagagatacacctgccaggtggagcaccccggcctggaccagcccctgatcgtgatctgggagcccagccccagcggcaccctggtgatcggcgtgatcagcggcatcgccgtgttcgtggtgatcctgttcatcggcatcctgttcatcatcctgagaaagagacagggcagcagaggcgccatgggccactacgtgctggccgagagagagtag

SEQ ID NO: 1946 - DNA, 1047 bp, synthetic construct
  misc_feature 1..1047: note = source = /note="Description of Artificial Sequence: Synthetic coding sequence"
  source 1..1047: mol_type = other DNA
atgggccccagagccagacccgccctgctgctgctgatgctgctgcagaccgccgtgctgcagggcagactgctgagaagccacagcctgcactacctgttcatgggcgccagcgagcaggacctgggcctgagcctgttcgaggccctgggctacgtggacgaccagctgttcgtgttctacgaccacgagagcagaagagtggagcccagaaccccctgggtgagcagcagaatcagcagccagatgtggctgcagctgagccagagcctgaagggctgggaccacatgttcaccgtggacttctggaccatcatggagaaccacaaccacagcaaggagagccacaccctgcaggtgatcctgggctgcgagatgcaggaggacaacagcaccgagggctactggaagtacggctacgacggccaggaccacctggagttctgccccgacaccctggactggagagccgccgagcccagagcctggcccaccaagctggagtgggagagacacaagatcagagccagacagaacagagcctacctggagagagactgccccgcccagctgcagcagctgctggagctgggcagaggcgtgctggaccagcaggtgccccccctggtgaaggtgacccaccacgtgaccagcagcgtgaccaccctgagatgcagagccctgaactactacccccagaacatcaccatgaagtggctgaaggacaagcagcccatggacgccaaggagttcgagcccaaggacgtgctgcccaacggcgacggcacctaccagggctggatcaccctggccgtgccccccggcgaggagcagagatacacctgccaggtggagcaccccggcctggaccagcccctgatcgtgatctgggagcccagccccagcggcaccctggtgatcggcgtgatcagcggcatcgccgtgttcgtggtgatcctgttcatcggcatcctgttcatcatcctgagaaagagacagggcagcagaggcgccatgggccactacgtgctggccgagagagagtag

SEQ ID NO: 1947 - DNA, 978 bp, synthetic construct
  misc_feature 1..978: note = source = /note="Description of Artificial Sequence: Synthetic coding sequence"
  source 1..978: mol_type = other DNA
atgggccccagagccagacccgccctgctgctgctgatgctgctgcagaccgccgtgctgcagggcagactgctgcccctgggctacgtggacgaccagctgttcgtgttctacgaccacgagagcagaagagtggagcccagaaccccctgggtgagcagcagaatcagcagccagatgtggctgcagctgagccagagcctgaagggctgggaccacatgttcaccgtggacttctggaccatcatggagaaccacaaccacagcaaggagagccacaccctgcaggtgatcctgggctgcgagatgcaggaggacaacagcaccgagggctactggaagtacggctacgacggccaggaccacctggagttctgccccgacaccctggactggagagccgccgagcccagagcctggcccaccaagctggagtgggagagacacaagatcagagccagacagaacagagcctacctggagagagactgccccgcccagctgcagcagctgctggagctgggcagaggcgtgctggaccagcaggtgccccccctggtgaaggtgacccaccacgtgaccagcagcgtgaccaccctgagatgcagagccctgaactactacccccagaacatcaccatgaagtggctgaaggacaagcagcccatggacgccaaggagttcgagcccaaggacgtgctgcccaacggcgacggcacctaccagggctggatcaccctggccgtgccccccggcgaggagcagagatacacctgccaggtggagcaccccggcctggaccagcccctgatcgtgatctgggagcccagccccagcggcaccctggtgatcggcgtgatcagcggcatcgccgtgttcgtggtgatcctgttcatcggcatcctgttcatcatcctgagaaagagacagggcagcagaggcgccatgggccactacgtgctggccgagagagagtag

SEQ ID NO: 1948 - DNA, 1005 bp, synthetic construct
  misc_feature 1..1005: note = source = /note="Description of Artificial Sequence: Synthetic coding sequence"
  source 1..1005: mol_type = other DNA
atgggccccagagccagacccgccctgctgctgctgatgctgctgcagaccgccgtgctgcagggcagactgctgagaagccacagcctgcactacctgttcatgggcgccagcgagcaggacctgggcctgagcctgttcgaggccctgggctacgtggacgaccagctgttcgtgttctacgaccacgagagcagaagagtggagcccagaaccccctgggtgagcagcagaatcagcagccagatgtggctgcagctgagccagagcctgaagggctgggaccacatgttcaccgtggacttctggaccatcatggagaaccacaaccacagcaaggagagccacaccctgcaggtgatcctgggctgcgagatgcaggaggacaacagcaccgagggctactggaagtacggctacgacggccaggaccacctggagttctgccccgacaccctggactggagagccgccgagcccagagcctggcccaccaagctggagtgggagagacacaagatcagagccagacagaacagagcctacctggagagagactgccccgcccagctgcagcagctgctggagctgggcagaggcgtgctggaccagcaggtgaccaccctgagatgcagagccctgaactactacccccagaacatcaccatgaagtggctgaaggacaagcagcccatggacgccaaggagttcgagcccaaggacgtgctgcccaacggcgacggcacctaccagggctggatcaccctggccgtgccccccggcgaggagcagagatacacctgccaggtggagcaccccggcctggaccagcccctgatcgtgatctgggagcccagccccagcggcaccctggtgatcggcgtgatcagcggcatcgccgtgttcgtggtgatcctgttcatcggcatcctgttcatcatcctgagaaagagacagggcagcagaggcgccatgggccactacgtgctggccgagagagagtag

SEQ ID NO: 1949 - DNA, 1038 bp, synthetic construct
  misc_feature 1..1038: note = source = /note="Description of Artificial Sequence: Synthetic coding sequence"
  source 1..1038: mol_type = other DNA
atgggccccagagccagacccgccctgctgctgctgatgctgctgcagaccgccgtgctgcagggcagactgctgagaagccacagcctgcactacctgttcatgggcgccagcgagcaggacctgggcctgagcctgttcgaggccctgggctacgtggacgaccagctgttcgtgttctacgaccacgagagcagaagagtggagcccagaaccccctgggtgagcagcagaatcagcagccagatgtggctgcagctgagccagagcctgaagggctgggaccacatgttcaccgtggacttctggaccatcatggagaaccacaaccacagcaaggagagccacaccctgcaggtgatcctgggctgcgagatgcaggaggacaacagcaccgagggctactggaagtacggctacgacggccaggaccacctggagttctgccccgacaccctggactggagagccgccgagcccagagcctggcccaccaagctggagtgggagagacacaagatcagagccagacagaacagagcctacctggagagagactgccccgcccagctgcagcagctgctggagctgggcagaggcgtgctggaccagcaggagggcagcgagagcagcagcctgcccggcaaggtgaccaccctgagatgcagagccctgaactactacccccagaacatcaccatgaagtggctgaaggacaagcagcccatggacgccaaggagttcgagcccaaggacgtgctgcccaacggcgacggcacctaccagggctggatcaccctggccgtgccccccggcgaggagcagagatacacctgccaggtggagcaccccggcctggaccagcccctgatcgtgatctgggagcccagccccagcggcaccctggtgatcggcgtgatcagcggcatcgccgtgttcgtggtgatcctgttcatcggcatcctgttcatcatcctgagaaagagacagggcagcagaggcgccatgggccactacgtgctggccgagagagagtag

SEQ ID NO: 1950 - DNA, 741 bp, synthetic construct
  misc_feature 1..741: note = source = /note="Description of Artificial Sequence: Synthetic coding sequence"
  source 1..741: mol_type = other DNA
atgggccccagagccagacccgccctgctgctgctgatgctgctgcagaccgccgtgctgcagggcagactgctgcagagccacaccctgcaggtgatcctgggctgcgagatgcaggaggacaacagcaccgagggctactggaagtacggctacgacggccaggaccacctggagttctgccccgacaccctggactggagagccgccgagcccagagcctggcccaccaagctggagtgggagagacacaagatcagagccagacagaacagagcctacctggagagagactgccccgcccagctgcagcagctgctggagctgggcagaggcgtgctggaccagcaggtgaccaccctgagatgcagagccctgaactactacccccagaacatcaccatgaagtggctgaaggacaagcagcccatggacgccaaggagttcgagcccaaggacgtgctgcccaacggcgacggcacctaccagggctggatcaccctggccgtgccccccggcgaggagcagagatacacctgccaggtggagcaccccggcctggaccagcccctgatcgtgatctgggagcccagccccagcggcaccctggtgatcggcgtgatcagcggcatcgccgtgttcgtggtgatcctgttcatcggcatcctgttcatcatcctgagaaagagacagggcagcagaggcgccatgggccactacgtgctggccgagagagagtag

SEQ ID NO: 1951 - DNA, 486 bp, synthetic construct
  misc_feature 1..486: note = source = /note="Description of Artificial Sequence: Synthetic coding sequence"
  source 1..486: mol_type = other DNA
atgggccccagagccagacccgccctgctgctgctgatgctgctgcagaccgccgtgctgcagggcagactgctgagaagccacagcctgcactacctgttcatgggcgccagcgagcaggacctgggcctgagcctgttcgaggccctgggctacgtggacgaccagctgttcgtgttctacgaccacgagagcagaagagtggagcccagaaccccctgggtgagcagcagaatcagcagccagatgtggctgcagctgagccagagcctgaagggctgggaccacatgttcaccgtggacttctggaccatcatggagaaccacaaccacagcaaggagagccacaccctgcaggtgatcctgggctgcgagatgcaggaggacaacagcaccgagggctactggaagtacggctacgacggccaggtgctgcaggacaccatctacagcagcgaggtgagcagcctgggcatcaagttctag

SEQ ID NO: 1952 - DNA, 366 bp, synthetic construct
  misc_feature 1..366: note = source = /note="Description of Artificial Sequence: Synthetic coding sequence"
  source 1..366: mol_type = other DNA
atggagaaccacaaccacagcaaggagagccacaccctgcaggtgatcctgggctgcgagatgcaggaggacaacagcaccgagggctactggaagtacggctacgacggccaggaccacctggagttctgccccgacaccctggactggagagccgccgagcccagagcctggcccaccaagctggagtgggagagacacaagatcagagccagacagaacagagcctacctggagagagactgccccgcccagctgcagcagctgctggagctgggcagaggcgtgctggaccagcaggtgccccccctggtgaaggtgacccaccacgtgagccaccccgcccagcccagcaaggagagctag

SEQ ID NO: 1953 - DNA, 1281 bp, synthetic construct
  misc_feature 1..1281: note = source = /note="Description of Artificial Sequence: Synthetic coding sequence"
  source 1..1281: mol_type = other DNA
atgggcgagcccggccagagccccagccccagaagcagccacggcagcccccccaccctgagcaccctgaccctgctgctgctgctgtgcggccacgcccacagccagtgcaagatcctgagatgcaacgccgagtacgtgagcagcaccctgagcctgagaggcggcggcagcagcggcgccctgagaggcggcggcggcggcggcagaggcggcggcgtgggcagcggcggcctgtgcagagccctgagaagctacgccctgtgcaccagaagaaccgccagaacctgcagaggcgacctggccttccacagcgccgtgcacggcatcgaggacctgatgatccagcacaactgcagcagacagggccccaccgccccccccccccccagaggccccgccctgcccggcgccggcagcggcctgcccgcccccgacccctgcgactacgagggcagattcagcagactgcacggcagaccccccggcttcctgcactgcgccagcttcggcgacccccacgtgagaagcttccaccaccacttccacacctgcagagtgcagggcgcctggcccctgctggacaacgacttcctgttcgtgcaggccaccagcagccccatggccctgggcgccaacgccaccgccaccagaaagctgaccatcatcttcaagaacatgcaggagtgcatcgaccagaaggtgtaccaggccgaggtggacaacctgcccgtggccttcgaggacggcagcatcaacggcggcgacagacccggcggcagcagcctgagcatccagaccgccaaccccggcaaccacgtggagatccaggccgcctacatcggcaccaccatcatcatcagacagaccgccggccagctgagcttcagcatcaaggtggccgaggacgtggccatggccttcagcgccgagcaggacctgcagctgtgcgtgggcggctgcccccccagccagagactgagcagaagcgagagaaacagaagaggcgccatcaccatcgacaccgccagaagactgtgcaaggagggcctgcccgtggaggacgcctacttccacagctgcgtgttcgacgtgctgatcagcggcgaccccaacttcaccgtggccgcccaggccgccctggaggacgccagagccttcctgcccgacctggagaagctgcacctgttccccagcgacgccggcgtgcccctgagcagcgccaccctgctggcccccctgctgagcggcctgttcgtgctgtggctgtgcatccagtag

SEQ ID NO: 1954 - DNA, 942 bp, synthetic construct
  misc_feature 1..942: note = source = /note="Description of Artificial Sequence: Synthetic coding sequence"
  source 1..942: mol_type = other DNA
atgatccagcacaactgcagcagacagggccccaccgccccccccccccccagaggccccgccctgcccggcgccggcagcggcctgcccgcccccgacccctgcgactacgagggcagattcagcagactgcacggcagaccccccggcttcctgcactgcgccagcttcggcgacccccacgtgagaagcttccaccaccacttccacacctgcagagtgcagggcgcctggcccctgctggacaacgacttcctgttcgtgcaggccaccagcagccccatggccctgggcgccaacgccaccgccaccagaaagctgaccatcatcttcaagaacatgcaggagtgcatcgaccagaaggtgtaccaggccgaggtggacaacctgcccgtggccttcgaggacggcagcatcaacggcggcgacagacccggcggcagcagcctgagcatccagaccgccaaccccggcaaccacgtggagatccaggccgcctacatcggcaccaccatcatcatcagacagaccgccggccagctgagcttcagcatcaaggtggccgaggacgtggccatggccttcagcgccgagcaggacctgcagctgtgcgtgggcggctgcccccccagccagagactgagcagaagcgagagaaacagaagaggcgccatcaccatcgacaccgccagaagactgtgcaaggagggcctgcccgtggaggacgcctacttccacagctgcgtgttcgacgtgctgatcagcggcgaccccaacttcaccgtggccgcccaggccgccctggaggacgccagagccttcctgcccgacctggagaagctgcacctgttccccagcgacgccggcgtgcccctgagcagcgccaccctgctggcccccctgctgagcggcctgttcgtgctgtggctgtgcatccagtag

SEQ ID NO: 1955 - DNA, 282 bp, synthetic construct
  misc_feature 1..282: note = source = /note="Description of Artificial Sequence: Synthetic coding sequence"
  source 1..282: mol_type = other DNA
atgggcgagcccggccagagccccagccccagaagcagccacggcagcccccccaccctgagcaccctgaccctgctgctgctgctgtgcggccacgcccacagccagtgcaagatcctgagatgcaacgccgagtacgtgagcagcaccctgagcctgagaggcggcggcagcagcggcgccctgagaggcggcggcggcggcggcagaggcggcggcgtgggcagcggcggcctgtgcagagccctgagaagctacgccctgtgcaccagaagaacctag

SEQ ID NO: 1956 - DNA, 603 bp, synthetic construct
  misc_feature 1..603: note = source = /note="Description of Artificial Sequence: Synthetic coding sequence"
  source 1..603: mol_type = other DNA
atgcaggagtgcatcgaccagaaggtgtaccaggccgaggtggacaacctgcccgtggccttcgaggacggcagcatcaacggcggcgacagacccggcggcagcagcctgagcatccagaccgccaaccccggcaaccacgtggagatccaggccgcctacatcggcaccaccatcatcatcagacagaccgccggccagctgagcttcagcatcaaggtggccgaggacgtggccatggccttcagcgccgagcaggacctgcagctgtgcgtgggcggctgcccccccagccagagactgagcagaagcgagagaaacagaagaggcgccatcaccatcgacaccgccagaagactgtgcaaggagggcctgcccgtggaggacgcctacttccacagctgcgtgttcgacgtgctgatcagcggcgaccccaacttcaccgtggccgcccaggccgccctggaggacgccagagccttcctgcccgacctggagaagctgcacctgttccccagcgacgccggcgtgcccctgagcagcgccaccctgctggcccccctgctgagcggcctgttcgtgctgtggctgtgcatccagtag

SEQ ID NO: 1957 - DNA, 603 bp, synthetic construct; identical to SEQ ID NO: 1956
  misc_feature 1..603: note = source = /note="Description of Artificial Sequence: Synthetic coding sequence"
  source 1..603: mol_type = other DNA

SEQ ID NO: 1958 - DNA, 603 bp, synthetic construct; identical to SEQ ID NO: 1956
  misc_feature 1..603: note = source = /note="Description of Artificial Sequence: Synthetic coding sequence"
  source 1..603: mol_type = other DNA

SEQ ID NO: 1959 - DNA, 603 bp, synthetic construct; identical to SEQ ID NO: 1956
  misc_feature 1..603: note = source = /note="Description of Artificial Sequence: Synthetic coding sequence"
  source 1..603: mol_type = other DNA

SEQ ID NO: 1960 - DNA, 1905 bp, synthetic construct
  misc_feature 1..1905: note = source = /note="Description of Artificial Sequence: Synthetic coding sequence"
  source 1..1905: mol_type = other DNA
atgcccagcgacctggccaagaagaaggccgccaagaagaaggaggccgccaaggccagacagagacccagaaagggccacgaggagaacggcgacgtggtgaccgagccccaggtggccgagaagaacgaggccaacggcagagagaccaccgaggtggacctgctgaccaaggagctggaggacttcgagatgaagaaggccgccgccagagccgtgaccggcgtgctggccagccaccccaacagcaccgacgtgcacatcatcaacctgagcctgaccttccacggccaggagctgctgagcgacaccaagctggagctgaacagcggcagaagatacggcctgatcggcctgaacggcatcggcaagagcatgctgctgagcgccatcggcaagagagaggtgcccatccccgagcacatcgacatctaccacctgaccagagagatgccccccagcgacaagacccccctgcactgcgtgatggaggtggacaccgagagagccatgctggagaaggaggccgagagactggcccacgaggacgccgagtgcgagaagctgatggagctgtacgagagactggaggagctggacgccgacaaggccgagatgagagccagcagaatcctgcacggcctgggcttcacccccgccatgcagagaaagaagctgaaggacttcagcggcggctggagaatgagagtggccctggccagagccctgttcatcagacccttcatgctgctgctggacgagcccaccaaccacctggacctggacgcctgcgtgtggctggaggaggagctgaagaccttcaagagaatcctggtgctggtgagccacagccaggacttcctgaacggcgtgtgcaccaacatcatccacatgcacaacaagaagctgaagtactacaccggcaactacgaccagtacgtgaagaccagactggagctggaggagaaccagatgaagagattccactgggagcaggaccagatcgcccacatgaagaactacatcgccagattcggccacggcagcgccaagctggccagacaggcccagagcaaggagaagaccctgcagaagatgatggccagcggcctgaccgagagagtggtgagcgacaagaccctgagcttctacttccccccctgcggcaagatccccccccccgtgatcatggtgcagaacgtgagcttcaagtacaccaaggacggcccctgcatctacaacaacctggagttcggcatcgacctggacaccagagtggccctggtgggccccaacggcgccggcaagagcaccctgctgaagctgctgaccggcgagctgctgcccaccgacggcatgatcagaaagcacagccacgtgaagatcggcagataccaccagcacctgcaggagcagctggacctggacctgagccccctggagtacatgatgaagtgctaccccgagatcaaggagaaggaggagatgagaaagatcatcggcagatacggcctgaccggcaagcagcaggtgagccccatcagaaacctgagcgacggccagaagtgcagagtgtgcctggcctggctggcctggcagaacccccacatgctgttcctggacgagcccaccaaccacctggacatcgagaccatcgacgccctggccgacgccatcaacgagttcgagggcggcatgatgctggtgagccacgacttcagactgatccagcaggtggcccaggagatctgggtgtgcgagaagcagaccatcaccaagtggcccggcgacatcctggcctacaaggagcacctgaagagcaagctggtggacgaggagccccagctgaccaagagaacccacaacgtgtgcaccctgaccctggccagcctgcccagaccctag

SEQ ID NO: 1961 - DNA, 555 bp, synthetic construct
  misc_feature 1..555: note = source = /note="Description of Artificial Sequence: Synthetic coding sequence"
  source 1..555: mol_type = other DNA
atgtgggtgaccaagctgctgcccgccctgctgctgcagcacgtgctgctgcacctgctgctgctgcccatcgccatcccctacgccgagggccagagaaagagaagaaacaccatccacgagttcaagaagagcgccaagaccaccctgatcaagatcgaccccgccctgaagatcaagaccaagaaggtgaacaccgccgaccagtgcgccaacagatgcaccagaaacaagggcctgcccttcacctgcaaggccttcgtgttcgacaaggccagaaagcagtgcctgtggttccccttcaacagcatgagcagcggcgtgaagaaggagttcggccacgagttcgacctgtacgagaacaaggactacatcagaaactgcatcatcggcaagggcagaagctacaagggcaccgtgagcatcaccaagagcggcatcaagtgccagccctggagcagcatgatcccccacgagcacagcggcggcgacgactgcctggtggagagcaccttctacagcatccccttctggggccacaacagcgccagatag

SEQ ID NO: 1962 - DNA, 891 bp, synthetic construct
  misc_feature 1..891: note = source = /note="Description of Artificial Sequence: Synthetic coding sequence"
  source 1..891: mol_type = other DNA
atgtgggtgaccaagctgctgcccgccctgctgctgcagcacgtgctgctgcacctgctgctgctgcccatcgccatcccctacgccgagggccagagaaagagaagaaacaccatccacgagttcaagaagagcgccaagaccaccctgatcaagatcgaccccgccctgaagatcaagaccaagaaggtgaacaccgccgaccagtgcgccaacagatgcaccagaaacaagggcctgcccttcacctgcaaggccttcgtgttcgacaaggccagaaagcagtgcctgtggttccccttcaacagcatgagcagcggcgtgaagaaggagttcggccacgagttcgacctgtacgagaacaaggactacatcagaaactgcatcatcggcaagggcagaagctacaagggcaccgtgagcatcaccaagagcggcatcaagtgccagccctggagcagcatgatcccccacgagcacagcttcctgcccagcagctacagaggcaaggacctgcaggagaactactgcagaaaccccagaggcgaggagggcggcccctggtgcttcaccagcaaccccgaggtgagatacgaggtgtgcgacatcccccagtgcagcgaggtggagtgcatgacctgcaacggcgagagctacagaggcctgatggaccacaccgagagcggcaagatctgccagagatgggaccaccagaccccccacagacacaagttcctgcccgagagataccccgacaagggcttcgacgacaactactgcagaaaccccgacggccagcccagaccctggtgctacaccctggacccccacaccagatgggagtactgcgccatcaagacctgcggcgacatcacctgggccctgaactag

SEQ ID NO: 1963 - DNA, 426 bp, synthetic construct
  misc_feature 1..426: note = source = /note="Description of Artificial Sequence: Synthetic coding sequence"
  source 1..426: mol_type = other DNA
atgtgggtgaccaagctgctgcccgccctgctgctgcagcacgtgctgctgcacctgctgctgctgcccatcgccatcccctacgccgagggccagagaaagagaagaaacaccatccacgagttcaagaagagcgccaagaccaccctgatcaagatcgaccccgccctgaagatcaagaccaagaaggtgaacaccgccgaccagtgcgccaacagatgcaccagaaacaagggcctgcccttcacctgcaaggccttcgtgttcgacaaggccagaaagcagtgcctgtggttccccttcaacagcatgagcagcggcgtgaagaaggagttcggccacgagttcgacctgtacgagaacaaggactacatcagaaactgcatcatcggcaagggcagaagctacaagggcaccgtgagctag

SEQ ID NO: 1964 - DNA, 357 bp, synthetic construct
  misc_feature 1..357: note = source = /note="Description of Artificial Sequence: Synthetic coding sequence"
  source 1..357: mol_type = other DNA
atgtgggtgaccaagctgctgcccgccctgctgctgcagcacgtgctgctgcacctgctgctgctgcccatcgccatcccctacgccgagggccagagaaagagaagaaacaccatccacgagttcaagaagagcgccaagaccaccctgatcaagatcgaccccgccctgaagatcaagaccaagaaggtgaacaccgccgaccagtgcgccaacagatgcaccagaaacaagggcctgcccttcacctgcaaggccttcgtgttcgacaaggccagaaagcagtgcctgtggttccccttcaacagcatgagcagcggcgtgaagaaggagttcggccacgagttcgacctgtag

SEQ ID NO: 1965 - DNA, 633 bp, synthetic construct
  misc_feature 1..633: note = source = /note="Description of Artificial Sequence: Synthetic coding sequence"
  source 1..633: mol_type = other DNA
atgtgggtgaccaagctgctgcccgccctgctgctgcagcacgtgctgctgcacctgctgctgctgcccatcgccatcccctacgccgagggccagagaaagagaagaaacaccatccacgagttcaagaagagcgccaagaccaccctgatcaagatcgaccccgccctgaagatcaagaccaagaaggtgaacaccgccgaccagtgcgccaacagatgcaccagaaacaagggcctgcccttcacctgcaaggccttcgtgttcgacaaggccagaaagcagtgcctgtggttccccttcaacagcatgagcagcggcgtgaagaaggagttcggccacgagttcgacctgtacgagaacaaggactacatcagaaactgcatcatcggcaagggcagaagctacaagggcaccgtgagcatcaccaagagcggcatcaagtgccagccctggagcagcatgatcccccacgagcacagcttcctgcccagcagctacagaggcaaggacctgcaggagaactactgcagaaaccccagaggcgaggagggcggcccctggtgcttcaccagcaaccccgaggtgagatacgaggtgtgcgacatcccccagtgcagcgagggcaagtag

SEQ ID NO: 1966 - DNA, 873 bp, synthetic construct
  misc_feature 1..873: note = source = /note="Description of Artificial Sequence: Synthetic coding sequence"
  source 1..873: mol_type = other DNA
atgtgggtgaccaagctgctgcccgccctgctgctgcagcacgtgctgctgcacctgctgctgctgcccatcgccatcccctacgccgagggccagagaaagagaagaaacaccatccacgagttcaagaagagcgccaagaccaccctgatcaagatcgaccccgccctgaagatcaagaccaagaaggtgaacaccgccgaccagtgcgccaacagatgcaccagaaacaagggcctgcccttcacctgcaaggccttcgtgttcgacaaggccagaaagcagtgcctgtggttccccttcaacagcatgagcagcggcgtgaagaaggagttcggccacgagttcgacctgtacgagaacaaggactacatcagaaactgcatcatcggcaagggcagaagctacaagggcaccgtgagcatcaccaagagcggcatcaagtgccagccctggagcagcatgatcccccacgagcacagcttcctgcccagcagctacagaggcaaggacctgcaggagaactactgcagaaaccccagaggcgaggagggcggcccctggtgcttcaccagcaaccccgaggtgagatacgaggtgtgcgacatcccccagtgcagcgaggtggagtgcatgacctgcaacggcgagagctacagaggcctgatggaccacaccgagagcggcaagatctgccagagatgggaccaccagaccccccacagacacaagttcctgcccgagagataccccgacaagggcttcgacgacaactactgcagaaaccccgacggccagcccagaccctggtgctacaccctggacccccacaccagatgggagtactgcgccatcaagacctgcgagacctag

SEQ ID NO: 1967 - DNA, 858 bp, synthetic construct
  misc_feature 1..858: note = source = /note="Description of Artificial Sequence: Synthetic coding sequence"
  source 1..858: mol_type = other DNA
atgtgggtgaccaagctgctgcccgccctgctgctgcagcacgtgctgctgcacctgctgctgctgcccatcgccatcccctacgccgagggccagagaaagagaagaaacaccatccacgagttcaagaagagcgccaagaccaccctgatcaagatcgaccccgccctgaagatcaagaccaagaaggtgaacaccgccgaccagtgcgccaacagatgcaccagaaacaagggcctgcccttcacctgcaaggccttcgtgttcgacaaggccagaaagcagtgcctgtggttccccttcaacagcatgagcagcggcgtgaagaaggagttcggccacgagttcgacctgtacgagaacaaggactacatcagaaactgcatcatcggcaagggcagaagctacaagggcaccgtgagcatcaccaagagcggcatcaagtgccagccctggagcagcatgatcccccacgagcacagctacagaggcaaggacctgcaggagaactactgcagaaaccccagaggcgaggagggcggcccctggtgcttcaccagcaaccccgaggtgagatacgaggtgtgcgacatcccccagtgcagcgaggtggagtgcatgacctgcaacggcgagagctacagaggcctgatggaccacaccgagagcggcaagatctgccagagatgggaccaccagaccccccacagacacaagttcctgcccgagagataccccgacaagggcttcgacgacaactactgcagaaaccccgacggccagcccagaccctggtgctacaccctggacccccacaccagatgggagtactgcgccatcaagacctgcgagacctag

SEQ ID NO: 1968 - DNA, 2172 bp, synthetic construct
  misc_feature 1..2172: note = source = /note="Description of Artificial Sequence: Synthetic coding sequence"
  source 1..2172: mol_type = other DNA
atgtgggtgaccaagctgctgcccgccctgctgctgcagcacgtgctgctgcacctgctgctgctgcccatcgccatcccctacgccgagggccagagaaagagaagaaacaccatccacgagttcaagaagagcgccaagaccaccctgatcaagatcgaccccgccctgaagatcaagaccaagaaggtgaacaccgccgaccagtgcgccaacagatgcaccagaaacaagggcctgcccttcacctgcaaggccttcgtgttcgacaaggccagaaagcagtgcctgtggttccccttcaacagcatgagcagcggcgtgaagaaggagttcggccacgagttcgacctgtacgagaacaaggactacatcagaaactgcatcatcggcaagggcagaagctacaagggcaccgtgagcatcaccaagagcggcatcaagtgccagccctggagcagcatgatcccccacgagcacagctacagaggcaaggacctgcaggagaactactgcagaaaccccagaggcgaggagggcggcccctggtgcttcaccagcaaccccgaggtgagatacgaggtgtgcgacatcccccagtgcagcgaggtggagtgcatgacctgcaacggcgagagctacagaggcctgatggaccacaccgagagcggcaagatctgccagagatgggaccaccagaccccccacagacacaagttcctgcccgagagataccccgacaagggcttcgacgacaactactgcagaaaccccgacggccagcccagaccctggtgctacaccctggacccccacaccagatgggagtactgcgccatcaagacctgcgccgacaacaccatgaacgacaccgacgtgcccctggagaccaccgagtgcatccagggccagggcgagggctacagaggcaccgtgaacaccatctggaacggcatcccctgccagagatgggacagccagtacccccacgagcacgacatgacccccgagaacttcaagtgcaaggacctgagagagaactactgcagaaaccccgacggcagcgagagcccctggtgcttcaccaccgaccccaacatcagagtgggctactgcagccagatccccaactgcgacatgagccacggccaggactgctacagaggcaacggcaagaactacatgggcaacctgagccagaccagaagcggcctgacctgcagcatgtgggacaagaacatggaggacctgcacagacacatcttctgggagcccgacgccagcaagctgaacgagaactactgcagaaaccccgacgacgacgcccacggcccctggtgctacaccggcaaccccctgatcccctgggactactgccccatcagcagatgcgagggcgacaccacccccaccatcgtgaacctggaccaccccgtgatcagctgcgccaagaccaagcagctgagagtggtgaacggcatccccaccagaaccaacatcggctggatggtgagcctgagatacagaaacaagcacatctgcggcggcagcctgatcaaggagagctgggtgctgaccgccagacagtgcttccccagcagagacctgaaggactacgaggcctggctgggcatccacgacgtgcacggcagaggcgacgagaagtgcaagcaggtgctgaacgtgagccagctggtgtacggccccgagggcagcgacctggtgctgatgaagctggccagacccgccgtgctggacgacttcgtgagcaccatcgacctgcccaactacggctgcaccatccccgagaagaccagctgcagcgtgtacggctggggctacaccggcctgatcaactacgacggcctgctgagagtggcccacctgtacatcatgggcaacgagaagtgcagccagcaccacagaggcaaggtgaccctgaacgagagcgagatctgcgccggcgccgagaagatcggcagcggcccctgcgagggcgactacggcggccccctggtgtgcgagcagcacaagatgagaatggtgctgggcgtgatcgtgcccggcagaggctgcgccatccccaacagacccggcatcttcgtgagagtggcctactacgccaagtggatccacaagatcatcctgacctacaaggtgccccagagctag

SEQ ID NO: 1969 - DNA, 363 bp, synthetic construct
  misc_feature 1..363: note = source = /note="Description of Artificial Sequence: Synthetic coding sequence"
  source 1..363: mol_type = other DNA
atgaacggcgaggagaagagctgcagcggctacggcggccccgacgccatggacggcaagctggtgagcagcgacgacgacgacttcatcgtgaagagagagcacaccagagccagcggcatcagaaaggccgtgctgagcggccccggccagagcgccgagaacgagaccgaccaggtgaacttcagagagatcccccccagatgctaccccaagcacgccaaggcctgcatctacttcacctacaaggtgcactacagcaacagcagcaccgagatccccgagttcctgaccgccctggaggtgctgatggccagcgacttcctggacatctacatcttcctgttcttcctgttcttctag

SEQ ID NO: 1970 - DNA, 255 bp, synthetic construct
  misc_feature 1..255: note = source = /note="Description of Artificial Sequence: Synthetic coding sequence"
  source 1..255: mol_type = other DNA
atggccctgagcagccagatctgggccgcctgcctgctgctgctgctgctgctggccagcctgaccagcggcagcgtgttcccccagcagaccggccagctggccgagctgcagccccaggacagagccggcgccagagccagctggatgcccatgttccagagaagaagaagaagagacacccacttccccatctgcatcttctgctgcggctgctgccacagaagcaagtgcggcatgtgctgcaagacctag

SEQ ID NO: 1971 - DNA, 1422 bp, synthetic construct
  misc_feature 1..1422: note = source = /note="Description of Artificial Sequence: Synthetic coding sequence"
  source 1..1422: mol_type = other DNA
atggccgtgatggcccccagaaccctggtgctgctgctgagcggcgccctggccctgacccagacctgggccgaggtgcagctggtggagagcggcggcggcctggtgcagcccggcggcagcctgagactgagctgcgccgccagcggcttcaacatcaaggacacctacatccactgggtgagacaggcccccggcaagggcctggagtgggtggccagaatctaccccaccaacggctacaccagatacgccgacagcgtgaagggcagattcaccatcagcgccgacaccagcaagaacaccgcctacctgcagatgaacagcctgagagccgaggacaccgccgtgtactactgcagcagatggggcggcgacggcttctacgccatggactactggggccagggcaccctggtgaccgtgagcagcgccagcaccaagggccccagcgtgttccccctggcccccagcagcaagagcaccagcggcggcaccgccgccctgggctgcctggtgaaggactacttccccgagcccgtgaccgtgagctggaacagcggcgccctgaccagcggcgtgcacaccttccccgccgtgctgcagagcagcggcctgtacagcctgagcagcgtggtgaccgtgcccagcagcagcctgggcacccagacctacatctgcaacgtgaaccacaagcccagcaacaccaaggtggacaagaaggtggagcccaagagctgcgacaagacccacacctgccccccctgccccgcccccgagctgctgggcggccccagcgtgttcctgttcccccccaagcccaaggacaccctgatgatcagcagaacccccgaggtgacctgcgtggtggtggacgtgagccacgaggaccccgaggtgaagttcaactggtacgtggacggcgtggaggtgcacaacgccaagaccaagcccagagaggagcagtacaacagcacctacagagtggtgagcgtgctgaccgtgctgcaccaggactggctgaacggcaaggagtacaagtgcaaggtgagcaacaaggccctgcccgcccccatcgagaagaccatcagcaaggccaagggccagcccagagagccccaggtgtacaccctgccccccagcagagacgagctgaccaagaaccaggtgagcctgacctgcctggtgaagggcttctaccccagcgacatcgccgtggagtgggagagcaacggccagcccgagaacaactacaagaccaccccccccgtgctggacagcgacggcagcttcttcctgtacagcaagctgaccgtggacaagagcagatggcagcagggcaacgtgttcagctgcagcgtgatgcacgaggccctgcacaaccactacacccagaagagcctgagcctgagccccggctag

SEQ ID NO: 1972 - DNA, 717 bp, synthetic construct
  misc_feature 1..717: note = source = /note="Description of Artificial Sequence: Synthetic coding sequence"
  source 1..717: mol_type = other DNA
atggccgtgatggcccccagaaccctggtgctgctgctgagcggcgccctggccctgacccagacctgggccgacatccagatgacccagagccccagcagcctgagcgccagcgtgggcgacagagtgaccatcacctgcagagccagccaggacgtgaacaccgccgtggcctggtaccagcagaagcccggcaaggcccccaagctgctgatctacagcgccagcttcctgtacagcggcgtgcccagcagattcagcggcagcagaagcggcaccgacttcaccctgaccatcagcagcctgcagcccgaggacttcgccacctactactgccagcagcactacaccaccccccccaccttcggccagggcaccaaggtggagatcaagagaaccgtggccgcccccagcgtgttcatcttcccccccagcgacgagcagctgaagagcggcaccgccagcgtggtgtgcctgctgaacaacttctaccccagagaggccaaggtgcagtggaaggtggacaacgccctgcagagcggcaacagccaggagagcgtgaccgagcaggacagcaaggacagcacctacagcctgagcagcaccctgaccctgagcaaggccgactacgagaagcacaaggtgtacgcctgcgaggtgacccaccagggcctgagcagccccgtgaccaagagcttcaacagaggcgagtgctag

SEQ ID NO: 1973 - DNA, 657 bp, synthetic construct
  misc_feature 1..657: note = source = /note="Description of Artificial Sequence: Synthetic coding sequence"
  source 1..657: mol_type = other DNA
atggccaccagaagccccggcgtggtgatcagcgacgacgagcccggctacgacctggacctgttctgcatccccaaccactacgccgaggacctggagagagtgttcatcccccacggcctgatcatggacagaaccgagagactggccagagacgtgatgaaggagatgggcggccaccacatcgtggccctgtgcgtgctgaagggcggctacaagttcttcgccgacctgctggactacatcaaggccctgaacagaaacagcgacagaagcatccccatgaccgtggacttcatcagactgaagagctactgcaacgaccagagcaccggcgacatcaaggtgatcggcggcgacgacctgagcaccctgaccggcaagaacgtgctgatcgtggaggacatcatcgacaccggcaagaccatgcagaccctgctgagcctggtgagacagtacaaccccaagatggtgaaggtggccagcctgctggtgaagagaacccccagaagcgtgggctacaagcccgacttcgtgggcttcgagatccccgacaagttcgtggtgggctacgccctggactacaacgagtacttcagagacctgaaccacgtgtgcgtgatcagcgagaccggcaaggccaagtacaaggcctag

SEQ ID NO: 1974 - DNA, 657 bp, synthetic construct
  misc_feature 1..657: note = source = /note="Description of Artificial Sequence: Synthetic coding sequence"
  source 1..657: mol_type = other DNA
atggccaccagaagccccggcgtggtgatcagcgacgacgagcccggctacgacctggacctgttctgcatccccaaccactacgccgaggacctggagagagtgttcatcccccacggcctgatcatggacagaaccgagagactggccagagacgtgatgaaggagatgggcggccaccacatcgtggccctgtgcgtgctgaagggcggctacaagttcttcgccgacctgctggactacatcaaggccctgaacagaaacagcgacagaagcatccccatgaccgtggacttcatcagactgaagagctactgcaacgaccagagcaccggcgacatcaaggtgatcggcggcgacgacctgagcaccctgaccggcaagagcagactgctggccgaggacatcatcgacaccggcaagaccatgcagaccctgctgagcctggtgagacagtacaaccccaagatggtgaaggtggccagcctgctggtgaagagaacccccagaagcgtgggctacaagcccgacttcgtgggcttcgagatccccgacaagttcgtggtgggctacgccctggactacaacgagtacttcagagacctgaaccacgtgtgcgtgatcagcgagaccggcaaggccaagtacaaggcctag

SEQ ID NO: 1975 - DNA, 1653 bp, synthetic construct
  misc_feature 1..1653: note = source = /note="Description of Artificial Sequence: Synthetic coding sequence"
  source 1..1653: mol_type = other DNA
atgcccccccccagaaccggcagaggcctgctgtggctgggcctggtgctgagcagcgtgtgcgtggccctgggcagcgagacccaggccaacagcaccaccgacgccctgaacgtgctgctgatcatcgtggacgacctgagacccagcctgggctgctacggcgacaagctggtgagaagccccaacatcgaccagctggccagccacagcctgctgttccagaacgccttcgcccagcaggccgtgtgcgcccccagcagagtgagcttcctgaccggcagaagacccgacaccaccagactgtacgacttcaacagctactggagagtgcacgccggcaacttcagcaccatcccccagtacttcaaggagaacggctacgtgaccatgagcgtgggcaaggtgttccaccccggcatcagcagcaaccacaccgacgacagcccctacagctggagcttccccccctaccaccccagcagcgagaagtacgagaacaccaagacctgcagaggccccgacggcgagctgcacgccaacctgctgtgccccgtggacgtgctggacgtgcccgagggcaccctgcccgacaagcagagcaccgagcaggccatccagctgctggagaagatgaagaccagcgccagccccttcttcctggccgtgggctaccacaagccccacatccccttcagataccccaaggagttccagaagctgtaccccctggagaacatcaccctggcccccgaccccgaggtgcccgacggcctgccccccgtggcctacaacccctggatggacatcagacagagagaggacgtgcaggccctgaacatcagcgtgccctacggccccatccccgtggacttccagagaaagatcagacagagctacttcgccagcgtgagctacctggacacccaggtgggcagactgctgagcgccctggacgacctgcagctggccaacagcaccatcatcgccttcaccagcgaccacggctgggccctgggcgagcacggcgagtgggccaagtacagcaacttcgacgtggccacccacgtgcccctgatcttctacgtgcccggcagaaccgccagcctgcccgaggccggcgagaagctgttcccctacctggaccccttcgacagcgccagccagctgatggagcccggcagacagagcatggacctggtggagctggtgagcctgttccccaccctggccggcctggccggcctgcaggtgccccccagatgccccgtgcccagcttccacgtggagctgtgcagagagggcaagaacctgctgaagcacttcagattcagagacctggaggaggacccctacctgcccggcaaccccagagagctgatcgcctacagccagtaccccagacccagcgacatcccccagtggaacagcgacaagcccagcctgaaggacatcaagatcatgggctacagcatcagaaccatcgactacagatacaccgtgtgggtgggcttcaaccccgacgagttcctggccaacttcagcgacatccacgccggcgagctgtacttcgtggacagcgaccccctgcaggaccacaacatgtacaacgacagccagggcggcgacctgttccagctgctgatgccctag

SEQ ID NO: 1976 - DNA, 1032 bp, synthetic construct
  misc_feature 1..1032: note = source = /note="Description of Artificial Sequence: Synthetic coding sequence"
  source 1..1032: mol_type = other DNA
atgcccccccccagaaccggcagaggcctgctgtggctgggcctggtgctgagcagcgtgtgcgtggccctgggcagcgagacccaggccaacagcaccaccgacgccctgaacgtgctgctgatcatcgtggacgacctgagacccagcctgggctgctacggcgacaagctggtgagaagccccaacatcgaccagctggccagccacagcctgctgttccagaacgccttcgcccagcaggccgtgtgcgcccccagcagagtgagcttcctgaccggcagaagacccgacaccaccagactgtacgacttcaacagctactggagagtgcacgccggcaacttcagcaccatcccccagtacttcaaggagaacggctacgtgaccatgagcgtgggcaaggtgttccaccccggcatcagcagcaaccacaccgacgacagcccctacagctggagcttccccccctaccaccccagcagcgagaagtacgagaacaccaagacctgcagaggccccgacggcgagctgcacgccaacctgctgtgccccgtggacgtgctggacgtgcccgagggcaccctgcccgacaagcagagcaccgagcaggccatccagctgctggagaagatgaagaccagcgccagccccttcttcctggccgtgggctaccacaagccccacatccccttcagataccccaaggagttccagaagctgtaccccctggagaacatcaccctggcccccgaccccgaggtgcccgacggcctgccccccgtggcctacaacccctggatggacatcagacagagagaggacgtgcaggccctgaacatcagcgtgccctacggccccatccccgtggacttccagagaaagatcagacagagctacttcgccagcgtgagctacctggacacccaggtgggcagactgctgagcgccctggacgacctgcagctggccaacagcaccatcatcgccttcaccagcgaccacggcttcctgatgagaaccaacacctag

SEQ ID NO: 1977 - DNA, 939 bp, synthetic construct
  misc_feature 1..939: note = source = /note="Description of Artificial Sequence: Synthetic coding sequence"
  source 1..939: mol_type = other DNA
atgcccccccccagaaccggcagaggcctgctgtggctgggcctggtgctgagcagcgtgtgcgtggccctgggcagcgagacccaggccaacagcaccaccgacgccctgaacgtgctgctgatcatcgtggacgacctgagacccagcctgggctgctacggcgacaagctggtgagaagccccaacatcgaccagctggccagccacagcctgctgttccagaacgccttcgcccagcaggccgtgtgcgcccccagcagagtgagcttcctgaccggcagaagacccgacaccaccagactgtacgacttcaacagctactggagagtgcacgccggcaacttcagcaccatcccccagtacttcaaggagaacggctacgtgaccatgagcgtgggcaaggtgttccaccccggcatcagcagcaaccacaccgacgacagcccctacagctggagcttccccccctaccaccccagcagcgagaagtacgagaacaccaagacctgcagaggccccgacggcgagctgcacgccaacctgctgtgccccgtggacgtgctggacgtgcccgagggcaccctgcccgacaagcagagcaccgagcaggccatccagctgctggagaagatgaagaccagcgccagccccttcttcctggccgtgggctaccacaagccccacatccccttcagataccccaaggagttccagaagctgtaccccctggagaacatcaccctggcccccgaccccgaggtgcccgacggcctgccccccgtggcctacaacccctggatggacatcagacagagagaggacgtgcaggccctgaacatcagcgtgccctacggccccatccccgtggacttccaggaggaccagagcagcaccggcttcagactgaagaccagcagcaccagaaagtacaagtag

SEQ ID NO: 1978 - DNA, 540 bp, synthetic construct
  misc_feature 1..540: note = source = /note="Description of Artificial Sequence: Synthetic coding sequence"
  source 1..540: mol_type = other DNA
atgcccccccccagaaccggcagaggcctgctgtggctgggcctggtgctgagcagcgtgtgcgtggccctgggcagcgagacccaggccaacagcaccaccgacgccctgaacgtgctgctgatcatcgtggacgacctgagacccagcctgggctgctacggcgacaagctggtgagaagccccaacatcgaccagctggccagccacagcctgctgttccagaacgccttcgcccagcaggccgtgtgcgcccccagcagagtgagcttcctgaccggcagaagacccgacaccaccagactgtacgacttcaacagctactggagagtgcacgccggcaacttcagcaccatcccccagtacttcaaggagaacggctacgtgaccatgagcgtgggcaaggtgttccaccccggcaccgccccctgccccgagagcggcttcagctggttcgtggtgagcgagagcagcatccccatcctgggcatgggcctgagcctgcagagccccctgctggccggcagagtgcccagatag

SEQ ID NO: 1979 - DNA, 261 bp, synthetic construct
  misc_feature 1..261: note = source = /note="Description of Artificial Sequence: Synthetic coding sequence"
  source 1..261: mol_type = other DNA
atgcccccccccagaaccggcagaggcctgctgtggctgggcctggtgctgagcagcgtgtgcgtggccctgggcagcgagacccaggccaacagcaccaccgacgccctgaacgtgctgctgatcatcgtggacgacctgagacccagcctgggctgctacggcgacaagctggtgagaagccccaacatcgaccagctggccagccacagcctgctgttccagaacgccttcgcccagcaggccgtgtgcgccccctag

SEQ ID NO: 1980 - DNA, 462 bp, synthetic construct
  misc_feature 1..462: note = source = /note="Description of Artificial Sequence: Synthetic coding sequence"
  source 1..462: mol_type = other DNA
atggacctggtggagctggtgagcctgttccccaccctggccggcctggccggcctgcaggtgccccccagatgccccgtgcccagcttccacgtggagctgtgcagagagggcaagaacctgctgaagcacttcagattcagagacctggaggaggacccctacctgcccggcaaccccagagagctgatcgcctacagccagtaccccagacccagcgacatcccccagtggaacagcgacaagcccagcctgaaggacatcaagatcatgggctacagcatcagaaccatcgactacagatacaccgtgtgggtgggcttcaaccccgacgagttcctggccaacttcagcgacatccacgccggcgagctgtacttcgtggacagcgaccccctgcaggaccacaacatgtacaacgacagccagggcggcgacctgttccagctgctgatgccctag

SEQ ID NO: 1981 - DNA, 1020 bp, synthetic construct
  misc_feature 1..1020: note = source = /note="Description of Artificial Sequence: Synthetic coding sequence"
  source 1..1020: mol_type = other DNA
atgaagaccagcgccagccccttcttcctggccgtgggctaccacaagccccacatccccttcagataccccaaggagttccagaagctgtaccccctggagaacatcaccctggcccccgaccccgaggtgcccgacggcctgccccccgtggcctacaacccctggatggacatcagacagagagaggacgtgcaggccctgaacatcagcgtgccctacggccccatccccgtggacttccagagaaagatcagacagagctacttcgccagcgtgagctacctggacacccaggtgggcagactgctgagcgccctggacgacctgcagctggccaacagcaccatcatcgccttcaccagcgaccacggctgggccctgggcgagcacggcgagtgggccaagtacagcaacttcgacgtggccacccacgtgcccctgatcttctacgtgcccggcagaaccgccagcctgcccgaggccggcgagaagctgttcccctacctggaccccttcgacagcgccagccagctgatggagcccggcagacagagcatggacctggtggagctggtgagcctgttccccaccctggccggcctggccggcctgcaggtgccccccagatgccccgtgcccagcttccacgtggagctgtgcagagagggcaagaacctgctgaagcacttcagattcagagacctggaggaggacccctacctgcccggcaaccccagagagctgatcgcctacagccagtaccccagacccagcgacatcccccagtggaacagcgacaagcccagcctgaaggacatcaagatcatgggctacagcatcagaaccatcgactacagatacaccgtgtgggtgggcttcaaccccgacgagttcctggccaacttcagcgacatccacgccggcgagctgtacttcgtggacagcgaccccctgcaggaccacaacatgtacaacgacagccagggcggcgacctgttccagctgctgatgccctag

SEQ ID NO: 1982 - DNA, 1962 bp, synthetic construct
  misc_feature 1..1962: note = source = /note="Description of Artificial Sequence: Synthetic coding sequence"
  source 1..1962: mol_type = other DNA
atgagacccctgagacccagagccgccctgctggccctgctggccagcctgctggccgccccccccgtggcccccgccgaggccccccacctggtgcacgtggacgccgccagagccctgtggcccctgagaagattctggagaagcaccggcttctgcccccccctgccccacagccaggccgaccagtacgtgctgagctgggaccagcagctgaacctggcctacgtgggcgccgtgccccacagaggcatcaagcaggtgagaacccactggctgctggagctggtgaccaccagaggcagcaccggcagaggcctgagctacaacttcacccacctggacggctacctggacctgctgagagagaaccagctgctgcccggcttcgagctgatgggcagcgccagcggccacttcaccgacttcgaggacaagcagcaggtgttcgagtggaaggacctggtgagcagcctggccagaagatacatcggcagatacggcctggcccacgtgagcaagtggaacttcgagacctggaacgagcccgaccaccacgacttcgacaacgtgagcatgaccatgcagggcttcctgaactactacgacgcctgcagcgagggcctgagagccgccagccccgccctgagactgggcggccccggcgacagcttccacaccccccccagaagccccctgagctggggcctgctgagacactgccacgacggcaccaacttcttcaccggcgaggccggcgtgagactggactacatcagcctgcacagaaagggcgccagaagcagcatcagcatcctggagcaggagaaggtggtggcccagcagatcagacagctgttccccaagttcgccgacacccccatctacaacgacgaggccgaccccctggtgggctggagcctgccccagccctggagagccgacgtgacctacgccgccatggtggtgaaggtgatcgcccagcaccagaacctgctgctggccaacaccaccagcgccttcccctacgccctgctgagcaacgacaacgccttcctgagctaccacccccaccccttcgcccagagaaccctgaccgccagattccaggtgaacaacaccagacccccccacgtgcagctgctgagaaagcccgtgctgaccgccatgggcctgctggccctgctggacgaggagcagctgtgggccgaggtgagccaggccggcaccgtgctggacagcaaccacaccgtgggcgtgctggccagcgcccacagaccccagggccccgccgacgcctggagagccgccgtgctgatctacgccagcgacgacaccagagcccaccccaacagaagcgtggccgtgaccctgagactgagaggcgtgccccccggccccggcctggtgtacgtgaccagatacctggacaacggcctgtgcagccccgacggcgagtggagaagactgggcagacccgtgttccccaccgccgagcagttcagaagaatgagagccgccgaggaccccgtggccgccgcccccagacccctgcccgccggcggcagactgaccctgagacccgccctgagactgcccagcctgctgctggtgcacgtgtgcgccagacccgagaagccccccggccaggtgaccagactgagagccctgcccctgacccagggccagctggtgctggtgtggagcgacgagcacgtgggcagcaagtgcctgtggacctacgagatccagttcagccaggacggcaaggcctacacccccgtgagcagaaagcccagcaccttcaacctgttcgtgttcagccccgacaccggcgccgtgagcggcagctacagagtgagagccctggactactgggccagacccggccccttcagcgaccccgtgccctacctggaggtgcccgtgcccagaggcccccccagccccggcaacccctag

SEQ ID NO: 1983 - DNA, 2028 bp, synthetic construct
  misc_feature 1..2028: note = source = /note="Description of Artificial Sequence: Synthetic coding sequence"
  source 1..2028: mol_type = other DNA
atgagacccctgagacccagagccgccctgctggccctgctggccagcctgctggccgccccccccgtggcccccgccgaggccccccacctggtgcacgtggacgccgccagagccctgtggcccctgagaagattctggagaagcaccggcttctggggcagcaccggcagaggcctgagctacaacttcacccacctggacggctacctggacctgctgagagagaaccagctgctgcccggcttcgagctgatgggcagcgccagcggccacttcaccgacttcgaggacaagcagcaggtgttcgagtggaaggacctggtgagcagcctggccagaagatacatcggcagatacggcctggcccacgtgagcaagtggaacttcgagacctggaacgagcccgaccaccacgacttcgacaacgtgagcatgaccatgcagggcttcctgaactactacgacgcctgcagcgagggcctgagagccgccagccccgccctgagactgggcggccccggcgacagcttccacaccccccccagaagccccctgagctggggcctgctgagacactgccacgacggcaccaacttcttcaccggcgaggccggcgtgagactggactacatcagcctgcacagaaaggtgagacccgccccccccagcgcccccgtgttctgcgccctgagcagatgcgcccccggcagagccgaccccggcggcgccgaggccgccccccccgccggctgcgcccagctgcacctgcaccccggcgccggcgagggcagaagagccgccgaccccgccgccctgccccaggtgagaggccacccccacctgcagagaagaggcggccccgccggcggcctggtgcccgccaccgccgtggagggcggcagagacctgagaggccacggcggcgagggcggccccgcccagagacccgccagaccccccgccaccttcctgcccagaagagacagaagagccgtggccgccccccccggccccagctgccccggccacccccaggtgatcgcccagcaccagaacctgctgctggccaacaccaccagcgccttcccctacgccctgctgagcaacgacaacgccttcctgagctaccacccccaccccttcgcccagagaaccctgaccgccagattccaggtgaacaacaccagacccccccacgtgcagctgctgagaaagcccgtgctgaccgccatgggcctgctggccctgctggacgaggagcagctgtgggccgaggtgagccaggccggcaccgtgctggacagcaaccacaccgtgggcgtgctggccagcgcccacagaccccagggccccgccgacgcctggagagccgccgtgctgatctacgccagcgacgacaccagagcccaccccaacagaagcgtggccgtgaccctgagactgagaggcgtgccccccggccccggcctggtgtacgtgaccagatacctggacaacggcctgtgcagccccgacggcgagtggagaagactgggcagacccgtgttccccaccgccgagcagttcagaagaatgagagccgccgaggaccccgtggccgccgcccccagacccctgcccgccggcggcagactgaccctgagacccgccctgagactgcccagcctgctgctggtgcacgtgtgcgccagacccgagaagccccccggccaggtgaccagactgagagccctgcccctgacccagggccagctggtgctggtgtggagcgacgagcacgtgggcagcaagtgcctgtggacctacgagatccagttcagccaggacggcaaggcctacacccccgtgagcagaaagcccagcaccttcaacctgttcgtgttcagccccgacaccggcgccgtgagcggcagctacagagtgagagccctggactactgggccagacccggccccttcagcgaccccgtgccctacctggaggtgcccgtgcccagaggcccccccagccccggcaacccctag

SEQ ID NO: 1984 - DNA, 603 bp, synthetic construct
  misc_feature 1..603: note = source = /note="Description of Artificial Sequence: Synthetic coding sequence"
  source 1..603: mol_type = other DNA
atggccctgtggatgagactgctgcccctgctggccctgctggccctgtggggccccgaccccgccgccgccttcgtgaaccagcacctgtgcggcagccacctggtggaggccctgtacctggtgtgcggcgagagaggcttcttctacacccccaagaccagaagagaggccgaggacctgcaggccagcgccctgagcctgagcagcagcaccagcacctggcccgagggcctggacgccaccgccagagccccccccgccctggtggtgaccgccaacatcggccaggccggcggcagcagcagcagacagttcagacagagagccctgggcaccagcgacagccccgtgctgttcatccactgccccggcgccgccggcaccgcccagggcctggagtacagaggcagaagagtgaccaccgagctggtgtgggaggaggtggacagcagcccccagccccagggcagcgagagcctgcccgcccagccccccgcccagcccgccccccagcccgagccccagcaggccagagagcccagccccgaggtgagctgctgcggcctgtggcccagaagaccccagagaagccagaactag

SEQ ID NO: 1985 - DNA, 333 bp, synthetic construct
  misc_feature 1..333: note = source = /note="Description of Artificial Sequence: Synthetic coding sequence"
  source 1..333: mol_type = other DNA
atggccctgtggatgagactgctgcccctgctggccctgctggccctgtggggccccgaccccgccgccgccttcgtgaaccagcacctgtgcggcagccacctggtggaggccctgtacctggtgtgcggcgagagaggcttcttctacacccccaagaccagaagagaggccgaggacctgcaggtgggccaggtggagctgggcggcggccccggcgccggcagcctgcagcccctggccctggagggcagcctgcagaagagaggcatcgtggagcagtgctgcaccagcatctgcagcctgtaccagctggagaactactgcaactag

SEQ ID NO: 1986 - DNA, 333 bp, synthetic construct; identical to SEQ ID NO: 1985
  misc_feature 1..333: note = source = /note="Description of Artificial Sequence: Synthetic coding sequence"
  source 1..333: mol_type = other DNA

SEQ ID NO: 1987 - DNA, 333 bp, synthetic construct; identical to SEQ ID NO: 1985
  misc_feature 1..333: note = source = /note="Description of Artificial Sequence: Synthetic coding sequence"
  source 1..333: mol_type = other DNA

SEQ ID NO: 1988 - DNA, 297 bp, synthetic construct
  misc_feature 1..297: note = source = /note="Description of Artificial Sequence: Synthetic coding sequence"
  source 1..297: mol_type = other DNA
atggccctgtggatgagactgctgcccctgctggccctgctggccctgtggggccccgaccccgccgccgccttcgtgaaccagcacctgtgcggcagccacctggtggaggccctgtacctggtgtgcggcgagagaggcttcttctacacccccaagaccagaagagaggccgaggacctgcagggcagcctgcagcccctggccctggagggcagcctgcagaagagaggcatcgtggagcagtgctgcaccagcatctgcagcctgtaccagctggagaactactgcaactag

SEQ ID NO: 1989 - DNA, 333 bp, synthetic construct
  misc_feature 1..333: note = source = /note="Description of Artificial Sequence: Synthetic coding sequence"
  source 1..333: mol_type = other DNA
atggccctgtggatgagactgctgcccctgctggccctgctggccctgtggggccccgaccccgccgccgccttcgtgaaccagcacctgtgcggcagccacctggtggaggccctgtacctggtgtgcggcgagagaggcttcttctacaccgacaagaccagaagagaggccgaggacctgcaggtgggccaggtggagctgggcggcggccccggcgccggcagcctgcagcccctggccctggagggcagcctgcagaagagaggcatcgtggagcagtgctgcaccagcatctgcagcctgtaccagctggagaactactgcaactag

SEQ ID NO: 1990 - DNA, 333 bp, synthetic construct
  misc_feature 1..333: note = source = /note="Description of Artificial Sequence: Synthetic coding sequence"
  source 1..333: mol_type = other DNA
atggccctgtggatgagactgctgcccctgctggccctgctggccctgtggggccccgaccccgccgccgccttcgtgaaccagcacctgtgcggcagccacctggtggaggccctgtacctggtgtgcggcgagagaggcttcttctacacccccaagaccagaagagaggccgaggacctgcaggtgggccaggtggagctgggcggcggccccggcgccggcagcctgcagcccctggccctggagggcagcctgcagaagagaggcatcgtggagcagtgctgcaccagcatctgcagcctgtaccagctggagaactactgcggctag

SEQ ID NO: 1991 - DNA, 333 bp, synthetic construct
  misc_feature 1..333: note = source = /note="Description of Artificial Sequence: Synthetic coding sequence"
  source 1..333: mol_type = other DNA
atggccctgtggatgagactgctgcccctgctggccctgctggccctgtggggccccgaccccgccgccgccttcgtgaagcagcacctgtgcggcagccacctggtggaggccctgtacctggtgtgcggcgagagaggcttcttctacacccccgagaccagaagagaggccgaggacctgcaggtgggccaggtggagctgggcggcggccccggcgccggcagcctgcagcccctggccctggagggcagcctgcagaagagaggcatcgtggagcagtgctgcaccagcatctgcagcctgtaccagctggagaactactgcaactag

SEQ ID NO: 1992 - DNA, 333 bp, synthetic construct
  misc_feature 1..333: note = source = /note="Description of Artificial Sequence: Synthetic coding sequence"
  source 1..333: mol_type = other DNA
atggccctgtggatgagactgctgcccctgctggccctgctggccctgtggggccccgaccccgccgccgccttcgtgaaccagcacctgtgcggcagccacctggtggaggccctgtacctggtgtgcggcgagagaggcttcttctacaccaagcccaccagaagagaggccgaggacctgcaggtgggccaggtggagctgggcggcggccccggcgccggcagcctgcagcccctggccctggagggcagcctgcagaagagaggcatcgtggagcagtgctgcaccagcatctgcagcctgtaccagctggagaactactgcaactag

SEQ ID NO: 1993 - DNA, 570 bp, synthetic construct
  misc_feature 1..570: note = source = /note="Description of Artificial Sequence: Synthetic coding sequence"
  source 1..570: mol_type = other DNA
atggccctgagcttcagcctgctgatggccgtgctggtgctgagctacaagagcatctgcagcctgggctgcgacctgccccagacccacagcctgggcaacagaagagccctgatcctgctgggccagatgggcagaatcagccccttcagctgcctgaaggacagacacgacttcagaatcccccaggaggagttcgacggcaaccagttccagaaggcccaggccatcagcgtgctgcacgagatgatccagcagaccttcaacctgttcagcaccgaggacagcagcgccgcctgggagcagagcctgctggagaagttcagcaccgagctgtaccagcagctgaacgacctggaggcctgcgtgatccaggaggtgggcgtggaggagacccccctgatgaacgaggacagcatcctggccgtgagaaagtacttccagagaatcaccctgtacctgatcgagagaaagtacagcccctgcgcctgggaggtggtgagagccgagatcatgagaagcctgagcttcagcaccaacctgcagaagagactgagaagaaaggactag

SEQ ID NO: 1994 - DNA, 573 bp, synthetic construct
  misc_feature 1..573: note = source = /note="Description of Artificial Sequence: Synthetic coding sequence"
  source 1..573: mol_type = other DNA
atgatggccagccccttcgccctgctgatggccctggtggtgctgagctgcaagagcagctgcagcctgggctgcgacctgcccgagacccacagcctggacaacagaagaaccctgatgctgctggcccagatgagcagaatcagccccagcagctgcctgatggacagacacgacttcggcttcccccaggaggagttcgacggcaaccagttccagaaggcccccgccatcagcgtgctgcacgagctgatccagcagatcttcaacctgttcaccaccaaggacagcagcgccgcctgggacgaggacctgctggacaagttctgcaccgagctgtaccagcagctgaacgacctggaggcctgcgtgatgcaggaggagagagtgggcgagacccccctgatgaacgccgacagcatcctggccgtgaagaagtacttcagaagaatcaccctgtacctgaccgagaagaagtacagcccctgcgcctgggaggtggtgagagccgagatcatgagaagcctgagcctgagcaccaacctgcaggagagactgagaagaaaggagtag

SEQ ID NO: 1995 - DNA, 570 bp, synthetic construct
  misc_feature 1..570: note = source = /note="Description of Artificial Sequence: Synthetic coding sequence"
  source 1..570: mol_type = other DNA
atggccctgcccttcgccctgatgatggccctggtggtgctgagctgcaagagcagctgcagcctgggctgcaacctgagccagacccacagcctgaacaacagaagaaccctgatgctgatggcccagatgagaagaatcagccccttcagctgcctgaaggacagacacgacttcgagttcccccaggaggagttcgacggcaaccagttccagaaggcccaggccatcagcgtgctgcacgagatgatgcagcagaccttcaacctgttcagcaccaagaacagcagcgccgcctgggacgagaccctgctggagaagttctacatcgagctgttccagcagatgaacgacctggaggcctgcgtgatccaggaggtgggcgtggaggagacccccctgatgaacgaggacagcatcctggccgtgaagaagtacttccagagaatcaccctgtacctgatggagaagaagtacagcccctgcgcctgggaggtggtgagagccgagatcatgagaagcctgagcttcagcaccaacctgcagaagagactgagaagaaaggactag

SEQ ID NO: 1996 - DNA, 570 bp, synthetic construct
  misc_feature 1..570: note = source = /note="Description of Artificial Sequence: Synthetic coding sequence"
  source 1..570: mol_type = other DNA
atggccctgagcttcagcctgctgatggccgtgctggtgctgagctacaagagcatctgcagcctgggctgcgacctgccccagacccacagcctgggcaacagaagagccctgatcctgctggcccagatgggcagaatcagccacttcagctgcctgaaggacagatacgacttcggcttcccccaggaggtgttcgacggcaaccagttccagaaggcccaggccatcagcgccttccacgagatgatccagcagaccttcaacctgttcagcaccaaggacagcagcgccgcctgggacgagaccctgctggacaagttctacatcgagctgttccagcagctgaacgacctggaggcctgcgtgacccaggaggtgggcgtggaggagatcgccctgatgaacgaggacagcatcctggccgtgagaaagtacttccagagaatcaccctgtacctgatgggcaagaagtacagcccctgcgcctgggaggtggtgagagccgagatcatgagaagcttcagcttcagcaccaacctgcagaagggcctgagaagaaaggactag

SEQ ID NO: 1997 - DNA, 570 bp, synthetic construct
  misc_feature 1..570: note = source = /note="Description of Artificial Sequence: Synthetic coding sequence"
  source 1..570: mol_type = other DNA
atggccctgagcttcagcctgctgatggccgtgctggtgctgagctacaagagcatctgcagcctgggctgcgacctgccccagacccacagcctgggcaacagaagagccctgatcctgctggcccagatgggcagaatcagccccttcagctgcctgaaggacagacacgacttcggcctgccccaggaggagttcgacggcaaccagttccagaagacccaggccatcagcgtgctgcacgagatgatccagcagaccttcaacctgttcagcaccgaggacagcagcgccgcctgggagcagagcctgctggagaagttcagcaccgagctgtaccagcagctgaacaacctggaggcctgcgtgatccaggaggtgggcatggaggagacccccctgatgaacgaggacagcatcctggccgtgagaaagtacttccagagaatcaccctgtacctgaccgagaagaagtacagcccctgcgcctgggaggtggtgagagccgagatcatgagaagcctgagcttcagcaccaacctgcagaagatcctgagaagaaaggactag

SEQ ID NO: 1998 - DNA, 567 bp, synthetic construct
  misc_feature 1..567: note = source = /note="Description of Artificial Sequence: Synthetic coding sequence"
  source 1..567: mol_type = other DNA
atggccctgaccttcgccctgctggtggccctgctggtgctgagctgcaagagcagctgcagcgtgggctgcgacctgccccagacccacagcctgggcagcagaagaaccctgatgctgctggcccagatgagaagaatcagcctgttcagctgcctgaaggacagacacgacttcggcttcccccaggaggagttcggcaaccagttccagaaggccgagaccatccccgtgctgcacgagatgatccagcagatcttcaacctgttcagcaccaaggacagcagcgccgcctgggacgagaccctgctggacaagttctacaccgagctgtaccagcagctgaacgacctggaggcctgcgtgatccagggcgtgggcgtgaccgagacccccctgatgaaggaggacagcatcctggccgtgagaaagtacttccagagaatcaccctgtacctgaaggagaagaagtacagcccctgcgcctgggaggtggtgagagccgagatcatgagaagcttcagcctgagcaccaacctgcaggagagcctgagaagcaaggagtag

SEQ ID NO: 1999 - DNA, 570 bp, synthetic construct
  misc_feature 1..570: note = source = /note="Description of Artificial Sequence: Synthetic coding sequence"
  source 1..570: mol_type = other DNA
atggccctgagcttcagcctgctgatggccgtgctggtgctgagctacaagagcatctgcagcctgggctgcgacctgccccagacccacagcctgggcaacagaagagccctgatcctgctggcccagatgggcagaatcagccccttcagctgcctgaaggacagacacgacttcggcttcccccaggaggagttcgacggcaaccagttccagaaggcccaggccatcagcgtgctgcacgagatgatccagcagaccttcaacctgttcagcaccaaggacagcagcgccacctgggagcagagcctgctggagaagttcagcaccgagctgaaccagcagctgaacgacctggaggcctgcgtgatccaggaggtgggcgtggaggagacccccctgatgaacgtggacagcatcctggccgtgaagaagtacttccagagaatcaccctgtacctgaccgagaagaagtacagcccctgcgcctgggaggtggtgagagccgagatcatgagaagcttcagcctgagcaagatcttccaggagagactgagaagaaaggagtag

SEQ ID NO: 2000 - DNA, 570 bp, synthetic construct
  misc_feature 1..570: note = source = /note="Description of Artificial Sequence: Synthetic coding sequence"
  source 1..570: mol_type = other DNA
atggccctgagcttcagcctgctgatggccgtgctggtgctgagctacaagagcatctgcagcctgggctgcgacctgccccagacccacagcctgggcaacagaagagccctgatcctgctggcccagatgggcagaatcagccacttcagctgcctgaaggacagacacgacttcggcttccccgaggaggagttcgacggccaccagttccagaaggcccaggccatcagcgtgctgcacgagatgatccagcagaccttcaacctgttcagcaccgaggacagcagcgccgcctgggagcagagcctgctggagaagttcagcaccgagctgtaccagcagctgaacgacctggaggcctgcgtgatccaggaggtgggcgtggaggagacccccctgatgaacgaggacagcatcctggccgtgagaaagtacttccagagaatcaccctgtacctgaccgagaagaagtacagcccctgcgcctgggaggtggtgagagccgagatcatgagaagcctgagcttcagcaccaacctgcagaagagactgagaagaaaggactag

SEQ ID NO: 2001 - DNA, 570 bp, synthetic construct
  misc_feature 1..570: note = source = /note="Description of Artificial Sequence: Synthetic coding sequence"
  source 1..570: mol_type = other DNA
atggccctgcccttcgtgctgctgatggccctggtggtgctgaactgcaagagcatctgcagcctgggctgcgacctgccccagacccacagcctgagcaacagaagaaccctgatgatcatggcccagatgggcagaatcagccccttcagctgcctgaaggacagacacgacttcggcttcccccaggaggagttcgacggcaaccagttccagaaggcccaggccatcagcgtgctgcacgagatgatccagcagaccttcaacctgttcagcaccaaggacagcagcgccacctgggacgagaccctgctggacaagttctacaccgagctgtaccagcagctgaacgacctggaggcctgcatgatgcaggaggtgggcgtggaggacacccccctgatgaacgtggacagcatcctgaccgtgagaaagtacttccagagaatcaccctgtacctgaccgagaagaagtacagcccctgcgcctgggaggtggtgagagccgagatcatgagaagcttcagcctgagcgccaacctgcaggagagactgagaagaaaggagtag

SEQ ID NO: 2002 - DNA, 570 bp, synthetic construct
  misc_feature 1..570: note = source = /note="Description of Artificial Sequence: Synthetic coding sequence"
  source 1..570: mol_type = other DNA
atggccctgcccttcgccctgctgatggccctggtggtgctgagctgcaagagcagctgcagcctggactgcgacctgccccagacccacagcctgggccacagaagaaccatgatgctgctggcccagatgagaagaatcagcctgttcagctgcctgaaggacagacacgacttcagattcccccaggaggagttcgacggcaaccagttccagaaggccgaggccatcagcgtgctgcacgaggtgatccagcagaccttcaacctgttcagcaccaaggacagcagcgtggcctgggacgagagactgctggacaagctgtacaccgagctgtaccagcagctgaacgacctggaggcctgcgtgatgcaggaggtgtgggtgggcggcacccccctgatgaacgaggacagcatcctggccgtgagaaagtacttccagagaatcaccctgtacctgaccgagaagaagtacagcccctgcgcctgggaggtggtgagagccgagatcatgagaagcttcagcagcagcagaaacctgcaggagagactgagaagaaaggagtag

SEQ ID NO: 2003 - DNA, 570 bp, synthetic construct
  misc_feature 1..570: note = source = /note="Description of Artificial Sequence: Synthetic coding sequence"
  source 1..570: mol_type = other DNA
atggccagaagcttcagcctgctgatggtggtgctggtgctgagctacaagagcatctgcagcctgggctgcgacctgccccagacccacagcctgagaaacagaagagccctgatcctgctggcccagatgggcagaatcagccccttcagctgcctgaaggacagacacgagttcagattccccgaggaggagttcgacggccaccagttccagaagacccaggccatcagcgtgctgcacgagatgatccagcagaccttcaacctgttcagcaccgaggacagcagcgccgcctgggagcagagcctgctggagaagttcagcaccgagctgtaccagcagctgaacgacctggaggcctgcgtgatccaggaggtgggcgtggaggagacccccctgatgaacgaggacttcatcctggccgtgagaaagtacttccagagaatcaccctgtacctgatggagaagaagtacagcccctgcgcctgggaggtggtgagagccgagatcatgagaagcttcagcttcagcaccaacctgaagaagggcctgagaagaaaggactag

SEQ ID NO: 2004 - DNA, 570 bp, synthetic construct
  misc_feature 1..570: note = source = /note="Description of Artificial Sequence: Synthetic coding sequence"
  source 1..570: mol_type = other DNA
atggccctgaccttctacctgctggtggccctggtggtgctgagctacaagagcttcagcagcctgggctgcgacctgccccagacccacagcctgggcaacagaagagccctgatcctgctggcccagatgagaagaatcagccccttcagctgcctgaaggacagacacgacttcgagttcccccaggaggagttcgacgacaagcagttccagaaggcccaggccatcagcgtgctgcacgagatgatccagcagaccttcaacctgttcagcaccaaggacagcagcgccgccctggacgagaccctgctggacgagttctacatcgagctggaccagcagctgaacgacctggagagctgcgtgatgcaggaggtgggcgtgatcgagagccccctgatgtacgaggacagcatcctggccgtgagaaagtacttccagagaatcaccctgtacctgaccgagaagaagtacagcagctgcgcctgggaggtggtgagagccgagatcatgagaagcttcagcctgagcatcaacctgcagaagagactgaagagcaaggagtag

SEQ ID NO: 2005 - DNA, 564 bp, synthetic construct
  misc_feature 1..564: note = source = /note="Description of Artificial Sequence: Synthetic coding sequence"
  source 1..564: mol_type = other DNA
atgaccaacaagtgcctgctgcagatcgccctgctgctgtgcttcagcaccaccgccctgagcatgagctacaacctgctgggcttcctgcagagaagcagcaacttccagtgccagaagctgctgtggcagctgaacggcagactggagtactgcctgaaggacagaatgaacttcgacatccccgaggagatcaagcagctgcagcagttccagaaggaggacgccgccctgaccatctacgagatgctgcagaacatcttcgccatcttcagacaggacagcagcagcaccggctggaacgagaccatcgtggagaacctgctggccaacgtgtaccaccagatcaaccacctgaagaccgtgctggaggagaagctggagaaggaggacttcaccagaggcaagctgatgagcagcctgcacctgaagagatactacggcagaatcctgcactacctgaaggccaaggagtacagccactgcgcctggaccatcgtgagagtggagatcctgagaaacttctacttcatcaacagactgaccggctacctgagaaactag

SEQ ID NO: 2006 - DNA, 537 bp, synthetic construct
  misc_feature 1..537: note = source = /note="Description of Artificial Sequence: Synthetic coding sequence"
  source 1..537: mol_type = other DNA
atgcacagcagcgccctgctgtgctgcctggtgctgctgaccggcgtgagagccagccccggccagggcacccagagcgagaacagctgcacccacttccccggcaacctgcccaacatgctgagagacctgagagacgccttcagcagagtgaagaccttcttccagatgaaggaccagctggacaacctgctgctgaaggagagcctgctggaggacttcaagggctacctgggctgccaggccctgagcgagatgatccagttctacctggaggaggtgatgccccaggccgagaaccaggaccccgacatcaaggcccacgtgaacagcctgggcgagaacctgaagaccctgagactgagactgagaagatgccacagattcctgccctgcgagaacaagagcaaggccgtggagcaggtgaagaacgccttcaacaagctgcaggagaagggcatctacaaggccatgagcgagttcgacatcttcatcaactacatcgaggcctacatgaccatgaagatcagaaactag

SEQ ID NO: 2007 - DNA, 489 bp, synthetic construct
  misc_feature 1..489: note = source = /note="Description of Artificial Sequence: Synthetic coding sequence"
  source 1..489: mol_type = other DNA
atgagaagcagccccggcaacatggagagaatcgtgatctgcctgatggtgatcttcctgggcaccctggtgcacaagagcagcagccagggccaggacagacacatgatcagaatgagacagctgatcgacatcgtggaccagctgaagaactacgtgaacgacctggtgcccgagttcctgcccgcccccgaggacgtggagaccaactgcgagtggagcgccttcagctgcttccagaaggcccagctgaagagcgccaacaccggcaacaacgagagaatcatcaacgtgagcatcaagaagctgaagagaaagccccccagcaccaacgccggcagaagacagaagcacagactgacctgccccagctgcgacagctacgagaagaagccccccaaggagttcctggagagattcaagagcctgctgcagaagatgatccaccagcacctgagcagcagaacccacggcagcgaggacagctag

SEQ ID NO: 2008 - DNA, 534 bp, synthetic construct
  misc_feature 1..534: note = source = /note="Description of Artificial Sequence: Synthetic coding sequence"
  source 1..534: mol_type = other DNA
atgttccacgtgagcttcagatacatcttcggcctgccccccctgatcctggtgctgctgcccgtggccagcagcgactgcgacatcgagggcaaggacggcaagcagtacgagagcgtgctgatggtgagcatcgaccagctgctggacagcatgaaggagatcggcagcaactgcctgaacaacgagttcaacttcttcaagagacacatctgcgacgccaacaaggagggcatgttcctgttcagagccgccagaaagctgagacagttcctgaagatgaacagcaccggcgacttcgacctgcacctgctgaaggtgagcgagggcaccaccatcctgctgaactgcaccggccaggtgaagggcagaaagcccgccgccctgggcgaggcccagcccaccaagagcctggaggagaacaagagcctgaaggagcagaagaagctgaacgacctgtgcttcctgaagagactgctgcaggagatcaagacctgctggaacaagatcctgatgggcaccaaggagcactag

SEQ ID NO: 2009 - DNA, 216 bp, synthetic construct
  misc_feature 1..216: note = source = /note="Description of Artificial Sequence: Synthetic coding sequence"
  source 1..216: mol_type = other DNA
atgttccacgtgagcttcagatacatcttcggcctgccccccctgatcctggtgctgctgcccgtggccagcagcgactgcgacatcgagggcaaggacggcaagcagtacgagagcgtgctgatggtgagcatcgaccagctgctgaaccagccctacaagaagaaggagaagagaaccgagagaaagcagcagagcgccatgagcaacaactag

SEQ ID NO: 2010 - DNA, 393 bp, synthetic construct
  misc_feature 1..393: note = source = /note="Description of Artificial Sequence: Synthetic coding sequence"
  source 1..393: mol_type = other DNA
gtgagcttcagatacatcttcggcctgccccccctgatcctggtgctgctgcccgtggccagcagcgactgcgacatcgagggcaaggacggcaagcagtacgagagcgtgctgatggtgagcatcgaccagctgctggacagcatgaaggagatcggcagcaactgcctgaacaacgagttcaacttcttcaagagacacatctgcgacgccaacaaggtgaagggcagaaagcccgccgccctgggcgaggcccagcccaccaagagcctggaggagaacaagagcctgaaggagcagaagaagctgaacgacctgtgcttcctgaagagactgctgcaggagatcaagacctgctggaacaagatcctgatgggcaccaaggagcactag

SEQ ID NO: 2011 - DNA, 216 bp, synthetic construct; identical to SEQ ID NO: 2009
  misc_feature 1..216: note = source = /note="Description of Artificial Sequence: Synthetic coding sequence"
  source 1..216: mol_type = other DNA

SEQ ID NO: 2012 - DNA, 114 bp, synthetic construct
  misc_feature 1..114: note = source = /note="Description of Artificial Sequence: Synthetic coding sequence"
  source 1..114: mol_type = other DNA
atgttccacgtgagcttcagatacatcttcggcctgccccccctgatcctggtgctgctgcccgtggccagcagcgactgcgacatcgagggccagcacgagagaaactggtag

SEQ ID NO: 2013 - DNA, 402 bp, synthetic construct
  misc_feature 1..402: note = source = /note="Description of Artificial Sequence: Synthetic coding sequence"
  source 1..402: mol_type = other DNA
atgttccacgtgagcttcagatacatcttcggcctgccccccctgatcctggtgctgctgcccgtggccagcagcgactgcgacatcgagggcaaggacggcaagcagtacgagagcgtgctgatggtgagcatcgaccagctgctggacagcatgaaggagatcggcagcaactgcctgaacaacgagttcaacttcttcaagagacacatctgcgacgccaacaaggtgaagggcagaaagcccgccgccctgggcgaggcccagcccaccaagagcctggaggagaacaagagcctgaaggagcagaagaagctgaacgacctgtgcttcctgaagagactgctgcaggagatcaagacctgctggaacaagatcctgatgggcaccaaggagcactag

SEQ ID NO: 2014 - DNA, 114 bp, synthetic construct; identical to SEQ ID NO: 2012
  misc_feature 1..114: note = source = /note="Description of Artificial Sequence: Synthetic coding sequence"
  source 1..114: mol_type = other DNA

SEQ ID NO: 2015 - DNA, 195 bp, synthetic construct
  misc_feature 1..195: note = source = /note="Description of Artificial Sequence: Synthetic coding sequence"
  source 1..195: mol_type = other DNA
atgaaggagatcggcagcaactgcctgaacaacgagttcaacttcttcaagagacacatctgcgacgccaacaaggaggagaacaagagcctgaaggagcagaagaagctgaacgacctgtgcttcctgaagagactgctgcaggagatcaagacctgctggaacaagatcctgatgggcaccaaggagcactag

SEQ ID NO: 2016 - DNA, 2643 bp, synthetic construct
  misc_feature 1..2643: note = source = /note="Description of Artificial Sequence: Synthetic coding sequence"
  source 1..2643: mol_type = other DNA
atggccgagctgtacagagtgctggaggccggcaagatcggcatcttcgagagccccaccggcaccggcaagagcctgagcctgatctgcggcgccctgagctggctgagagacttcgagcagaagaagagagaggaggaggccagactgctggagaccggcaccggccccctgcacgacgagaaggacgagagcctgtgcctgagcagcagctgcgagggcgccgccggcacccccagacccgccggcgagcccgcctgggtgacccagttcgtgcagaagaaggaggagagagacctggtggacagactgaaggccgagcaggccagaagaaagcagagagaggagagactgcagcagctgcagcacagagtgcagctgaagtacgccgccaagagactgagacaggaggaggaggagagagagaacctgctgagactgagcagagagatgctggagaccggccccgaggccgagagactggagcagctggagagcggcgaggaggagctggtgctggccgagtacgagagcgacgaggagaagaaggtggccagcagagtggacgaggacgaggacgacctggaggaggagcacatcaccaagatctactactgcagcagaacccacagccagctggcccagttcgtgcacgaggtgaagaagagccccttcggcaaggacgtgagactggtgagcctgggcagcagacagaacctgtgcgtgaacgaggacgtgaagagcctgggcagcgtgcagctgatcaacgacagatgcgtggacatgcagagaagcagacacgagaagaagaagggcgccgaggaggagaagcccaagagaagaagacaggagaagcaggccgcctgccccttctacaaccacgagcagatgggcctgctgagagacgaggccctggccgaggtgaaggacatggagcagctgctggccctgggcaaggaggccagagcctgcccctactacggcagcagactggccatccccgccgcccagctggtggtgctgccctaccagatgctgctgcacgccgccaccagacaggccgccggcatcagactgcaggaccaggtggtgatcatcgacgaggcccacaacctgatcgacaccatcaccggcatgcacagcgtggaggtgagcggcagccagctgtgccaggcccacagccagctgctgcagtacgtggagagatacggcaagagactgaaggccaagaacctgatgtacctgaagcagatcctgtacctgctggagaagttcgtggccgtgctgggcggcaacatcaagcagaaccccaacacccagagcctgagccagaccggcaccgagctgaagaccatcaacgacttcctgttccagagccagatcgacaacatcaacctgttcaaggtgcagagatactgcgagaagagcatgatcagcagaaagctgttcggcttcaccgagagatacggcgccgtgttcagcagcagagagcagcccaagctggccggcttccagcagttcctgcagagcctgcagcccagaaccaccgaggccctggccgcccccgccgacgagagccaggccagcaccctgagacccgccagccccctgatgcacatccagggcttcctggccgccctgaccaccgccaaccaggacggcagagtgatcctgagcagacagggcagcctgagccagagcaccctgaagttcctgctgctgaaccccgccgtgcacttcgcccaggtggtgaaggagtgcagagccgtggtgatcgccggcggcaccatgcagcccgtgagcgacttcagacagcagctgctggcctgcgccggcgtggaggccgagagagtggtggagttcagctgcggccacgtgatcccccccgacaacatcctgcccctggtgatctgcagcggcatcagcaaccagcccctggagttcaccttccagaagagagagctgccccagatgatggacgaggtgggcagaatcctgtgcaacctgtgcggcgtggtgcccggcggcgtggtgtgcttcttccccagctacgagtacctgagacaggtgcacgcccactgggagaagggcggcctgctgggcagactggccgccagaaagaagatcttccaggagcccaagagcgcccaccaggtggagcaggtgctgctggcctacagcagatgcatccaggcctgcggccaggagagaggccaggtgaccggcgccctgctgctgagcgtggtgggcggcaagatgagcgagggcatcaacttcagcgacaacctgggcagatgcgtggtgatggtgggcatgcccttccccaacatcagaagcgccgagctgcaggagaagatggcctacctggaccagaccctgcccagagcccccggccaggccccccccggcaaggccctggtggagaacctgtgcatgaaggccgtgaaccagagcatcggcagagccatcagacaccagaaggacttcgccagcgtggtgctgctggaccagagatacgccagaccccccgtgctggccaagctgcccgcctggatcagagccagagtggaggtgaaggccaccttcggccccgccatcgccgccgtgcagaagttccacagagagaagagcgccagcagctag

SEQ ID NO: 2017 - DNA, 738 bp, synthetic construct
  misc_feature 1..738: note = source = /note="Description of Artificial Sequence: Synthetic coding sequence"
  source 1..738: mol_type = other DNA
atgaagaagacccagacctggatcctgacctgcatctacctgcagctgctgctgttcaaccccctggtgaagaccgagggcatctgcagaaacagagtgaccaacaacgtgaaggacgtgaccaagctggtggccaacctgcccaaggactacatgatcaccctgaagtacgtgcccggcatggacgtgctgcccagccactgctggatcagcgagatggtggtgcagctgagcgacagcctgaccgacctgctggacaagttcagcaacatcagcgagggcctgagcaactacagcatcatcgacaagctggtgaacatcgtggacgacctggtggagtgcgtgaaggagaacagcagcaaggacctgaagaagagcttcaagagccccgagcccagactgttcacccccgaggagttcttcagaatcttcaacagaagcatcgacgccttcaaggacttcgtggtggccagcgagaccagcgactgcgtggtgagcagcaccctgagccccgagaagggcaaggccaagaacccccccggcgacagcagcctgcactgggccgccatggccctgcccgccctgttcagcctgatcatcggcttcgccttcggcgccctgtactggaagaagagacagcccagcctgaccagagccgtggagaacatccagatcaacgaggaggacaacgagatcagcatgctgcaggagaaggagagagagttccaggaggtgtag

SEQ ID NO: 2018 - DNA, 93 bp, synthetic construct
  misc_feature 1..93: note = source = /note="Description of Artificial Sequence: Synthetic coding sequence"
  source 1..93: mol_type = other DNA
ggcatggacgtgctgggcagacccaagatccccctggagacccccgcctacaccggccagccctggcactgccagcactgcttcctgctgtag

SEQ ID NO: 2019 - DNA, 3039 bp, synthetic construct
  misc_feature 1..3039: note = source = /note="Description of Artificial Sequence: Synthetic coding sequence"
  source 1..3039: mol_type = other DNA
atgcccgccagcgccccccccagaagacccagaccccccccccccagcctgagcctgctgctggtgctgctgggcctgggcggcagaagactgagagccgagcccggcgacggcgcccagacctgggccagattcagcagaccccccgcccccgaggccgccggcctgttccagggcaccttccccgacggcttcctgtgggccgtgggcagcgccgcctaccagaccgagggcggctggcagcagcacggcaagggcgccagcatctgggacaccttcacccaccaccccctggccccccccggcgacagcagaaacgccagcctgcccctgggcgcccccagccccctgcagcccgccaccggcgacgtggccagcgacagctacaacaacgtgttcagagacaccgaggccctgagagagctgggcgtgacccactacagattcagcatcagctgggccagagtgctgcccaacggcagcgccggcgtgcccaacagagagggcctgagatactacagaagactgctggagagactgagagagctgggcgtgcagcccgtggtgaccctgtaccactgggacctgccccagagactgcaggacgcctacggcggctgggccaacagagccctggccgaccacttcagagactacgccgagctgtgcttcagacacttcggcggccaggtgaagtactggatcaccatcgacaacccctacgtggtggcctggcacggctacgccaccggcagactggcccccggcatcagaggcagccccagactgggctacctggtggcccacaacctgctgctggcccacgccaaggtgtggcacctgtacaacaccagcttcagacccacccagggcggccaggtgagcatcgccctgagcagccactggatcaaccccagaagaatgaccgaccacagcatcaaggagtgccagaagagcctggacttcgtgctgggctggttcgccaagcccgtgttcatcgacggcgactaccccgagagcatgaagaacaacctgagcagcatcctgcccgacttcaccgagagcgagaagaagttcatcaagggcaccgccgacttcttcgccctgtgcttcggccccaccctgagcttccagctgctggacccccacatgaagttcagacagctggagagccccaacctgagacagctgctgagctggatcgacctggagttcaaccacccccagatcttcatcgtggagaacggctggttcgtgagcggcaccaccaagagagacgacgccaagtacatgtactacctgaagaagttcatcatggagaccctgaaggccatcaagctggacggcgtggacgtgatcggctacaccgcctggagcctgatggacggcttcgagtggcacagaggctacagcatcagaagaggcctgttctacgtggacttcctgagccaggacaagatgctgctgcccaagagcagcgccctgttctaccagaagctgatcgagaagaacggcttcccccccctgcccgagaaccagcccctggagggcaccttcccctgcgacttcgcctggggcgtggtggacaactacatccaggtggacaccaccctgagccagttcaccgacctgaacgtgtacctgtgggacgtgcaccacagcaagagactgatcaaggtggacggcgtggtgaccaagaagagaaagagctactgcgtggacttcgccgccatccagccccagatcgccctgctgcaggagatgcacgtgacccacttcagattcagcctggactgggccctgatcctgcccctgggcaaccagagccaggtgaaccacaccatcctgcagtactacagatgcatggccagcgagctggtgagagtgaacatcacccccgtggtggccctgtggcagcccatggcccccaaccagggcctgcccagactgctggccagacagggcgcctgggagaacccctacaccgccctggccttcgccgagtacgccagactgtgcttccaggagctgggccaccacgtgaagctgtggatcaccatgaacgagccctacaccagaaacatgacctacagcgccggccacaacctgctgaaggcccacgccctggcctggcacgtgtacaacgagaagttcagacacgcccagaacggcaagatcagcatcgccctgcaggccgactggatcgagcccgcctgccccttcagccagaaggacaaggaggtggccgagagagtgctggagttcgacatcggctggctggccgagcccatcttcggcagcggcgactacccctgggtgatgagagactggctgaaccagagaaacaacttcctgctgccctacttcaccgaggacgagaagaagctgatccagggcaccttcgacttcctggccctgagccactacaccaccatcctggtggacagcgagaaggaggaccccatcaagtacaacgactacctggaggtgcaggagatgaccgacatcacctggctgaacagccccagccaggtggccgtggtgccctggggcctgagaaaggtgctgaactggctgaagttcaagtacggcgacctgcccatgtacatcatcagcaacggcatcgacgacggcctgcacgccgaggacgaccagctgagagtgtactacatgcagaactacatcaacgaggccctgaaggcccacatcctggacggcatcaacctgtgcggctacttcgcctacagcttcaacgacagaaccgcccccagattcggcctgtacagatacgccgccgaccagttcgagcccaaggccagcatgaagcactacagaaagatcatcgacagcaacggcttccccggccccgagaccctggagagattctgccccgaggagttcaccgtgtgcaccgagtgcagcttcttccacaccagaaagagcctgctggccttcatcgccttcctgttcttcgccagcatcatcagcctgagcctgatcttctactacagcaagaagggcagaagaagctacaagtag

SEQ ID NO: 2020 - DNA, 729 bp, synthetic construct
  misc_feature 1..729: note = source = /note="Description of Artificial Sequence: Synthetic coding sequence"
  source 1..729: mol_type = other DNA
atgaccgaccacagcatcaaggagtgccagaagagcctggacttcgtgctgggctggttcgccaagcccgtgttcatcgacggcgactaccccgagagcatgaagaacaacctgagcagcatcctgcccgacttcaccgagagcgagaagaagttcatcaagggcaccgccgacttcttcgccctgtgcttcggccccaccctgagcttccagctgctggacccccacatgaagttcagacagctggagagccccaacctgagacagctgctgagctggatcgacctggagttcaaccacccccagatcttcatcgtggagaacggctggttcgtgagcggcaccaccaagagagacgacgccaagtacatgtactacctgaagaagttcatcatggagaccctgaaggccatcaagctggacggcgtggacgtgatcggctacaccgcctggagcctgatggacggcttcgagtggcacagaggctacagcatcagaagaggcctgttctacgtggacttcctgagccaggacaagatgctgctgcccaagagcagcgccctgttctaccagaagctgatcgagaagaacggcttcccccccctgcccgagaaccagcccctggagggcaccttcccctgcgacttcgcctggggcgtggtggacaactacatccaggtgagccagctgaccaagcccatcagcagcctgaccaagccctaccactag

SEQ ID NO: 2021 - DNA, 1440 bp, synthetic construct
  misc_feature 1..1440: note = source = /note="Description of Artificial Sequence: Synthetic coding sequence"
  source 1..1440: mol_type = other DNA
atgagacagccccccggcgagagcgacatggccgtgagcgacgccctgctgcccagcttcagcaccttcgccagcggccccgccggcagagagaagaccctgagacaggccggcgcccccaacaacagatggagagaggagctgagccacatgaagagactgccccccgtgctgcccggcagaccctacgacctggccgccgccaccgtggccaccgacctggagagcggcggcgccggcgccgcctgcggcggcagcaacctggcccccctgcccagaagagagaccgaggagttcaacgacctgctggacctggacttcatcctgagcaacagcctgacccacccccccgagagcgtggccgccaccgtgagcagcagcgccagcgccagcagcagcagcagccccagcagcagcggccccgccagcgcccccagcacctgcagcttcacctaccccatcagagccggcaacgaccccggcgtggcccccggcggcaccggcggcggcctgctgtacggcagagagagcgcccccccccccaccgcccccttcaacctggccgacatcaacgacgtgagccccagcggcggcttcgtggccgagctgctgagacccgagctggaccccgtgtacatccccccccagcagccccagccccccggcggcggcctgatgggcaagttcgtgctgaaggccagcctgagcgcccccggcagcgagtacggcagccccagcgtgatcagcgtgagcaagggcagccccgacggcagccaccccgtggtggtggccccctacaacggcggcccccccagaacctgccccaagatcaagcaggaggccgtgagcagctgcacccacctgggcgccggcccccccctgagcaacggccacagacccgccgcccacgacttccccctgggcagacagctgcccagcagaaccacccccaccctgggcctggaggaggtgctgagcagcagagactgccaccccgccctgcccctgccccccggcttccacccccaccccggccccaactaccccagcttcctgcccgaccagatgcagccccaggtgccccccctgcactaccaggagctgatgccccccggcagctgcatgcccgaggagcccaagcccaagagaggcagaagaagctggcccagaaagagaaccgccacccacacctgcgactacgccggctgcggcaagacctacaccaagagcagccacctgaaggcccacctgagaacccacaccggcgagaagccctaccactgcgactgggacggctgcggctggaagttcgccagaagcgacgagctgaccagacactacagaaagcacaccggccacagacccttccagtgccagaagtgcgacagagccttcagcagaagcgaccacctggccctgcacatgaagagacacttctag

SEQ ID NO: 2022 - DNA, 699 bp, synthetic construct
  misc_feature 1..699: note = source = /note="Description of Artificial Sequence: Synthetic coding sequence"
  source 1..699: mol_type = other DNA
atggccgtgagcgacgccctgctgcccagcttcagcaccttcgccagcggccccgccggcagagagaagaccctgagacaggccggcgcccccaacaacagatggagagaggagctgagccacatgaagagactgccccccgtgctgcccggcagaccctacgacctggccgccgccaccgtggccaccgacctggagagcggcggcgccggcgccgcctgcggcggcagcaacctggcccccctgcccagaagagagaccgaggagttcaacgacctgctggacctggacttcatcctgagcaacagcctgacccacccccccgagagcgtggccgccaccgtgagcagcagcgccagcgccagcagcagcagcagccccagcagcagcggccccgccagcgcccccagcacctgcagcttcacctaccccatcagagccggcaacgaccccggcgtggcccccggcggcaccggcggcggcctgctgtacggcagagagagcgcccccccccccaccgcccccttcaacctggccgacatcaacgacgtgagccccagcggcggcttcgtggccgagctgctgagacccgagctggaccccgtgtacatccccccccagcagccccagccccccggcggcggcctgatgggcaagttcgtgctgaaggccagcctgagcgcccccggcagcgagtag

SEQ ID NO: 2023 - DNA, 69 bp, synthetic construct
  misc_feature 1..69: note = source = /note="Description of Artificial Sequence: Synthetic coding sequence"
  source 1..69: mol_type = other DNA
atgagacagccccccggcgagagcgacatggccgtgagcgacgccctgctgcccagcttcagcacctag

SEQ ID NO: 2024 - DNA, 117 bp, synthetic construct
  misc_feature 1..117: note = source = /note="Description of Artificial Sequence: Synthetic coding sequence"
  source 1..117: mol_type = other DNA
atgagacagccccccggcgagagcgacatggccgtgagcgacgccctgctgcccagcttcagcaccttcgccagcggccccgccggcagagagaagaccctgagacaggccggctag

SEQ ID NO: 2025 - DNA, 1323 bp, synthetic construct
  misc_feature 1..1323: note = source = /note="Description of Artificial Sequence: Synthetic coding sequence"
  source 1..1323: mol_type = other DNA
atgggcccccccggcagcccctggcagtgggtgaccctgctgctgggcctgctgctgccccccgccgcccccttctggctgctgaacgtgctgttccccccccacaccacccccaaggccgagctgagcaaccacaccagacccgtgatcctggtgcccggctgcctgggcaaccagctggaggccaagctggacaagcccgacgtggtgaactggatgtgctacagaaagaccgaggacttcttcaccatctggctggacctgaacatgttcctgcccctgggcgtggactgctggatcgacaacaccagagtggtgtacaacagaagcagcggcctggtgagcaacgcccccggcgtgcagatcagagtgcccggcttcggcaagacctacagcgtggagtacctggacagcagcaagctggccggctacctgcacaccctggtgcagaacctggtgaacaacggctacgtgagagacgagaccgtgagagccgccccctacgactggagactggagcccggccagcaggaggagtactacagaaagctggccggcctggtggaggagatgcacgccgcctacggcaagcccgtgttcctgatcggccacagcctgggctgcctgcacctgctgtacttcctgctgagacagccccaggcctggaaggacagattcatcgacggcttcatcagcctgggcgccccctggggcggcagcatcaagcccatgctggtgctggccagcggcgacaaccagggcatccccatcatgagcagcatcaagctgaaggaggagcagagaatcaccaccaccagcccctggatgttccccagcagaatggcctggcccgaggaccacgtgttcatcagcacccccagcttcaactacaccggcagagacttccagagattcttcgccgacctgcacttcgaggagggctggtacatgtggctgcagagcagagacctgctggccggcctgcccgcccccggcgtggaggtgtactgcctgtacggcgtgggcctgcccacccccagaacctacatctacgaccacggcttcccctacaccgaccccgtgggcgtgctgtacgaggacggcgacgacaccgtggccaccagaagcaccgagctgtgcggcctgtggcagggcagacagccccagcccgtgcacctgctgcccctgcacggcatccagcacctgaacatggtgttcagcaacctgaccctggagcacatcaacgccatcctgctgggcgcctacagacagggcccccccgccagccccaccgccagccccgagccccccccccccgagtag

SEQ ID NO: 2026 - DNA, 753 bp, synthetic construct
  misc_feature 1..753: note = source = /note="Description of Artificial Sequence: Synthetic coding sequence"
  source 1..753: mol_type = other DNA
atggccgacaacttcagcctgcacgacgccctgagcggcagcggcaaccccaacccccagggctggcccggcgcctggggcaaccagcccgccggcgccggcggctaccccggcgccagctaccccggcgcctaccccggccaggccccccccggcgcctaccccggccaggccccccccggcgcctaccccggcgcccccggcgcctaccccggcgcccccgcccccggcgtgtaccccggcccccccagcggccccggcgcctaccccagcagcggccagcccagcgccaccggcgcctaccccgccaccggcccctacggcgcccccgccggccccctgatcgtgccctacaacctgcccctgcccggcggcgtggtgcccagaatgctgatcaccatcctgggcaccgtgaagcccaacgccaacagaatcgccctggacttccagagaggcaacgacgtggccttccacttcaaccccagattcaacgagaacaacagaagagtgatcgtgtgcaacaccaagctggacaacaactggggcagagaggagagacagagcgtgttccccttcgagagcggcaagcccttcaagatccaggtgctggtggagcccgaccacttcaaggtggccgtgaacgacgcccacctgctgcagtacaaccacagagtgaagaagctgaacgagatcagcaagctgggcatcagcggcgacatcgacctgaccagcgccagctacaccatgatctag

SEQ ID NO: 2027 - DNA, 630 bp, synthetic construct
  misc_feature 1..630: note = source = /note="Description of Artificial Sequence: Synthetic coding sequence"
  source 1..630: mol_type = other DNA
atgggcagcgtgagcaaccagcagttcgccggcggctgcgccaaggccgccgaggaggcccccgaggaggcccccgaggacgccgccagagccgccgacgagccccagctgctgcacggcgccggcatctgcaagtggttcaacgtgagaatgggcttcggcttcctgagcatgaccgccagagccggcgtggccctggacccccccgtggacgtgttcgtgcaccagagcaagctgcacatggagggcttcagaagcctgaaggagggcgaggccgtggagttcaccttcaagaagagcgccaagggcctggagagcatcagagtgaccggccccggcggcgtgttctgcatcggcagcgagagaagacccaagggcaagagcatgcagaagagaagaagcaagggcgacagatgctacaactgcggcggcctggaccaccacgccaaggagtgcaagctgcccccccagcccaagaagtgccacttctgccagagcatcagccacatggtggccagctgccccctgaaggcccagcagggccccagcgcccagggcaagcccacctacttcagagaggaggaggaggagatccacagccccaccctgctgcccgaggcccagaactag

SEQ ID NO: 2028 - DNA, 630 bp, synthetic construct; identical to SEQ ID NO: 2027
  misc_feature 1..630: note = source = /note="Description of Artificial Sequence: Synthetic coding sequence"
  source 1..630: mol_type = other DNA

SEQ ID NO: 2029 - DNA, 660 bp, synthetic construct
  misc_feature 1..660: note = source = /note="Description of Artificial Sequence: Synthetic coding sequence"
  source 1..660: mol_type = other DNA
atgaagatgagattcctgggcctggtggtgtgcctggtgctgtggaccctgcacagcgagggcagcggcggcaagctgaccgccgtggaccccgagaccaacatgaacgtgagcgagatcatcagctactggggcttccccagcgaggagtacctggtggagaccgaggacggctacatcctgtgcctgaacagaatcccccacggcagaaagaaccacagcgacaagggccccaagcccgtggtgttcctgcagcacggcctgctggccgacagcagcaactgggtgaccaacctggccaacagcagcctgggcttcatcctggccgacgccggcttcgacgtgtggatgggcaacagcagaggcaacacctggagcagaaagcacaagaccctgagcgtgagccaggacgagttctgggccttcagctacgacgagatggccaagtacgacctgcccgccagcatcaacttcatcctgaacaagaccggccaggagcaggtgtactacgtgggccacagccagggcaccaccatcggcttcatcgccttcagccagatccccgagctggccaagagaatcaagatgttcttcgccctgggccccgtggccagcgtggccttctgcaccagccccatggccaagctgggcagactgtag

SEQ ID NO: 2030 - DNA, 1200 bp, synthetic construct
  misc_feature 1..1200: note = source = /note="Description of Artificial Sequence: Synthetic coding sequence"
  source 1..1200: mol_type = other DNA
atgaagatgagattcctgggcctggtggtgtgcctggtgctgtggaccctgcacagcgagggcagcggcggcaagctgaccgccgtggaccccgagaccaacatgaacgtgagcgagatcatcagctactggggcttccccagcgaggagtacctggtggagaccgaggacggctacatcctgtgcctgaacagaatcccccacggcagaaagaaccacagcgacaagggccccaagcccgtggtgttcctgcagcacggcctgctggccgacagcagcaactgggtgaccaacctggccaacagcagcctgggcttcatcctggccgacgccggcttcgacgtgtggatgggcaacagcagaggcaacacctggagcagaaagcacaagaccctgagcgtgagccaggacgagttctgggccttcagctacgacgagatggccaagtacgacctgcccgccagcatcaacttcatcctgaacaagaccggccaggagcaggtgtactacgtgggccacagccagggcaccaccatcggcttcatcgccttcagccagatccccgagctggccaagagaatcaagatgttcttcgccctgggccccgtggccagcgtggccttctgcaccagccccatggccaagctgggcagactgcccgaccacctgatcaaggacctgttcggcgacaaggagttcctgccccagagcgccttcctgaagtggctgggcacccacgtgtgcacccacgtgatcctgaaggagctgtgcggcaacctgtgcttcctgctgtgcggcttcaacgagagaaacctgaacatgagcagagtggacgtgtacaccacccacagccccgccggcaccagcgtgcagaacatgctgcactggagccaggccgtgaagttccagaagttccaggccttcgactggggcagcagcgccaagaactacttccactacaaccagagctacccccccacctacaacgtgaaggacatgctggtgcccaccgccgtgtggagcggcggccacgactggctggccgacgtgtacgacgtgaacatcctgctgacccagatcaccaacctggtgttccacgagagcatccccgagtgggagcacctggacttcatctggggcctggacgccccctggagactgtacaacaagatcatcaacctgatgagaaagtaccagtag

SEQ ID NO: 2031 - DNA, 1074 bp, synthetic construct
  misc_feature 1..1074: note = source = /note="Description of Artificial Sequence: Synthetic coding sequence"
  source 1..1074: mol_type = other DNA
atgaagctgagaaccctggccgtgagcgccaccgtggtgaaggacggcgtgagcggcgtgtgcagcttcagatgcagcgacgtgagcggcgtgctgcccagcggccccaagcccgtggtgttcctgcagcacggcctgctggccgacagcagcaactgggtgaccaacctggccaacagcagcctgggcttcatcctggccgacgccggcttcgacgtgtggatgggcaacagcagaggcaacacctggagcagaaagcacaagaccctgagcgtgagccaggacgagttctgggccttcagctacgacgagatggccaagtacgacctgcccgccagcatcaacttcatcctgaacaagaccggccaggagcaggtgtactacgtgggccacagccagggcaccaccatcggcttcatcgccttcagccagatccccgagctggccaagagaatcaagatgttcttcgccctgggccccgtggccagcgtggccttctgcaccagccccatggccaagctgggcagactgcccgaccacctgatcaaggacctgttcggcgacaaggagttcctgccccagagcgccttcctgaagtggctgggcacccacgtgtgcacccacgtgatcctgaaggagctgtgcggcaacctgtgcttcctgctgtgcggcttcaacgagagaaacctgaacatgagcagagtggacgtgtacaccacccacagccccgccggcaccagcgtgcagaacatgctgcactggagccaggccgtgaagttccagaagttccaggccttcgactggggcagcagcgccaagaactacttccactacaaccagagctacccccccacctacaacgtgaaggacatgctggtgcccaccgccgtgtggagcggcggccacgactggctggccgacgtgtacgacgtgaacatcctgctgacccagatcaccaacctggtgttccacgagagcatccccgagtgggagcacctggacttcatctggggcctggacgccccctggagactgtacaacaagatcatcaacctgatgagaaagtaccagtag

SEQ ID NO: 2032 - DNA, 1200 bp, synthetic construct; identical to SEQ ID NO: 2030
  misc_feature 1..1200: note = source = /note="Description of Artificial Sequence: Synthetic coding sequence"
  source 1..1200: mol_type = other DNA

SEQ ID NO: 2033 - DNA, 1032 bp, synthetic construct
  misc_feature 1..1032: note = source = /note="Description of Artificial Sequence: Synthetic coding sequence"
  source 1..1032: mol_type = other DNA
atggcctgcctggagttcgtgcccttcgacgtgcagatgtgcctggagttcctgcccagcggccccaagcccgtggtgttcctgcagcacggcctgctggccgacagcagcaactgggtgaccaacctggccaacagcagcctgggcttcatcctggccgacgccggcttcgacgtgtggatgggcaacagcagaggcaacacctggagcagaaagcacaagaccctgagcgtgagccaggacgagttctgggccttcagctacgacgagatggccaagtacgacctgcccgccagcatcaacttcatcctgaacaagaccggccaggagcaggtgtactacgtgggccacagccagggcaccaccatcggcttcatcgccttcagccagatccccgagctggccaagagaatcaagatgttcttcgccctgggccccgtggccagcgtggccttctgcaccagccccatggccaagctgggcagactgcccgaccacctgatcaaggacctgttcggcgacaaggagttcctgccccagagcgccttcctgaagtggctgggcacccacgtgtgcacccacgtgatcctgaaggagctgtgcggcaacctgtgcttcctgctgtgcggcttcaacgagagaaacctgaacatgagcagagtggacgtgtacaccacccacagccccgccggcaccagcgtgcagaacatgctgcactggagccaggccgtgaagttccagaagttccaggccttcgactggggcagcagcgccaagaactacttccactacaaccagagctacccccccacctacaacgtgaaggacatgctggtgcccaccgccgtgtggagcggcggccacgactggctggccgacgtgtacgacgtgaacatcctgctgacccagatcaccaacctggtgttccacgagagcatccccgagtgggagcacctggacttcatctggggcctggacgccccctggagactgtacaacaagatcatcaacctgatgagaaagtaccagtag

SEQ ID NO: 2034 - DNA, 1206 bp, synthetic construct
  misc_feature 1..1206: note = source = /note="Description of Artificial Sequence: Synthetic coding sequence"
  source 1..1206: mol_type = other DNA
atggcctgcctggagttcgtgcccttcgacgtgcagatgtgcctggagttcctgcccagcggcgagttcgtggtgctgctgaccagcggcgtgcagctgcagaccttcaccgtgagcgtgaccgacctgaagggcggcgccagcggcgtggtgagaagcagcagatgggtgagaggcttcaccgacttcagaagcaaggccgtggacctgtgcggccccaagcccgtggtgttcctgcagcacggcctgctggccgacagcagcaactgggtgaccaacctggccaacagcagcctgggcttcatcctggccgacgccggcttcgacgtgtggatgggcaacagcagaggcaacacctggagcagaaagcacaagaccctgagcgtgagccaggacgagttctgggccttcagagtgcccttcctggactacagctacgacgagatggccaagtacgacctgcccgccagcatcaacttcatcctgaacaagaccggccaggagcaggtgtactacgtgggccacagccagggcaccaccatcggcttcatcgccttcagccagatccccgagctggccaagagaatcaagatgttcttcgccctgggccccgtggccagcgtggccttctgcaccagccccatggccaagctgggcagactgcccgaccacctgatcaaggacctgttcggcgacaaggagttcctgccccagagcgccttcctgaagtggctgggcacccacgtgtgcacccacgtgatcctgaaggagctgtgcggcaacctgtgcttcctgctgtgcggcttcaacgagagaaacctgaacatgagcagagtggacgtgtacaccacccacagccccgccggcaccagcgtgcagaacatgctgcactggagccaggccgtgaagttccagaagttccaggccttcgactggggcagcagcgccaagaactacttccactacaaccagagctacccccccacctacaacgtgaaggacatgctggtgcccaccgccgtgtggagcggcggccacgactggctggccgacgtgtacgacgtgaacatcctgctgacccagatcaccaacctggtgttccacgagagcatccccgagtgggagcacctggacttcatctggggcctggacgccccctggagactgtacaacaagatcatcaacctgatgagaaagtaccagtag

SEQ ID NO: 2035 - DNA, 873 bp, synthetic construct
  misc_feature 1..873: note = source = /note="Description of Artificial Sequence: Synthetic coding sequence"
  source 1..873: mol_type = other DNA
atgaagatgagattcctgggcctggtggtgtgcctggtgctgtggaccctgcacagcgagggcagcggcggcaagctgaccgccgtggaccccgagaccaacatgaacgtgagcgagatcatcagctactggggcttccccagcgaggagtacctggtggagaccgaggacggctacatcctgtgcctgaacagaatcccccacggcagaaagaaccacagcgacaagggccccaagcccgtggtgttcctgcagcacggcctgctggccgacagcagcaactgggtgaccaacctggccaacagcagcctgggcttcatcctggccgacgccggcttcgacgtgtggatgggcaacagcagaggcaacacctggagcagaaagcacaagaccctgagcgtgagccaggacgagttctgggccttcagctacgacgagatggccaagtacgacctgcccgccagcatcaacttcatcctgaacaagaccggccaggagcaggtgtactacgtgggccacagccagggcaccaccatcggcttcatcgccttcagccagatccccgagctggccaagagaatcaagatgttcttcgccctgggccccgtggccagcgtggccttctgcaccagccccatggccaagctgggcagactgcccgaccacctgatcaaggacctgttcggcgacaaggagttcctgccccagagcgccttcctgaagtggctgggcacccacgtgtgcacccacgtgatcctgaaggagctgtgcggcaacctgtgcttcctgctgtgcggcttcaacgagagaaacctgaacatgagcagagtggacgtgtacaccacccacagccccgccggcaccagcgtgtag

SEQ ID NO: 2036 - DNA, 1200 bp, synthetic construct; identical to SEQ ID NO: 2030
  misc_feature 1..1200: note = source = /note="Description of Artificial Sequence: Synthetic coding sequence"
  source 1..1200: mol_type = other DNA

SEQ ID NO: 2037 - DNA, 87 bp, synthetic construct
  misc_feature 1..87: note = source = /note="Description of Artificial Sequence: Synthetic coding sequence"
  source 1..87: mol_type = other DNA
ctgtgcttcctgctgtgcggcttcaacgagagaaacctgaacatggccgtgaagttccagaagttccaggccttcgactggggctag

SEQ ID NO: 2038 - DNA, 1200 bp, synthetic construct; identical to SEQ ID NO: 2030
  misc_feature 1..1200: note = source = /note="Description of Artificial Sequence: Synthetic coding sequence"
  source 1..1200: mol_type = other DNA

SEQ ID NO: 2039 - DNA, 411 bp, synthetic construct
  misc_feature 1..411: note = source = /note="Description of Artificial Sequence: Synthetic coding sequence"
  source 1..411: mol_type = other DNA
atgaagatgagattcctgggcctggtggtgtgcctggtgctgtggaccctgcacagcgagggcagcggcggcaagctgaccgccgtggaccccgagaccaacatgaacgtgagcgagatcatcagctactggggcttccccagcgaggagtacctggtggagaccgaggacggctacatcctgtgcctgaacagaatcccccacggcagaaagaaccacagcgacaagggccccaagcccgtggtgttcctgcagcacggcctgctggccgacagcagcaactgggtgaccaacctggccaacagcagcctgggcttcatcctggccgacgccggcttcgacgtgtggatgggcaacagcagaggcaacacctggagcagaaagcacgtgaccctggagcccggctgctag

SEQ ID NO: 2040 - DNA, 1428 bp, synthetic construct
  misc_feature 1..1428: note = source = /note="Description of Artificial Sequence: Synthetic coding sequence"
  source 1..1428: mol_type = other DNA
atggagagcaaggccctgctggtgctgaccctggccgtgtggctgcagagcctgaccgccagcagaggcggcgtggccgccgccgaccagagaagagacttcatcgacatcgagagcaagttcgccctgagaacccccgaggacaccgccgaggacacctgccacctgatccccggcgtggccgagagcgtggccacctgccacttcaaccacagcagcaagaccttcatggtgatccacggctggaccgtgaccggcatgtacgagagctgggtgcccaagctggtggccgccctgtacaagagagagcccgacagcaacgtgatcgtggtggactggctgagcagagcccaggagcactaccccgtgagcgccggctacaccaagctggtgggccaggacgtggccagattcatcaactggatggaggaggagttcaactaccccctggacaacgtgcacctgctgggctacagcctgggcgcccacgccgccggcatcgccggcagcctgaccaacaagaaggtgaacagaatcaccggcctggaccccgccggccccaacttcgagtacgccgaggcccccagcagactgagccccgacgacgccgacttcgtggacgtgctgcacaccttcaccagaggcagccccggcagaagcatcggcatccagaagcccgtgggccacgtggacatctaccccaacggcggcaccttccagcccggctgcaacatcggcgaggccatcagagtgatcgccgagagaggcctgggcgacgtggaccagctggtgaagtgcagccacgagagaagcatccacctgttcatcgacagcctgctgaacgaggagaaccccagcaaggcctacagatgcagcagcaaggaggccttcgagaagggcctgtgcctgagctgcagaaagaacagatgcaacaacctgggctacgagatcaacaaggtgagagccaagagaagcagcaagatgtacctgaagaccagaagccagatgccctacaaggtgttccactaccaggtgaagatccacttcagcggcaccgagagcgagacccacaccaaccaggccttcgagatcagcctgtacggcaccgtggccgagagcgagaacatccccttcaccctgcccgaggtgagcaccaacaagacctacagcttcctgatctacaccgaggtggacatcggcgagctgctgatgctgaagctgaagtggaagagcgacagctacttcagctggagcgactggtggagcagccccggcttcgccatccagaagatcagagtgaaggccggcgagacccagaagaaggtgatcttctgcagcagagagaaggtgagccacctgcagaagggcaaggcccccgccgtgttcgtgaagtgccacgacaagagcctgaacaagaagagcggctag

SEQ ID NO: 2041 - DNA, 348 bp, synthetic construct
  misc_feature 1..348: note = source = /note="Description of Artificial Sequence: Synthetic coding sequence"
  source 1..348: mol_type = other DNA
atggtgatccacggctggaccgtgaccggcatgtacgagagctgggtgcccaagctggtggccgccctgtacaagagagagcccgacagcaacgtgatcgtggtggactggctgagcagagcccaggagcactaccccgtgagcgccggctacaccaagctggtgggccaggacgtggccagattcatcaactggatggaggaggagttcaactaccccctggacaacgtgcacctgctgggctacagcctgggcgcccacgccgccggcatcgccggcagcctgaccaacaagaaggtgaacagaatcaccggcctggaccccgccggccccaacttcgagtactag

SEQ ID NO: 2042 - DNA, 321 bp, synthetic construct
  misc_feature 1..321: note = source = /note="Description of Artificial Sequence: Synthetic coding sequence"
  source 1..321: mol_type = other DNA
atggagagcaaggccctgctggtgctgaccctggccgtgtggctgcagagcctgaccgccagcagaggcggcgtggccgccgccgaccagagaagagacttcatcgacatcgagagcaagttcgccctgagaacccccgaggacaccgccgaggacacctgccacctgatccccggcgtggccgagagcgtggccacctgccacttcaaccacagcagcaagaccttcatggtgatccacggctggaccgtgaccggcatgtacgagagctgggtgcccaagctggtggccgccctgtacaagagagagcccgacagctag

SEQ ID NO: 2043 - DNA, 393 bp, synthetic construct
  misc_feature 1..393: note = source = /note="Description of Artificial Sequence: Synthetic coding sequence"
  source 1..393: mol_type = other DNA
atggagagcaaggccctgctggtgctgaccctggccgtgtggctgcagagcctgaccgccagcagaggcggcgtggccgccgccgaccagagaagagacttcatcgacatcgagagcaagttcgccctgagaacccccgaggacaccgccgaggacacctgccacctgatccccggcgtggccgagagcgtggccacctgccacttcaaccacagcagcaagaccttcatggtgatccacggctggaccgtgaccggcatgtacgagagctgggtgcccaagctggtggccgccctgtacaagagagagcccgacagcaacgtgatcgtggtggactggctgagcagagcccaggagcactaccccgtgagcgccggctacaccaagctgtag

SEQ ID NO: 2044 - DNA, 1386 bp, synthetic construct
  misc_feature 1..1386: note = source = /note="Description of Artificial Sequence: Synthetic coding sequence"
  source 1..1386: mol_type = other DNA
atggagagcaaggccctgctggtgctgaccctggccgccgccgaccagagaagagacttcatcgacatcgagagcaagttcgccctgagaacccccgaggacaccgccgaggacacctgccacctgatccccggcgtggccgagagcgtggccacctgccacttcaaccacagcagcaagaccttcatggtgatccacggctggaccgtgaccggcatgtacgagagctgggtgcccaagctggtggccgccctgtacaagagagagcccgacagcaacgtgatcgtggtggactggctgagcagagcccaggagcactaccccgtgagcgccggctacaccaagctggtgggccaggacgtggccagattcatcaactggatggaggaggagttcaactaccccctggacaacgtgcacctgctgggctacagcctgggcgcccacgccgccggcatcgccggcagcctgaccaacaagaaggtgaacagaatcaccggcctggaccccgccggccccaacttcgagtacgccgaggcccccagcagactgagccccgacgacgccgacttcgtggacgtgctgcacaccttcaccagaggcagccccggcagaagcatcggcatccagaagcccgtgggccacgtggacatctaccccaacggcggcaccttccagcccggctgcaacatcggcgaggccatcagagtgatcgccgagagaggcctgggcgacgtggaccagctggtgaagtgcagccacgagagaagcatccacctgttcatcgacagcctgctgaacgaggagaaccccagcaaggcctacagatgcagcagcaaggaggccttcgagaagggcctgtgcctgagctgcagaaagaacagatgcaacaacctgggctacgagatcaacaaggtgagagccaagagaagcagcaagatgtacctgaagaccagaagccagatgccctacaaggtgttccactaccaggtgaagatccacttcagcggcaccgagagcgagacccacaccaaccaggccttcgagatcagcctgtacggcaccgtggccgagagcgagaacatccccttcaccctgcccgaggtgagcaccaacaagacctacagcttcctgatctacaccgaggtggacatcggcgagctgctgatgctgaagctgaagtggaagagcgacagctacttcagctggagcgactggtggagcagccccggcttcgccatccagaagatcagagtgaaggccggcgagacccagaagaaggtgatcttctgcagcagagagaaggtgagccacctgcagaagggcaaggcccccgccgtgttcgtgaagtgccacgacaagagcctgaacaagaagagcggctag

SEQ ID NO: 2045 - DNA, 828 bp, synthetic construct
  misc_feature 1..828: note = source = /note="Description of Artificial Sequence: Synthetic coding sequence"
  source 1..828: mol_type = other DNA
atggtgatccacggctggaccgtgaccggcatgtacgagagctgggtgcccaagctggtggccgccctgtacaagagagagcccgacagcaacgtgatcgtggtggactggctgagcagagcccaggagcactaccccgtgagcgccggctacaccaagctggtgggccaggacgtggccagattcatcaactggatggaggaggagttcaactaccccctggacaacgtgcacctgctgggctacagcctgggcgcccacgccgccggcatcgccggcagcctgaccaacaagaaggtgaacagaatcaccggcctggaccccgccggccccaacttcgagtacgccgaggcccccagcagactgagccccgacgacgccgacttcgtggacgtgctgcacaccttcaccagaggcagccccggcagaagcatcggcatccagaagcccgtgggccacgtggacatctaccccaacggcggcaccttccagcccggctgcaacatcggcgaggccatcagagtgatcgccgagagaggcctgggcgacgtggaccagctggtgaagtgcagccacgagagaagcatccacctgttcatcgacagcctgctgaacgaggagaaccccagcaaggcctacagatgcagcagcaaggaggccttcgagaagggcctgtgcctgagctgcagaaagaacagatgcaacaacctgggctacgagatcaacaaggtgagagccaagagaagcagcaagatgtacgaggacagcttcagcgacgccctgcagagcctgcccctgcccagcaaggacagcttcttctgggactag

SEQ ID NO: 2046 - DNA, 2079 bp, synthetic construct
  misc_feature 1..2079: note = source = /note="Description of Artificial Sequence: Synthetic coding sequence"
  source 1..2079: mol_type = other DNA
atgggcccctggggctggaagctgagatggaccgtggccctgctgctggccgccgccggcaccgccgtgggcgacagatgcgagagaaacgagttccagtgccaggacggcaagtgcatcagctacaagtgggtgtgcgacggcagcgccgagtgccaggacggcagcgacgagagccaggagacctgcctgagcgtgacctgcaagagcggcgacttcagctgcggcggcagagtgaacagatgcatcccccagttctggagatgcgacggccaggtggactgcgacaacggcagcgacgagcagggctgcctgaccctgtgcgagggccccaacaagttcaagtgccacagcggcgagtgcatcaccctggacaaggtgtgcaacatggccagagactgcagagactggagcgacgagcccatcaaggagtgcggcaccaacgagtgcctggacaacaacggcggctgcagccacgtgtgcaacgacctgaagatcggctacgagtgcctgtgccccgacggcttccagctggtggcccagagaagatgcgaggacatcgacgagtgccaggaccccgacacctgcagccagctgtgcgtgaacctggagggcggctacaagtgccagtgcgaggagggcttccagctggacccccacaccaaggcctgcaaggccgtgggcagcatcgcctacctgttcttcaccaacagacacgaggtgagaaagatgaccctggacagaagcgagtacaccagcctgatccccaacctgagaaacgtggtggccctggacaccgaggtggccagcaacagaatctactggagcgacctgagccagagaatgatctgcagcacccagctggacagagcccacggcgtgagcagctacgacaccgtgatcagcagagacatccaggcccccgacggcctggccgtggactggatccacagcaacatctactggaccgacagcgtgctgggcaccgtgagcgtggccgacaccaagggcgtgaagagaaagaccctgttcagagagaacggcagcaagcccagagccatcgtggtggaccccgtgcacggcttcatgtactggaccgactggggcacccccgccaagatcaagaagggcggcctgaacggcgtggacatctacagcctggtgaccgagaacatccagtggcccaacggcatcaccctggacctgctgagcggcagactgtactgggtggacagcaagctgcacagcatcagcagcatcgacgtgaacggcggcaacagaaagaccatcctggaggacgagaagagactggcccaccccttcagcctggccgtgttcgaggacaaggtgttctggaccgacatcatcaacgaggccatcttcagcgccaacagactgaccggcagcgacgtgaacctgctggccgagaacctgctgagccccgaggacatggtgctgttccacaacctgacccagcccagaggcgtgaactggtgcgagagaaccaccctgagcaacggcggctgccagtacctgtgcctgcccgccccccagatcaacccccacagccccaagttcacctgcgcctgccccgacggcatgctgctggccagagacatgagaagctgcctgaccgaggccgaggccgccgtggccacccaggagaccagcaccgtgagactgaaggtgagcagcaccgccgtgagaacccagcacaccaccaccagacccgtgcccgacaccagcagactgcccggcgccacccccggcctgaccaccgtggagatcgtgaccatgagccaccaggccctgggcgacgtggccggcagaggcaacgagaagaagcccagcagcgtgagagccctgagcatcgtgctgcccatcgtgctgctggtgttcctgtgcctgggcgtgttcctgctgtggaagaactggagactgaagaacatcaacagcatcaacttcgacaaccccgtgtaccagaagaccaccgaggacgaggtgcacatctgccacaaccaggacggctacagctaccccagcagacagatggtgagcctggaggacgacgtggcctag

SEQ ID NO: 2047 - DNA, 2460 bp, synthetic construct
  misc_feature 1..2460: note = source = /note="Description of Artificial Sequence: Synthetic coding sequence"
  source 1..2460: mol_type = other DNA
atgggcccctggggctggaagctgagatggaccgtggccctgctgctggccgccgccggcaccgccgtgggcgacagatgcgagagaaacgagttccagtgccaggacggcaagtgcatcagctacaagtgggtgtgcgacggcagcgccgagtgccaggacggcagcgacgagagccaggagacctgcagccccaagacctgcagccaggacgagttcagatgccacgacggcaagtgcatcagcagacagttcgtgtgcgacagcgacagagactgcctggacggcagcgacgaggccagctgccccgtgctgacctgcggccccgccagcttccagtgcaacagcagcacctgcatcccccagctgtgggcctgcgacaacgaccccgactgcgaggacggcagcgacgagtggccccagagatgcagaggcctgtacgtgttccagggcgacagcagcccctgcagcgccttcgagttccactgcctgagcggcgagtgcatccacagcagctggagatgcgacggcggccccgactgcaaggacaagagcgacgaggagaactgcgccgtggccacctgcagacccgacgagttccagtgcagcgacggcaactgcatccacggcagcagacagtgcgacagagagtacgactgcaaggacatgagcgacgaggtgggctgcgtgaacgtgaccctgtgcgagggccccaacaagttcaagtgccacagcggcgagtgcatcaccctggacaaggtgtgcaacatggccagagactgcagagactggagcgacgagcccatcaaggagtgcggcaccaacgagtgcctggacaacaacggcggctgcagccacgtgtgcaacgacctgaagatcggctacgagtgcctgtgccccgacggcttccagctggtggcccagagaagatgcgaggacatcgacgagtgccaggaccccgacacctgcagccagctgtgcgtgaacctggagggcggctacaagtgccagtgcgaggagggcttccagctggacccccacaccaaggcctgcaaggccgtgggcagcatcgcctacctgttcttcaccaacagacacgaggtgagaaagatgaccctggacagaagcgagtacaccagcctgatccccaacctgagaaacgtggtggccctggacaccgaggtggccagcaacagaatctactggagcgacctgagccagagaatgatctgcagcacccagctggacagagcccacggcgtgagcagctacgacaccgtgatcagcagagacatccaggcccccgacggcctggccgtggactggatccacagcaacatctactggaccgacagcgtgctgggcaccgtgagcgtggccgacaccaagggcgtgaagagaaagaccctgttcagagagaacggcagcaagcccagagccatcgtggtggaccccgtgcacggcttcatgtactggaccgactggggcacccccgccaagatcaagaagggcggcctgaacggcgtggacatctacagcctggtgaccgagaacatccagtggcccaacggcatcaccctggacctgctgagcggcagactgtactgggtggacagcaagctgcacagcatcagcagcatcgacgtgaacggcggcaacagaaagaccatcctggaggacgagaagagactggcccaccccttcagcctggccgtgttcgaggacaaggtgttctggaccgacatcatcaacgaggccatcttcagcgccaacagactgaccggcagcgacgtgaacctgctggccgagaacctgctgagccccgaggacatggtgctgttccacaacctgacccagcccagaggcgtgaactggtgcgagagaaccaccctgagcaacggcggctgccagtacctgtgcctgcccgccccccagatcaacccccacagccccaagttcacctgcgcctgccccgacggcatgctgctggccagagacatgagaagctgcctgaccgaggccgaggccgccgtggccacccaggagaccagcaccgtgagactgaaggtgagcagcaccgccgtgagaacccagcacaccaccaccagacccgtgcccgacaccagcagactgcccggcgccacccccggcctgaccaccgtggagatcgtgaccatgagccaccaggccctgggcgacgtggccggcagaggcaacgagaagaagcccagcagcgtgagagccctgagcatcgtgctgcccatcgtgctgctggtgttcctgtgcctgggcgtgttcctgctgtggaagaactggagactgaagaacatcaacagcatcaacttcgacaaccccgtgtaccagaagaccaccgaggacgaggtgcacatctgccacaaccaggacggctacagctaccccagcagacagatggtgagcctggaggacgacgtggcctag

SEQ ID NO: 2048 - DNA, 2049 bp, synthetic construct
  misc_feature 1..2049: note = source = /note="Description of Artificial Sequence: Synthetic coding sequence"
  source 1..2049: mol_type = other DNA
atgggcccctggggctggaagctgagatggaccgtggccctgctgctggccgccgccggcaccgccgtgggcgacagatgcgagagaaacgagttccagtgccaggacggcaagtgcatcagctacaagtgggtgtgcgacggcagcgccgagtgccaggacggcagcgacgagagccaggagacctgcctgagcgtgacctgcaagagcggcgacttcagctgcggcggcagagtgaacagatgcatcccccagttctggagatgcgacggccaggtggactgcgacaacggcagcgacgagcagggctgccccgtggccacctgcagacccgacgagttccagtgcagcgacggcaactgcatccacggcagcagacagtgcgacagagagtacgactgcaaggacatgagcgacgaggtgggctgcgtgaacgtgaccctgtgcgagggccccaacaagttcaagtgccacagcggcgagtgcatcaccctggacaaggtgtgcaacatggccagagactgcagagactggagcgacgagcccatcaaggagtgcggcaccaacgagtgcctggacaacaacggcggctgcagccacgtgtgcaacgacctgaagatcggctacgagtgcctgtgccccgacggcttccagctggtggcccagagaagatgcgaggacatcgacgagtgccaggaccccgacacctgcagccagctgtgcgtgaacctggagggcggctacaagtgccagtgcgaggagggcttccagctggacccccacaccaaggcctgcaaggccgtgggcagcatcgcctacctgttcttcaccaacagacacgaggtgagaaagatgaccctggacagaagcgagtacaccagcctgatccccaacctgagaaacgtggtggccctggacaccgaggtggccagcaacagaatctactggagcgacctgagccagagaatgatctgcagcacccagctggacagagcccacggcgtgagcagctacgacaccgtgatcagcagagacatccaggcccccgacggcctggccgtggactggatccacagcaacatctactggaccgacagcgtgctgggcaccgtgagcgtggccgacaccaagggcgtgaagagaaagaccctgttcagagagaacggcagcaagcccagagccatcgtggtggaccccgtgcacggcttcatgtactggaccgactggggcacccccgccaagatcaagaagggcggcctgaacggcgtggacatctacagcctggtgaccgagaacatccagtggcccaacggcatcaccctggacctgctgagcggcagactgtactgggtggacagcaagctgcacagcatcagcagcatcgacgtgaacggcggcaacagaaagaccatcctggaggacgagaagagactggcccaccccttcagcctggccgtgttcgaggacaaggtgttctggaccgacatcatcaacgaggccatcttcagcgccaacagactgaccggcagcgacgtgaacctgctggccgagaacctgctgagccccgaggacatggtgctgttccacaacctgacccagcccagagaggccgaggccgccgtggccacccaggagaccagcaccgtgagactgaaggtgagcagcaccgccgtgagaacccagcacaccaccaccagacccgtgcccgacaccagcagactgcccggcgccacccccggcctgaccaccgtggagatcgtgaccatgagccaccaggccctgggcgacgtggccggcagaggcaacgagaagaagcccagcagcgtgagagccctgagcatcgtgctgcccatcgtgctgctggtgttcctgtgcctgggcgtgttcctgctgtggaagaactggagactgaagaacatcaacagcatcaacttcgacaaccccgtgtaccagaagaccaccgaggacgaggtgcacatctgccacaaccaggacggctacagctaccccagcagacagatggtgagcctggaggacgacgtggcctag

SEQ ID NO: 2049 - DNA, 2577 bp, synthetic construct
  misc_feature 1..2577: note = source = /note="Description of Artificial Sequence: Synthetic coding sequence"
  source 1..2577: mol_type = other DNA
atgggcccctggggctggaagctgagatggaccgtggccctgctgctggccgccgccggcaccgccgtgggcgacagatgcgagagaaacgagttccagtgccaggacggcaagtgcatcagctacaagtgggtgtgcgacggcagcgccgagtgccaggacggcagcgacgagagccaggagacctgcctgagcgtgacctgcaagagcggcgacttcagctgcggcggcagagtgaacagatgcatcccccagttctggagatgcgacggccaggtggactgcgacaacggcagcgacgagcagggctgcccccccaagacctgcagccaggacgagttcagatgccacgacggcaagtgcatcagcagacagttcgtgtgcgacagcgacagagactgcctggacggcagcgacgaggccagctgccccgtgctgacctgcggccccgccagcttccagtgcaacagcagcacctgcatcccccagctgtgggcctgcgacaacgaccccgactgcgaggacggcagcgacgagtggccccagagatgcagaggcctgtacgtgttccagggcgacagcagcccctgcagcgccttcgagttccactgcctgagcggcgagtgcatccacagcagctggagatgcgacggcggccccgactgcaaggacaagagcgacgaggagaactgcgccgtggccacctgcagacccgacgagttccagtgcagcgacggcaactgcatccacggcagcagacagtgcgacagagagtacgactgcaaggacatgagcgacgaggtgggctgcgtgaacgtgaccctgtgcgagggccccaacaagttcaagtgccacagcggcgagtgcatcaccctggacaaggtgtgcaacatggccagagactgcagagactggagcgacgagcccatcaaggagtgcggcaccaacgagtgcctggacaacaacggcggctgcagccacgtgtgcaacgacctgaagatcggctacgagtgcctgtgccccgacggcttccagctggtggcccagagaagatgcgaggacatcgacgagtgccaggaccccgacacctgcagccagctgtgcgtgaacctggagggcggctacaagtgccagtgcgaggagggcttccagctggacccccacaccaaggcctgcaaggccgtgggcagcatcgcctacctgttcttcaccaacagacacgaggtgagaaagatgaccctggacagaagcgagtacaccagcctgatccccaacctgagaaacgtggtggccctggacaccgaggtggccagcaacagaatctactggagcgacctgagccagagaatgatctgcagcacccagctggacagagcccacggcgtgagcagctacgacaccgtgatcagcagagacatccaggcccccgacggcctggccgtggactggatccacagcaacatctactggaccgacagcgtgctgggcaccgtgagcgtggccgacaccaagggcgtgaagagaaagaccctgttcagagagaacggcagcaagcccagagccatcgtggtggaccccgtgcacggcttcatgtactggaccgactggggcacccccgccaagatcaagaagggcggcctgaacggcgtggacatctacagcctggtgaccgagaacatccagtggcccaacggcatcaccctggacctgctgagcggcagactgtactgggtggacagcaagctgcacagcatcagcagcatcgacgtgaacggcggcaacagaaagaccatcctggaggacgagaagagactggcccaccccttcagcctggccgtgttcgaggacaaggtgttctggaccgacatcatcaacgaggccatcttcagcgccaacagactgaccggcagcgacgtgaacctgctggccgagaacctgctgagccccgaggacatggtgctgttccacaacctgacccagcccagaggcgtgaactggtgcgagagaaccaccctgagcaacggcggctgccagtacctgtgcctgcccgccccccagatcaacccccacagccccaagttcacctgcgcctgccccgacggcatgctgctggccagagacatgagaagctgcctgaccgaggccgaggccgccgtggccacccaggagaccagcaccgtgagactgaaggtgagcagcaccgccgtgagaacccagcacaccaccaccagacccgtgcccgacaccagcagactgcccggcgccacccccggcctgaccaccgtggagatcgtgaccatgagccaccaggccctgggcgacgtggccggcagaggcaacgagaagaagcccagcagcgtgagagccctgagcatcgtgctgcccatcgtgctgctggtgttcctgtgcctgggcgtgttcctgctgtggaagaactggagactgaagaacatcaacagcatcaacttcgacaaccccgtgtaccagaagaccaccgaggacgaggtgcacatctgccacaaccaggacggctacagctaccccagcatggtgagcctggaggacgacgtggcctag

SEQ ID NO: 2050 - DNA, 2583 bp, synthetic construct
  misc_feature 1..2583: note = source = /note="Description of Artificial Sequence: Synthetic coding sequence"
  source 1..2583: mol_type = other DNA
atgggcccctggggctggaagctgagatggaccgtggccctgctgctggccgccgccggcaccgccgtgggcgacagatgcgagagaaacgagttccagtgccaggacggcaagtgcatcagctacaagtgggtgtgcgacggcagcgccgagtgccaggacggcagcgacgagagccaggagacctgcctgagcgtgacctgcaagagcggcgacttcagctgcggcggcagagtgaacagatgcatcccccagttctggagatgcgacggccaggtggactgcgacaacggcagcgacgagcagggctgcccccccaagacctgcagccaggacgagttcagatgccacgacggcaagtgcatcagcagacagttcgtgtgcgacagcgacagagactgcctggacggcagcgacgaggccagctgccccgtgctgacctgcggccccgccagcttccagtgcaacagcagcacctgcatcccccagctgtgggcctgcgacaacgaccccgactgcgaggacggcagcgacgagtggccccagagatgcagaggcctgtacgtgttccagggcgacagcagcccctgcagcgccttcgagttccactgcctgagcggcgagtgcatccacagcagctggagatgcgacggcggccccgactgcaaggacaagagcgacgaggagaactgcgccgtggccacctgcagacccgacgagttccagtgcagcgacggcaactgcatccacggcagcagacagtgcgacagagagtacgactgcaaggacatgagcgacgaggtgggctgcgtgaacgtgaccctgtgcgagggccccaacaagttcaagtgccacagcggcgagtgcatcaccctggacaaggtgtgcaacatggccagagactgcagagactggagcgacgagcccatcaaggagtgcggcaccaacgagtgcctggacaacaacggcggctgcagccacgtgtgcaacgacctgaagatcggctacgagtgcctgtgccccgacggcttccagctggtggcccagagaagatgcgaggacatcgacgagtgccaggaccccgacacctgcagccagctgtgcgtgaacctggagggcggctacaagtgccagtgcgaggagggcttccagctggacccccacaccaaggcctgcaaggccgtgggcagcatcgcctacctgttcttcaccaacagacacgaggtgagaaagatgaccctggacagaagcgagtacaccagcctgatccccaacctgagaaacgtggtggccctggacaccgaggtggccagcaacagaatctactggagcgacctgagccagagaatgatctgcagcacccagctggacagagcccacggcgtgagcagctacgacaccgtgatcagcagagacatccaggcccccgacggcctggccgtggactggatccacagcaacatctactggaccgacagcgtgctgggcaccgtgagcgtggccgacaccaagggcgtgaagagaaagaccctgttcagagagaacggcagcaagcccagagccatcgtggtggaccccgtgcacggcttcatgtactggaccgactggggcacccccgccaagatcaagaagggcggcctgaacggcgtggacatctacagcctggtgaccgagaacatccagtggcccaacggcatcaccctggacctgctgagcggcagactgtactgggtggacagcaagctgcacagcatcagcagcatcgacgtgaacggcggcaacagaaagaccatcctggaggacgagaagagactggcccaccccttcagcctggccgtgttcgaggacaaggtgttctggaccgacatcatcaacgaggccatcttcagcgccaacagactgaccggcagcgacgtgaacctgctggccgagaacctgctgagccccgaggacatggtgctgttccacaacctgacccagcccagaggcgtgaactggtgcgagagaaccaccctgagcaacggcggctgccagtacctgtgcctgcccgccccccagatcaacccccacagccccaagttcacctgcgcctgccccgacggcatgctgctggccagagacatgagaagctgcctgaccgaggccgaggccgccgtggccacccaggagaccagcaccgtgagactgaaggtgagcagcaccgccgtgagaacccagcacaccaccaccagacccgtgcccgacaccagcagactgcccggcgccacccccggcctgaccaccgtggagatcgtgaccatgagccaccaggccctgggcgacgtggccggcagaggcaacgagaagaagcccagcagcgtgagagccctgagcatcgtgctgcccatcgtgctgctggtgttcctgtgcctgggcgtgttcctgctgtggaagaactggagactgaagaacatcaacagcatcaacttcgacaaccccgtgtaccagaagaccaccgaggacgaggtgcacatctgccacaaccaggacggctacagctaccccagcagacagatggtgagcctggaggacgacgtggcctag

SEQ ID NO: 2051 - DNA, 2220 bp, synthetic construct
  misc_feature 1..2220: note = source = /note="Description of Artificial Sequence: Synthetic coding sequence"
  source 1..2220: mol_type = other DNA
atgggcccctggggctggaagctgagatggaccgtggccctgctgctggccgccgccggcaccgccgtgggcgacagatgcgagagaaacgacttccagtgcaacagcagcacctgcatcccccagctgtgggcctgcgacaacgaccccgactgcgaggacggcagcgacgagtggccccagagatgcagaggcctgtacgtgttccagggcgacagcagcccctgcagcgccttcgagttccactgcctgagcggcgagtgcatccacagcagctggagatgcgacggcggccccgactgcaaggacaagagcgacgaggagaactgcgccgtggccacctgcagacccgacgagttccagtgcagcgacggcaactgcatccacggcagcagacagtgcgacagagagtacgactgcaaggacatgagcgacgaggtgggctgcgtgaacgtgaccctgtgcgagggccccaacaagttcaagtgccacagcggcgagtgcatcaccctggacaaggtgtgcaacatggccagagactgcagagactggagcgacgagcccatcaaggagtgcggcaccaacgagtgcctggacaacaacggcggctgcagccacgtgtgcaacgacctgaagatcggctacgagtgcctgtgccccgacggcttccagctggtggcccagagaagatgcgaggacatcgacgagtgccaggaccccgacacctgcagccagctgtgcgtgaacctggagggcggctacaagtgccagtgcgaggagggcttccagctggacccccacaccaaggcctgcaaggccgtgggcagcatcgcctacctgttcttcaccaacagacacgaggtgagaaagatgaccctggacagaagcgagtacaccagcctgatccccaacctgagaaacgtggtggccctggacaccgaggtggccagcaacagaatctactggagcgacctgagccagagaatgatctgcagcacccagctggacagagcccacggcgtgagcagctacgacaccgtgatcagcagagacatccaggcccccgacggcctggccgtggactggatccacagcaacatctactggaccgacagcgtgctgggcaccgtgagcgtggccgacaccaagggcgtgaagagaaagaccctgttcagagagaacggcagcaagcccagagccatcgtggtggaccccgtgcacggcttcatgtactggaccgactggggcacccccgccaagatcaagaagggcggcctgaacggcgtggacatctacagcctggtgaccgagaacatccagtggcccaacggcatcaccctggacctgctgagcggcagactgtactgggtggacagcaagctgcacagcatcagcagcatcgacgtgaacggcggcaacagaaagaccatcctggaggacgagaagagactggcccaccccttcagcctggccgtgttcgaggacaaggtgttctggaccgacatcatcaacgaggccatcttcagcgccaacagactgaccggcagcgacgtgaacctgctggccgagaacctgctgagccccgaggacatggtgctgttccacaacctgacccagcccagaggcgtgaactggtgcgagagaaccaccctgagcaacggcggctgccagtacctgtgcctgcccgccccccagatcaacccccacagccccaagttcacctgcgcctgccccgacggcatgctgctggccagagacatgagaagctgcctgaccgaggccgaggccgccgtggccacccaggagaccagcaccgtgagactgaaggtgagcagcaccgccgtgagaacccagcacaccaccaccagacccgtgcccgacaccagcagactgcccggcgccacccccggcctgaccaccgtggagatcgtgaccatgagccaccaggccctgggcgacgtggccggcagaggcaacgagaagaagcccagcagcgtgagagccctgagcatcgtgctgcccatcgtgctgctggtgttcctgtgcctgggcgtgttcctgctgtggaagaactggagactgaagaacatcaacagcatcaacttcgacaaccccgtgtaccagaagaccaccgaggacgaggtgcacatctgccacaaccaggacggctacagctaccccagcagacagatggtgagcctggaggacgacgtggcctag

SEQ ID NO: 2052 - DNA, 2838 bp, synthetic construct
  misc_feature 1..2838: note = source = /note="Description of Artificial Sequence: Synthetic coding sequence"
  source 1..2838: mol_type = other DNA
tgaggcagacccggcgtgccccccagattcctgagccagagaagaagacaggtgcccggccccagaagcagactgagagacatccacgagagccccagcgtgatcctgggcccccccggcgaggtgcccggcttcagatgcgccctgtggagacacctgagaccccacctggtgctgggcggcgccctggccccccccgcccccatcaagttcaccgagggcccccccgccaccctgaaggccagcgtgccctacgaggtggagaccctgccccagaacctgcccgcccccccctggagcgccgccgagatcttcagccacgtgggcgacagatgcgagagaaacgagttccagtgccaggacggcaagtgcatcagctacaagtgggtgtgcgacggcagcgccgagtgccaggacggcagcgacgagagccaggagacctgcctgagcgtgacctgcaagagcggcgacttcagctgcggcggcagagtgaacagatgcatcccccagttctggagatgcgacggccaggtggactgcgacaacggcagcgacgagcagggctgcccccccaagacctgcagccaggacgagttcagatgccacgacggcaagtgcatcagcagacagttcgtgtgcgacagcgacagagactgcctggacggcagcgacgaggccagctgccccgtgctgacctgcggccccgccagcttccagtgcaacagcagcacctgcatcccccagctgtgggcctgcgacaacgaccccgactgcgaggacggcagcgacgagtggccccagagatgcagaggcctgtacgtgttccagggcgacagcagcccctgcagcgccttcgagttccactgcctgagcggcgagtgcatccacagcagctggagatgcgacggcggccccgactgcaaggacaagagcgacgaggagaactgcgccgtggccacctgcagacccgacgagttccagtgcagcgacggcaactgcatccacggcagcagacagtgcgacagagagtacgactgcaaggacatgagcgacgaggtgggctgcgtgaacgtgaccctgtgcgagggccccaacaagttcaagtgccacagcggcgagtgcatcaccctggacaaggtgtgcaacatggccagagactgcagagactggagcgacgagcccatcaaggagtgcggcaccaacgagtgcctggacaacaacggcggctgcagccacgtgtgcaacgacctgaagatcggctacgagtgcctgtgccccgacggcttccagctggtggcccagagaagatgcgaggacatcgacgagtgccaggaccccgacacctgcagccagctgtgcgtgaacctggagggcggctacaagtgccagtgcgaggagggcttccagctggacccccacaccaaggcctgcaaggccgtgggcagcatcgcctacctgttcttcaccaacagacacgaggtgagaaagatgaccctggacagaagcgagtacaccagcctgatccccaacctgagaaacgtggtggccctggacaccgaggtggccagcaacagaatctactggagcgacctgagccagagaatgatctgcagcacccagctggacagagcccacggcgtgagcagctacgacaccgtgatcagcagagacatccaggcccccgacggcctggccgtggactggatccacagcaacatctactggaccgacagcgtgctgggcaccgtgagcgtggccgacaccaagggcgtgaagagaaagaccctgttcagagagaacggcagcaagcccagagccatcgtggtggaccccgtgcacggcttcatgtactggaccgactggggcacccccgccaagatcaagaagggcggcctgaacggcgtggacatctacagcctggtgaccgagaacatccagtggcccaacggcatcaccctggacctgctgagcggcagactgtactgggtggacagcaagctgcacagcatcagcagcatcgacgtgaacggcggcaacagaaagaccatcctggaggacgagaagagactggcccaccccttcagcctggccgtgttcgaggacaaggtgttctggaccgacatcatcaacgaggccatcttcagcgccaacagactgaccggcagcgacgtgaacctgctggccgagaacctgctgagccccgaggacatggtgctgttccacaacctgacccagcccagaggcgtgaactggtgcgagagaaccaccctgagcaacggcggctgccagtacctgtgcctgcccgccccccagatcaacccccacagccccaagttcacctgcgcctgccccgacggcatgctgctggccagagacatgagaagctgcctgaccgaggccgaggccgccgtggccacccaggagaccagcaccgtgagactgaaggtgagcagcaccgccgtgagaacccagcacaccaccaccagacccgtgcccgacaccagcagactgcccggcgccacccccggcctgaccaccgtggagatcgtgaccatgagccaccaggccctgggcgacgtggccggcagaggcaacgagaagaagcccagcagcgtgagagccctgagcatcgtgctgcccatcgtgctgctggtgttcctgtgcctgggcgtgttcctgctgtggaagaactggagactgaagaacatcaacagcatcaacttcgacaaccccgtgtaccagaagaccaccgaggacgaggtgcacatctgccacaaccaggacggctacagctaccccagcagacagatggtgagcctggaggacgacgtggcctag

SEQ ID NO: 2053 - DNA, 1770 bp, synthetic construct
  misc_feature 1..1770: note = source = /note="Description of Artificial Sequence: Synthetic coding sequence"
  source 1..1770: mol_type = other DNA
atgagcagaagactgctgcccagagccgagaagagaagaagaagactggagcagagacagcagcccgacgagcagagaagaagaagcggcgccatggtgaagatggccgccgccggcggcggcggcggcggcggcagatactacggcggcggcagcgagggcggcagagcccccaagagactgaagaccgacaacgccggcgaccagcacggcggcggcggcggcggcggcggcggcgccggcgccgccggcggcggcggcggcggcgagaactacgacgacccccacaagacccccgccagccccgtggtgcacatcagaggcctgatcgacggcgtggtggaggccgacctggtggaggccctgcaggagttcggccccatcagctacgtggtggtgatgcccaagaagagacaggccctggtggagttcgaggacgtgctgggcgcctgcaacgccgtgaactacgccgccgacaaccagatctacatcgccggccaccccgccttcgtgaactacagcaccagccagaagatcagcagacccggcgacagcgacgacagcagaagcgtgaacagcgtgctgctgttcaccatcctgaaccccatctacagcatcaccaccgacgtgctgtacaccatctgcaacccctgcggccccgtgcagagaatcgtgatcttcagaaagaacggcgtgcaggccatggtggagttcgacagcgtgcagagcgcccagagagccaaggccagcctgaacggcgccgacatctacagcggctgctgcaccctgaagatcgagtacgccaagcccaccagactgaacgtgttcaagaacgaccaggacacctgggactacaccaaccccaacctgagcggccagggcgaccccggcagcaaccccaacaagagacagagacagccccccctgctgggcgaccaccccgccgagtacggcggcccccacggcggctaccacagccactaccacgacgagggctacggccccccccccccccactacgagggcagaagaatgggcccccccgtgggcggccacagaagaggccccagcagatacggcccccagtacggccacccccccccccccccccccccccccgagtacggcccccacgccgacagccccgtgctgatggtgtacggcctggaccagagcaagatgaactgcgacagagtgttcaacgtgttctgcctgtacggcaacgtggagaaggtgaagttcatgaagagcaagcccggcgccgccatggtggagatggccgacggctacgccgtggacagagccatcacccacctgaacaacaacttcatgttcggccagaagctgaacgtgtgcgtgagcaagcagcccgccatcatgcccggccagagctacggcctggaggacggcagctgcagctacaaggacttcagcgagagcagaaacaacagattcagcacccccgagcaggccgccaagaacagaatccagcaccccagcaacgtgctgcacttcttcaacgcccccctggaggtgaccgaggagaacttcttcgagatctgcgacgagctgggcgtgaagagacccagcagcgtgaaggtgttcagcggcaagagcgagagaagcagcagcggcctgctggagtgggagagcaagagcgacgccctggagaccctgggcttcctgaaccactaccagatgaagaaccccaacggcccctacccctacaccctgaagctgtgcttcagcaccgcccagcacgccagctag

SEQ ID NO: 2054 - DNA, 540 bp, synthetic construct
  misc_feature 1..540: note = source = /note="Description of Artificial Sequence: Synthetic coding sequence"
  source 1..540: mol_type = other DNA
atgggcagacccggcctgggcgccgccgtgagcgacctgggcgaggccgtgagcctgagccagggcctgctgctgctgctgctgctgagcatgggcggcgcctgggccagcagagagcccctgagaccctggtgccaccccatcaacgccatcctggccgtggagaaggagggctgccccgtgtgcatcaccgtgaacaccaccatctgcgccggctactgccccaccatgatgagagtgctgcaggccgtgctgccccccctgccccaggtggtgtgcacctacagagacgtgagattcgagagcatcagactgcccggctgccccagaggcgtggaccccgtggtgagcttccccgtggccctgagctgcagatgcggcccctgcagaagaagcaccagcgactgcggcggccccaaggaccaccccctgacctgcgaccacccccagcaggccagcagcagcagcaaggacccccccagaagcctgcccagccccagcagactgctggagcccgacacccccatcctgccccagtag

SEQ ID NO: 2055 - DNA, 294 bp, synthetic construct
  misc_feature 1..294: note = source = /note="Description of Artificial Sequence: Synthetic coding sequence"
  source 1..294: mol_type = other DNA
atgcagctgggcaccggcctgctgctggccgccgtgctgagcctgcagctggccgccgccgaggccatctggtgccaccagtgcaccggcttcggcggctgcagccacggcagcagatgcctgagagacagcacccactgcgtgaccaccgccaccagagtgctgagcaacaccgaggacctgcccctggtgaccaagatgtgccacatcggctgccccgacatccccagcctgggcctgggcccctacgtgagcatcgcctgctgccagaccagcctgtgcaaccacgactag

SEQ ID NO: 2056 - DNA, 2058 bp, synthetic construct
  misc_feature 1..2058: note = source = /note="Description of Artificial Sequence: Synthetic coding sequence"
  source 1..2058: mol_type = other DNA
atgcccgcctacacccacgccagccccatccacaacacccacaagccctacgagtgcaaggagtgcggcaagtacttcagctgcggcagcaacctgatccagcaccagagcatccacaccggcgagaagccctacaagtgcaaggagtgcggcaaggccttccagctgcacatccagctgaccagacaccagaagttccacaccggcgagaagaccttcgagtgcaaggagtgcggcaaggccttcaacctgcccacccagctgaacagacacaagaacatccacaccgtgaagaagctgttcgagtgcaaggagtgcggcaagagcttcaacagaagcagcaacctgacccagcaccagagcatccacgccggcgtgaagccctaccagtgcaaggagtgcggcaaggccttcaacagaggcagcaacctgatccagcaccagaagatccacagcaacgagaagcccttcgtgtgcagagagtgcgagatggccttcagataccactaccagctgatcgagcactgcagaatccacaccggcgagaagcccttcgagtgcaaggagtgcagaaaggccttcaccctgctgaccaagctggtgagacaccagaagatccacatgggcgagaagcccttcgagtgcagagagtgcggcaaggccttcagcctgctgaaccagctgaacagacacaagaacatccacaccggcgagaagcccttcgagtgcaaggagtgcggcaagagcttcaacagaagcagcaacctgatccagcaccagagcatccacgccgacgtgaagccctacgagtgcaaggagtgcggcaagggcttcaacagaggcgccaacctgatccagcaccagaagatccacagcaacgagaagcccttcgtgtgcagagagtgcgagatggccttcagataccactaccagctgatccagcactgccagatccacaccggcggcaagcccttcgagtgcaaggagtgcggcaaggccttcagcctgctgacccagctggccagacacaagaacatccacaccggcgagaagcccttcgagtgcaaggactgcggcaaggccttcaacagaggcagcaacctggtgcagcaccagagcatccacaccggcgagaagccctacgagtgcaaggagtgcggcaaggccttcagactgcacctgcagctgagccagcacgagaagacccacaccggcgagaagcccttcgagtgcaaggagtgcggcaagttcttcagaagaggcagcaacctgaaccagcacagaagcatccacaccggcaagaagcccttcgagtgcaaggagtgcggcaaggccttcagactgcacatgcacctgatcagacaccagaagttccacaccggcgagaagcccttcgagtgcaaggagtgcggcaaggccttcagcctgcacacccagctgaaccaccacaagaacatccacaccggcgagaagcccttcaagtgcaaggagtgcggcaagagcttcaacagagtgagcaacctggtgcagcaccagagcatccacgccggcgtgaagccctacgagtgcaaggagtgcggcaagggcttcagcagagtgagcaacctgatccagcaccagaagacccacagcagcgccaagcccttcgtgtgcaaggagtgcagaaagaccttcagataccactaccagctgaccgagcactacagaatccacaccggcgagaagcccttcgagtgcaaggagtgcggcaaggccttcggcctgctgacccagctggcccagcaccagatcatccacaccggcgagaagcccttcaagtgcaaggagtgcggcaaggccttcaacagaggcagcaacctggtgcagccccagagcatccacaccggcgagaagccctacgagtgcaaggagtgcggcaaggccttcagactgcacctgcagctgagcctgcaccagaagctggtgcaggtgagaaaccccctgaacgtgagaaacgtgggccagcccagcgacatcagcagcaacctgctgaacatcagaaagttcatcctgggctag

SEQ ID NO: 2057 - DNA, 564 bp, synthetic construct
  misc_feature 1..564: note = source = /note="Description of Artificial Sequence: Synthetic coding sequence"
  source 1..564: mol_type = other DNA
tgaagaggcggcggcgacagctacggcgtgctgctgagcaacgccctggccagactgagaggcttcaaggaccacttcaccttctgccagcagctgaacatcagcatctgccccctgagccagaccgccgccagattccaggtgatcgtgtacaaccccctgggcagaaaggtgaactggatggtgagactgcccgtgagcgagggcgtgttcgtggtgaaggaccccaacggcagaaccgtgcccagcgacgtggtgatcttccccagcagcgacagccaggcccacccccccgagctgctgttcagcgccagcctgcccgccctgggcttcagcacctacagcgtggcccaggtgcccagatggaagccccaggccagagccccccagcccatccccagaagaagctggagccccgccctgaccatcgagaacgagcacatcagagccaccttcgaccccgacaccggcctgctgatggagatcatgaacatgaaccagcagctgctgctgcccgtgagacagaccttcttctggtacaacgccagcatcggcgacaactag

SEQ ID NO: 2058 - DNA, 3036 bp, synthetic construct
  misc_feature 1..3036: note = source = /note="Description of Artificial Sequence: Synthetic coding sequence"
  source 1..3036: mol_type = other DNA
atgggcgcctacgccagagccagcggcgtgtgcgccagaggctgcctggacagcgccggcccctggaccatgagcagagccctgagaccccccctgccccccctgtgcttcttcctgctgctgctggccgccgccggcgccagagccggcggctacgagacctgccccaccgtgcagcccaacatgctgaacgtgcacctgctgccccacacccacgacgacgtgggctggctgaagaccgtggaccagtacttctacggcatcaagaacgacatccagcacgccggcgtgcagtacatcctggacagcgtgatcagcgccctgctggccgaccccaccagaagattcatctacgtggagatcgccttcttcagcagatggtggcaccagcagaccaacgccacccaggaggtggtgagagacctggtgagacagggcagactggagttcgccaacggcggctgggtgatgaacgacgaggccgccacccactacggcgccatcgtggaccagatgaccctgggcctgagattcctggaggacaccttcggcaacgacggcagacccagagtggcctggcacatcgaccccttcggccacagcagagagcaggccagcctgttcgcccagatgggcttcgacggcttcttcttcggcagactggactaccaggacaagtgggtgagaatgcagaagctggagatggagcaggtgtggagagccagcaccagcctgaagccccccaccgccgacctgttcaccggcgtgctgcccaacggctacaacccccccagaaacctgtgctgggacgtgctgtgcgtggaccagcccctggtggaggaccccagaagccccgagtacaacgccaaggagctggtggactacttcctgaacgtggccaccgcccagggcagatactacagaaccaaccacaccgtgatgaccatgggcagcgacttccagtacgagaacgccaacatgtggttcaagaacctggacaagctgatcagactggtgaacgcccagcaggccaagggcagcagcgtgcacgtgctgtacagcacccccgcctgctacctgtgggagctgaacaaggccaacctgacctggagcgtgaagcacgacgacttcttcccctacgccgacggcccccaccagttctggaccggctacttcagcagcagacccgccctgaagagatacgagagactgagctacaacttcctgcaggtgtgcaaccagctggaggccctggtgggcctggccgccaacgtgggcccctacggcagcggcgacagcgcccccctgaacgaggccatggccgtgctgcagcaccacgacgccgtgagcggcaccagcagacagcacgtggccaacgactacgccagacagctggccgccggctggggcccctgcgaggtgctgctgagcaacgccctggccagactgagaggcttcaaggaccacttcaccttctgccagcagctgaacatcagcatctgccccctgagccagaccgccgccagattccaggtgatcgtgtacaaccccctgggcagaaaggtgaactggatggtgagactgcccgtgagcgagggcgtgttcgtggtgaaggaccccaacggcagaaccgtgcccagcgacgtggtgatcttccccagcagcgacagccaggcccacccccccgagctgctgttcagcgccagcctgcccgccctgggcttcagcacctacagcgtggcccaggtgcccagatggaagccccaggccagagccccccagcccatccccagaagaagctggagccccgccctgaccatcgagaacgagcacatcagagccaccttcgaccccgacaccggcctgctgatggagatcatgaacatgaaccagcagctgctgctgcccgtgagacagaccttcttctggtacaacgccagcatcggcgacaacgagagcgaccaggccagcggcgcctacatcttcagacccaaccagcagaagcccctgcccgtgagcagatgggcccagatccacctggtgaagacccccctggtgcaggaggtgcaccagaacttcagcgcctggtgcagccaggtggtgagactgtaccccggccagagacacctggagctggagtggagcgtgggccccatccccgtgggcgacacctggggcaaggaggtgatcagcagattcgacacccccctggagaccaagggcagattctacaccgacagcaacggcagagagatcctggagagaagaagagactacagacccacctggaagctgaaccagaccgagcccgtggccggcaactactaccccgtgaacaccagaatctacatcaccgacggcaacatgcagctgaccgtgctgaccgacagaagccagggcggcagcagcctgagagacggcagcctggagctgatggtgcacagaagactgctgaaggacgacggcagaggcgtgagcgagcccctgatggagaacggcagcggcgcctgggtgagaggcagacacctggtgctgctggacaccgcccaggccgccgccgccggccacagactgctggccgagcaggaggtgctggccccccaggtggtgctggcccccggcggcggcgccgcctacaacctgggcgccccccccagaacccagttcagcggcctgagaagagacctgccccccagcgtgcacctgctgaccctggccagctggggccccgagatggtgctgctgagactggagcaccagttcgccgtgggcgaggacagcggcagaaacctgagcgcccccgtgaccctgaacctgagagacctgttcagcaccttcaccatcaccagactgcaggagaccaccctggtggccaaccagctgagagaggccgccagcagactgaagtggaccaccaacaccggccccaccccccaccagaccccctaccagctggaccccgccaacatcaccctggagcccatggagatcagaaccttcctggccagcgtgcagtggaaggaggtggacggctag

SEQ ID NO: 2059 - DNA, 2853 bp, synthetic construct
  misc_feature 1..2853: note = source = /note="Description of Artificial Sequence: Synthetic coding sequence"
  source 1..2853: mol_type = other DNA
atgctgaacgtgcacctgctgccccacacccacgacgacgtgggctggctgaagaccgtggaccagtacttctacggcatcaagaacgacatccagcacgccggcgtgcagtacatcctggacagcgtgatcagcgccctgctggccgaccccaccagaagattcatctacgtggagatcgccttcttcagcagatggtggcaccagcagaccaacgccacccaggaggtggtgagagacctggtgagacagggcagactggagttcgccaacggcggctgggtgatgaacgacgaggccgccacccactacggcgccatcgtggaccagatgaccctgggcctgagattcctggaggacaccttcggcaacgacggcagacccagagtggcctggcacatcgaccccttcggccacagcagagagcaggccagcctgttcgcccagatgggcttcgacggcttcttcttcggcagactggactaccaggacaagtgggtgagaatgcagaagctggagatggagcaggtgtggagagccagcaccagcctgaagccccccaccgccgacctgttcaccggcgtgctgcccaacggctacaacccccccagaaacctgtgctgggacgtgctgtgcgtggaccagcccctggtggaggaccccagaagccccgagtacaacgccaaggagctggtggactacttcctgaacgtggccaccgcccagggcagatactacagaaccaaccacaccgtgatgaccatgggcagcgacttccagtacgagaacgccaacatgtggttcaagaacctggacaagctgatcagactggtgaacgcccagcaggccaagggcagcagcgtgcacgtgctgtacagcacccccgcctgctacctgtgggagctgaacaaggccaacctgacctggagcgtgaagcacgacgacttcttcccctacgccgacggcccccaccagttctggaccggctacttcagcagcagacccgccctgaagagatacgagagactgagctacaacttcctgcaggtgtgcaaccagctggaggccctggtgggcctggccgccaacgtgggcccctacggcagcggcgacagcgcccccctgaacgaggccatggccgtgctgcagcaccacgacgccgtgagcggcaccagcagacagcacgtggccaacgactacgccagacagctggccgccggctggggcccctgcgaggtgctgctgagcaacgccctggccagactgagaggcttcaaggaccacttcaccttctgccagcagctgaacatcagcatctgccccctgagccagaccgccgccagattccaggtgatcgtgtacaaccccctgggcagaaaggtgaactggatggtgagactgcccgtgagcgagggcgtgttcgtggtgaaggaccccaacggcagaaccgtgcccagcgacgtggtgatcttccccagcagcgacagccaggcccacccccccgagctgctgttcagcgccagcctgcccgccctgggcttcagcacctacagcgtggcccaggtgcccagatggaagccccaggccagagccccccagcccatccccagaagaagctggagccccgccctgaccatcgagaacgagcacatcagagccaccttcgaccccgacaccggcctgctgatggagatcatgaacatgaaccagcagctgctgctgcccgtgagacagaccttcttctggtacaacgccagcatcggcgacaacgagagcgaccaggccagcggcgcctacatcttcagacccaaccagcagaagcccctgcccgtgagcagatgggcccagatccacctggtgaagacccccctggtgcaggaggtgcaccagaacttcagcgcctggtgcagccaggtggtgagactgtaccccggccagagacacctggagctggagtggagcgtgggccccatccccgtgggcgacacctggggcaaggaggtgatcagcagattcgacacccccctggagaccaagggcagattctacaccgacagcaacggcagagagatcctggagagaagaagagactacagacccacctggaagctgaaccagaccgagcccgtggccggcaactactaccccgtgaacaccagaatctacatcaccgacggcaacatgcagctgaccgtgctgaccgacagaagccagggcggcagcagcctgagagacggcagcctggagctgatggtgcacagaagactgctgaaggacgacggcagaggcgtgagcgagcccctgatggagaacggcagcggcgcctgggtgagaggcagacacctggtgctgctggacaccgcccaggccgccgccgccggccacagactgctggccgagcaggaggtgctggccccccaggtggtgctggcccccggcggcggcgccgcctacaacctgggcgccccccccagaacccagttcagcggcctgagaagagacctgccccccagcgtgcacctgctgaccctggccagctggggccccgagatggtgctgctgagactggagcaccagttcgccgtgggcgaggacagcggcagaaacctgagcgcccccgtgaccctgaacctgagagacctgttcagcaccttcaccatcaccagactgcaggagaccaccctggtggccaaccagctgagagaggccgccagcagactgaagtggaccaccaacaccggccccaccccccaccagaccccctaccagctggaccccgccaacatcaccctggagcccatggagatcagaaccttcctggccagcgtgcagtggaaggaggtggacggctag

SEQ ID NO: 2060 - DNA, 882 bp, synthetic construct
  misc_feature 1..882: note = source = /note="Description of Artificial Sequence: Synthetic coding sequence"
  source 1..882: mol_type = other DNA
atgggcttccccgccgccgccctgctgtgcgccctgtgctgcggcctgctggcccccgccgccagagccggctacagcgaggagagatgcagctggagaggcagcggcctgacccaggagcccggcagcgtgggccagctggccctggcctgcgccgagggcgccgtggagtggctgtaccccgccggcgccctgagactgaccctgggcggccccgaccccagagccagacccggcatcgcctgcctgagacccgtgagacccttcgccggcgcccaggtgttcgccgagagagccggcggcgccctggagctgctgctggccgagggccccggccccgccggcggcagatgcgtgagatggggccccagagagagaagagccctgttcctgcaggccaccccccaccaggacatcagcagaagagtggccgccttcagattcgagctgagagaggacggcagacccgagctgcccccccaggcccacggcctgggcgtggacggcgcctgcagaccctgcagcgacgccgagctgctgctggccgcctgcaccagcgacttcgtgatccacggcatcatccacggcgtgacccacgacgtggagctgcaggagagcgtgatcaccgtggtggccgccagagtgctgagacagaccccccccctgttccaggccggcagaagcggcgaccagggcctgaccagcatcagaacccccctgagatgcggcgtgcaccccggccccggcaccttcctgttcatgggctggagcagattcggcgaggccagactgggctgcgcccccagattccaggagttcagaagagcctacgaggccgccagagccgcccacctgcacccctgcgaggtggccctgcactag

SEQ ID NO: 2061 - DNA, 708 bp, synthetic construct
  misc_feature 1..708: note = source = /note="Description of Artificial Sequence: Synthetic coding sequence"
  source 1..708: mol_type = other DNA
atggagcaggacgaccccgtggaggccctgaccgagctgagagagagaagactgggcgccctggagctgctgcaggccgccgccggcagcggcctggccgcctacgccgtgtgggccctgctgctgcagcccggcttcagaagagtgcccctgagactgcaggtgccctacgtgggcgccagcgccagacaggtggagcacgtgctgagcctgctgagaggcagacccggcaagaccgtggacctgggcagcggcgacggcagaatcgtgctggccgcccacagatgcggcctgagacccgccgtgggctacgagctgaacccctggctggtggccctggccagactgcacgcctggagagccggctgcgccggcagcgtgtgctacagaagaaaggacctgtggaaggtgagcctgagagactgcagaaacgtgagcgtgttcctggcccccagcgtgctgcccctgctggaggacaagctgagaaccgagctgcccgccggcgccagagtggtgagcggcagattccccctgcccacctggcagcccgtgaccgccgtgggcgagggcctggacagagtgtgggcctacgacgtgcccgagggcggccaggccggcgaggccgccagcagcagaatccccatccaggccgcccccggccccagcagcgcccccatccccggcggcctgatcagccaggccagctag

SEQ ID NO: 2062 - DNA, 2253 bp, synthetic construct
  misc_feature 1..2253: note = source = /note="Description of Artificial Sequence: Synthetic coding sequence"
  source 1..2253: mol_type = other DNA
atgctgagagccaagaaccagctgttcctgctgagcccccactacctgagacaggtgaaggagagcagcggcagcagactgatccagcagagactgctgcaccagcagcagcccctgcaccccgagtgggccgccctggccaagaagcagctgaagggcaagaaccccgaggacctgatctggcacacccccgagggcatcagcatcaagcccctgtacagcaagagagacaccatggacctgcccgaggagctgcccggcgtgaagcccttcaccagaggcccctaccccaccatgtacaccttcagaccctggaccatcagacagtacgccggcttcagcaccgtggaggagagcaacaagttctacaaggacaacatcaaggccggccagcagggcctgagcgtggccttcgacctggccacccacagaggctacgacagcgacaaccccagagtgagaggcgacgtgggcatggccggcgtggccatcgacaccgtggaggacaccaagatcctgttcgacggcatccccctggagaagatgagcgtgagcatgaccatgaacggcgccgtgatccccgtgctggccaacttcatcgtgaccggcgaggagcagggcgtgcccaaggagaagctgaccggcaccatccagaacgacatcctgaaggagttcatggtgagaaacacctacatcttcccccccgagcccagcatgaagatcatcgccgacatcttcgagtacaccgccaagcacatgcccaagttcaacagcatcagcatcagcggctaccacatgcaggaggccggcgccgacgccatcctggagctggcctacaccctggccgacggcctggagtacagcagaaccggcctgcaggccggcctgaccatcgacgagttcgcccccagactgagcttcttctggggcatcggcatgaacttctacatggagatcgccaagatgagagccggcagaagactgtgggcccacctgatcgagaagatgttccagcccaagaacagcaagagcctgctgctgagagcccactgccagaccagcggctggagcctgaccgagcaggacccctacaacaacatcgtgagaaccgccatcgaggccatggccgccgtgttcggcggcacccagagcctgcacaccaacagcttcgacgaggccctgggcctgcccaccgtgaagagcgccagaatcgccagaaacacccagatcatcatccaggaggagagcggcatccccaaggtggccgacccctggggcggcagctacatgatggagtgcctgaccaacgacgtgtacgacgccgccctgaagctgatcaacgagatcgaggagatgggcggcatggccaaggccgtggccgagggcatccccaagctgagaatcgaggagtgcgccgccagaagacaggccagaatcgacagcggcagcgaggtgatcgtgggcgtgaacaagtaccagctggagaaggaggacgccgtggaggtgctggccatcgacaacaccagcgtgagaaacagacagatcgagaagctgaagaagatcaagagcagcagagaccaggccctggccgagagatgcctggccgccctgaccgagtgcgccgccagcggcgacggcaacatcctggccctggccgtggacgccagcagagccagatgcaccgtgggcgagatcaccgacgccctgaagaaggtgttcggcgagcacaaggccaacgacagaatggtgagcggcgcctacagacaggagttcggcgagagcaaggagatcaccagcgccatcaagagagtgcacaagttcatggagagagagggcagaagacccagactgctggtggccaagatgggccaggacggccacgacagaggcgccaaggtgatcgccaccggcttcgccgacctgggcttcgacgtggacatcggccccctgttccagacccccagagaggtggcccagcaggccgtggacgccgacgtgcacgccgtgggcatcagcaccctggccgccggccacaagaccctggtgcccgagctgatcaaggagctgaacagcctgggcagacccgacatcctggtgatgtgcggcggcgtgatccccccccaggactacgagttcctgttcgaggtgggcgtgagcaacgtgttcggccccggcaccagaatccccaaggccgccgtgcaggtgctggacgacatcgagaagtgcctggagaagaagcagcagagcgtgtag

SEQ ID NO: 2063 - DNA, 594 bp, synthetic construct
  misc_feature 1..594: note = source = /note="Description of Artificial Sequence: Synthetic coding sequence"
  source 1..594: mol_type = other DNA
accagatacctggccagatgcaccgtgggcgagatcaccgacgccctgaagaaggtgttcggcgagcacaaggccaacgacagaatggtgagcggcgcctacagacaggagttcggcgagagcaaggagatcaccagcgccatcaagagagtgcacaagttcatggagagagagggcagaagacccagactgctggtggccaagatgggccaggacggccacgacagaggcgccaaggtgatcgccaccggcttcgccgacctgggcttcgacgtggacatcggccccctgttccagacccccagagaggtggcccagcaggccgtggacgccgacgtgcacgccgtgggcatcagcaccctggccgccggccacaagaccctggtgcccgagctgatcaaggagctgaacagcctgggcagacccgacatcctggtgatgtgcggcggcgtgatccccccccaggactacgagttcctgttcgaggtgggcgtgagcaacgtgttcggccccggcaccagaatccccaaggccgccgtgcaggtgctggacgacatcgagaagtgcctggagaagaagcagcagagcgtgtag

SEQ ID NO: 2064 - DNA, 2685 bp, synthetic construct
  misc_feature 1..2685: note = source = /note="Description of Artificial Sequence: Synthetic coding sequence"
  source 1..2685: mol_type = other DNA
atgatcctgctggccgtgctgttcctgtgcttcatcagcagctacagcgccagcgtgaagggccacaccaccggcctgagcctgaacaacgacagactgtacaagctgacctacagcaccgaggtgctgctggacagaggcaagggcaagctgcaggacagcgtgggctacagaatcagcagcaacgtggacgtggccctgctgtggagaaaccccgacggcgacgacgaccagctgatccagatcaccatgaaggacgtgaacgtggagaacgtgaaccagcagagaggcgagaagagcatcttcaagggcaagagccccagcaagatcatgggcaaggagaacctggaggccctgcagagacccaccctgctgcacctgatccacggcaaggtgaaggagttctacagctaccagaacgaggccgtggccatcgagaacatcaagagaggcctggccagcctgttccagacccagctgagcagcggcaccaccaacgaggtggacatcagcggcaactgcaaggtgacctaccaggcccaccaggacaaggtgatcaagatcaaggccctggacagctgcaagatcgccagaagcggcttcaccacccccaaccaggtgctgggcgtgagcagcaaggccaccagcgtgaccacctacaagatcgaggacagcttcgtgatcgccgtgctggccgaggagacccacaacttcggcctgaacttcctgcagaccatcaagggcaagatcgtgagcaagcagaagctggagctgaagaccaccgaggccggccccagactgatgagcggcaagcaggccgccgccatcatcaaggccgtggacagcaagtacaccgccatccccatcgtgggccaggtgttccagagccactgcaagggctgccccagcctgagcgagctgtggagaagcaccagaaagtacctgcagcccgacaacctgagcaaggccgaggccgtgagaaacttcctggccttcatccagcacctgagaaccgccaagaaggaggagatcctgcagatcctgaagatggagaacaaggaggtgctgccccagctggtggacgccgtgaccagcgcccagaccagcgacagcctggaggccatcctggacttcctggacttcaagagcgacagcagcatcatcctgcaggagagattcctgtacgcctgcggcttcgccagccaccccaacgaggagctgctgagagccctgatcagcaagttcaagggcagcatcggcagcagcgacatcagagagaccgtgatgatcatcaccggcaccctggtgagaaagctgtgccagaacgagggctgcaagctgaaggccgtggtggaggccaagaagctgatcctgggcggcctggagaaggccgagaagaaggaggacaccagaatgtacctgctggccctgaagaacgccctgctgcccgagggcatccccagcctgctgaagtacgccgaggccggcgagggccccatcagccacctggccaccaccgccctgcagagatacgacctgcccttcatcaccgacgaggtgaagaagaccctgaacagaatctaccaccagaacagaaaggtgcacgagaagaccgtgagaaccgccgccgccgccatcatcctgaacaacaaccccagctacatggacgtgaagaacatcctgctgagcatcggcgagctgccccaggagatgaacaagtacatgctggccatcgtgcaggacatcctgagattcgagatgcccgccagcaagatcgtgagaagagtgctgaaggagatggtggcccacaactacgacagattcagcagaagcggcagcagcagcgcctacaccggctacatcgagagaagccccagaagcgccagcacctacagcctggacatcctgtacagcggcagcggcatcctgagaagaagcaacctgaacatcttccagtacatcggcaaggccggcctgcacggcagccaggtggtgatcgaggcccagggcctggaggccctgatcgccgccacccccgacgagggcgaggagaacctggacagctacgccggcatgagcgccatcctgttcgacgtgcagctgagacccgtgaccttcttcaacggctacagcgacctgatgagcaagatgctgagcgccagcggcgaccccatcagcgtggtgaagggcctgatcctgctgatcgaccacagccaggagctgcagctgcagagcggcctgaaggccaacatcgaggtgcagggcggcctggccatcgacatcagcggcgccatggagttcagcctgtggtacagagagagcaagaccagagtgaagaacagagtgaccgtggtgatcaccaccgacatcaccgtggacagcagcttcgtgaaggccggcctggagaccagcaccgagaccgaggccggcctggagttcatcagcaccgtgcagttcagccagtaccccttcctggtgtgcatgcagatggacaaggacgaggcccccttcagacagttcgagaagaagtacgagagactgagcaccggcagaggctacgtgagccagaagagaaaggagagcgtgctggccggctgcgagttccccctgcaccaggagaacagcgagatgtgcaaggtggtgttcgccccccagcccgacagcaccagcagcggctggttctag

SEQ ID NO: 2065 - DNA, 2685 bp, synthetic construct; identical to SEQ ID NO: 2064
  misc_feature 1..2685: note = source = /note="Description of Artificial Sequence: Synthetic coding sequence"
  source 1..2685: mol_type = other DNA

SEQ ID NO: 2066 - DNA, 537 bp, synthetic construct
  misc_feature 1..537: note = source = /note="Description of Artificial Sequence: Synthetic coding sequence"
  source 1..537: mol_type = other DNA
atggccagagcccccctgagacccgagaacaccatcgtgagaggcagcgccaaccagtgccaggacacctacagagccgaggagctgaccggccacaccaccggcctgagcctgaacaacgacagactgtacaagctgacctacagcaccgaggtgctgctggacagaggcaagggcaagctgcaggacagcgtgggctacagaatcagcagcaacgtggacgtggccctgctgtggagaaaccccgacggcgacgacgaccagctgatccagatcaccatgaaggacgtgaacgtggagaacgtgaaccagcagagaggcgagaagagcatcttcaagggcaagagccccagcaagatcatgggcaaggagaacctggaggccctgcagagacccaccctgctgcacctgatccacggcaaggtgaaggagttctacagctaccagaacgaggccgtggccatcgagaacatcaagagaggcctggccagcctgttccagacccagctgagcagcggcaccaccaacgaggtgtag

SEQ ID NO: 2067 - DNA, 1551 bp, synthetic construct
  misc_feature 1..1551: note = source = /note="Description of Artificial Sequence: Synthetic coding sequence"
  source 1..1551: mol_type = other DNA
atgatcctgctggccgtgctgttcctgtgcttcatcagcagctacagcgccagcgtgaagggccacaccaccggcctgagcctgaacaacgacagactgtacaagctgacctacagcaccgaggtgctgctggacagaggcaagggcaagctgcaggacagcgtgggctacagaatcagcagcaacgtggacgtggccctgctgtggagaaaccccgacggcgacgacgaccagctgatccagatcaccatgaaggacgtgaacgtggagaacgtgaaccagcagagaggcgagaagagcatcttcaagggcaagagccccagcaagatcatgggcaaggagaacctggaggccctgcagagacccaccctgctgcacctgatccacggcaaggtgaaggagttctacagctaccagaacgaggccgtggccatcgagaacatcaagagaggcctggccagcctgttccagacccagctgagcagcggcaccaccaacgaggtggacatcagcggcaactgcaaggtgacctaccaggcccaccaggacaaggtgatcaagatcaaggccctggacagctgcaagatcgccagaagcggcttcaccacccccaaccaggtgctgggcgtgagcagcaaggccaccagcgtgaccacctacaagatcgaggacagcttcgtgatcgccgtgctggccgaggagacccacaacttcggcctgaacttcctgcagaccatcaagggcaagatcgtgagcaagcagaagctggagctgaagaccaccgaggccggccccagactgatgagcggcaagcaggccgccgccatcatcaaggccgtggacagcaagtacaccgccatccccatcgtgggccaggtgttccagagccactgcaagggctgccccagcctgagcgagctgtggagaagcaccagaaagtacctgcagcccgacaacctgagcaaggccgaggccgtgagaaacttcctggccttcatccagcacctgagaaccgccaagaaggaggagatcctgcagatcctgaagatggagaacaaggaggtgctgccccagctggtggacgccgtgaccagcgcccagaccagcgacagcctggaggccatcctggacttcctggacttcaagagcgacagcagcatcatcctgcaggagagattcctgtacgcctgcggcttcgccagccaccccaacgaggagctgctgagagccctgatcagcaagttcaagggcagcatcggcagcagcgacatcagagagaccgtgatgatcatcaccggcaccctggtgagaaagctgtgccagaacgagggctgcaagctgaaggccgtggtggaggccaagaagctgatcctgggcggcctggagaaggccgagaagaaggaggacaccagaatgtacctgctggccctgaagaacgccctgctgcccgagggcatccccagcctgctgaagtacgccgaggccggcgagggccccatcagccacctggccaccaccgccctgcagagatacgacctgttccacaactag

SEQ ID NO: 2068 - DNA, 3771 bp, synthetic construct
  misc_feature 1..3771: note = source = /note="Description of Artificial Sequence: Synthetic coding sequence"
  source 1..3771: mol_type = other DNA
atgctgttcaagctgctgcagagacagacctacacctgcctgagccacagatacggcctgtacgtgtgcttcctgggcgtggtggtgaccatcgtgagcgccttccagttcggcgaggtggtgctggagtggagcagagaccagtaccacgtgctgttcgacagctacagagacaacatcgccggcaagagcttccagaacagactgtgcctgcccatgcccatcgacgtggtgtacacctgggtgaacggcaccgacctggagctgctgaaggagctgcagcaggtgagagagcagatggaggaggagcagaaggccatgagagagatcctgggcaagaacaccaccgagcccaccaagaagagcgagaagcagctggagtgcctgctgacccactgcatcaaggtgcccatgctggtgctggaccccgccctgcccgccaacatcaccctgaaggacctgcccagcctgtaccccagcttccacagcgccagcgacatcttcaacgtggccaagcccaagaaccccagcaccaacgtgagcgtggtggtgttcgacagcaccaaggacgtggaggacgcccacagcggcctgctgaagggcaacagcagacagaccgtgtggagaggctacctgaccaccgacaaggaggtgcccggcctggtgctgatgcaggacctggccttcctgagcggcttcccccccaccttcaaggagaccaaccagctgaagaccaagctgcccgagaacctgagcagcaaggtgaagctgctgcagctgtacagcgaggccagcgtggccctgctgaagctgaacaaccccaaggacttccaggagctgaacaagcagaccaagaagaacatgaccatcgacggcaaggagctgaccatcagccccgcctacctgctgtgggacctgagcgccatcagccagagcaagcaggacgaggacatcagcgccagcagattcgaggacaacgaggagctgagatacagcctgagaagcatcgagagacacgccccctgggtgagaaacatcttcatcgtgaccaacggccagatccccagctggctgaacctggacaaccccagagtgaccatcgtgacccaccaggacgtgttcagaaacctgagccacctgcccaccttcagcagccccgccatcgagagccacatccacagaatcgagggcctgagccagaagttcatctacctgaacgacgacgtgatgttcggcaaggacgtgtggcccgacgacttctacagccacagcaagggccagaaggtgtacctgacctggcccgtgcccaactgcgccgagggctgccccggcagctggatcaaggacggctactgcgacaaggcctgcaacaacagcgcctgcgactgggacggcggcgactgcagcggcaacagcggcggcagcagatacatcgccggcggcggcggcaccggcagcatcggcgtgggccagccctggcagttcggcggcggcatcaacagcgtgagctactgcaaccagggctgcgccaacagctggctggccgacaagttctgcgaccaggcctgcaacgtgctgagctgcggcttcgacgccggcgactgcggccaggaccacttccacgagctgtacaaggtgatcctgctgcccaaccagacccactacatcatccccaagggcgagtgcctgccctacttcagcttcgccgaggtggccaagagaggcgtggagggcgcctacagcgacaaccccatcatcagacacgccagcatcgccaacaagtggaagaccatccacctgatcatgcacagcggcatgaacgccaccaccatccacttcaacctgaccttccagaacaccaacgacgaggagttcaagatgcagatcaccgtggaggtggacaccagagagggccccaagctgaacagcaccgcccagaagggctacgagaacctggtgagccccatcaccctgctgcccgaggccgagatcctgttcgaggacatccccaaggagaagagattccccaagttcaagagacacgacgtgaacagcaccagaagagcccaggaggaggtgaagatccccctggtgaacatcagcctgctgcccaaggacgcccagctgagcctgaacaccctggacctgcagctggagcacggcgacatcaccctgaagggctacaacctgagcaagagcgccctgctgagaagcttcctgatgaacagccagcacgccaagatcaagaaccaggccatcatcaccgacgagaccaacgacagcctggtggccccccaggagaagcaggtgcacaagagcatcctgcccaacagcctgggcgtgagcgagagactgcagagactgaccttccccgccgtgagcgtgaaggtgaacggccacgaccagggccagaacccccccctggacctggagaccaccgccagattcagagtggagacccacacccagaagaccatcggcggcaacgtgaccaaggagaagccccccagcctgatcgtgcccctggagagccagatgaccaaggagaagaagatcaccggcaaggagaaggagaacagcagaatggaggagaacgccgagaaccacatcggcgtgaccgaggtgctgctgggcagaaagctgcagcactacaccgacagctacctgggcttcctgccctgggagaagaagaagtacttccaggacctgctggacgaggaggagagcctgaagacccagctggcctacttcaccgacagcaagaacaccggcagacagctgaaggacaccttcgccgacagcctgagatacgtgaacaagatcctgaacagcaagttcggcttcaccagcagaaaggtgcccgcccacatgccccacatgatcgacagaatcgtgatgcaggagctgcaggacatgttccccgaggagttcgacaagaccagcttccacaaggtgagacacagcgaggacatgcagttcgccttcagctacttctactacctgatgagcgccgtgcagcccctgaacatcagccaggtgttcgacgaggtggacaccgaccagagcggcgtgctgagcgacagagagatcagaaccctggccaccagaatccacgagctgcccctgagcctgcaggacctgaccggcctggagcacatgctgatcaactgcagcaagatgctgcccgccgacatcacccagctgaacaacatcccccccacccaggagagctactacgaccccaacctgccccccgtgaccaagagcctggtgaccaactgcaagcccgtgaccgacaagatccacaaggcctacaaggacaagaacaagtacagattcgagatcatgggcgaggaggagatcgccttcaagatgatcagaaccaacgtgagccacgtggtgggccagctggacgacatcagaaagaaccccagaaagttcgtgtgcctgaacgacaacatcgaccacaaccacaaggacgcccagaccgtgaaggccgtgctgagagacttctacgagagcatgttccccatccccagccagttcgagctgcccagagagtacagaaacagattcctgcacatgcacgagctgcaggagtggagagcctacagagacaagctgaagttctggacccactgcgtgctggccaccctgatcatgttcaccatcttcagcttcttcgccgagcagctgatcgccctgaagagaaagatcttccccagaagaagaatccacaaggaggccagccccaacagaatcagagtgtag

SEQ ID NO: 2069 - DNA, 1473 bp, synthetic construct
  misc_feature 1..1473: note = source = /note="Description of Artificial Sequence: Synthetic coding sequence"
  source 1..1473: mol_type = other DNA
atgctgttcaagctgctgcagagacagacctacacctgcctgagccacagatacggcctgtacgtgtgcttcctgggcgtggtggtgaccatcgtgagcgccttccagttcggcgaggtggtgctggagtggagcagagaccagtaccacgtgctgttcgacagctacagagacaacatcgccggcaagagcttccagaacagactgtgcctgcccatgcccatcgacgtggtgtacacctgggtgaacggcaccgacctggagctgctgaaggagctgcagcaggtgagagagcagatggaggaggagcagaaggccatgagagagatcctgggcaagaacaccaccgagcccaccaagaagagcgagaagcagctggagtgcctgctgacccactgcatcaaggtgcccatgctggtgctggaccccgccctgcccgccaacatcaccctgaaggacctgcccagcctgtaccccagcttccacagcgccagcgacatcttcaacgtggccaagcccaagaaccccagcaccaacgtgagcgtggtggtgttcgacagcaccaaggacgtggaggacgcccacagcggcctgctgaagggcaacagcagacagaccgtgtggagaggctacctgaccaccgacaaggaggtgcccggcctggtgctgatgcaggacctggccttcctgagcggcttcccccccaccttcaaggagaccaaccagctgaagaccaagctgcccgagaacctgagcagcaaggtgaagctgctgcagctgtacagcgaggccagcgtggccctgctgaagctgaacaaccccaaggacttccaggagctgaacaagcagaccaagaagaacatgaccatcgacggcaaggagctgaccatcagccccgcctacctgctgtgggacctgagcgccatcagccagagcaagcaggacgaggacatcagcgccagcagattcgaggacaacgaggagctgagatacagcctgagaagcatcgagagacacgccccctgggtgagaaacatcttcatcgtgaccaacggccagatccccagctggctgaacctggacaaccccagagtgaccatcgtgacccaccaggacgtgttcagaaacctgagccacctgcccaccttcagcagccccgccatcgagagccacatccacagaatcgagggcctgagccagaagttcatctacctgaacgacgacgtgatgttcggcaaggacgtgtggcccgacgacttctacagccacagcaagggccagaaggtgtacctgacctggcccgtgcccaactgcgccgagggctgccccggcagctggatcaaggacggctactgcgacaaggcctgcaacaacagcgcctgcgactgggacggcggcgactgcagcggcaaggacgtgctgaactgcaacagcttcatcttcatggagtacttcctgctgaaccactactag

SEQ ID NO: 2070 - DNA, 1605 bp, synthetic construct
  misc_feature 1..1605: note = source = /note="Description of Artificial Sequence: Synthetic coding sequence"
  source 1..1605: mol_type = other DNA
atggccaccgccctgatggccgtggtgctgagagccgccgccgtggcccccagactgagaggcagaggcggcaccggcggcgccagaagactgagctgcggcgccagaagaagagccgccagaggcaccagccccggcagaagactgagcaccgcctggagccagccccagcccccccccgaggagtacgccggcgccgacgacgtgagccagagccccgtggccgaggagcccagctgggtgcccagccccagaccccccgtgccccacgagagccccgagccccccagcggcagaagcctggtgcagagagacatccaggccttcctgaaccagtgcggcgccagccccggcgaggccagacactggctgacccagttccagacctgccaccacagcgccgacaagcccttcgccgtgatcgaggtggacgaggaggtgctgaagtgccagcagggcgtgagcagcctggccttcgccctggccttcctgcagagaatggacatgaagcccctggtggtgctgggcctgcccgcccccaccgcccccagcggctgcctgagcttctgggaggccaaggcccagctggccaagagctgcaaggtgctggtggacgccctgagacacaacgccgccgccgccgtgcccttcttcggcggcggcagcgtgctgagagccgccgagcccgccccccacgccagctacggcggcatcgtgagcgtggagaccgacctgctgcagtggtgcctggagagcggcagcatccccatcctgtgccccatcggcgagaccgccgccagaagaagcgtgctgctggacagcctggaggtgaccgccagcctggccaaggccctgagacccaccaagatcatcttcctgaacaacaccggcggcctgagagacagcagccacaaggtgctgagcaacgtgaacctgcccgccgacctggacctggtgtgcaacgccgagtgggtgagcaccaaggagagacagcagatgagactgatcgtggacgtgctgagcagactgccccaccacagcagcgccgtgatcaccgccgccagcaccctgctgaccgagctgttcagcaacaagggcagcggcaccctgttcaagaacgccgagagaatgctgagagtgagaagcctggacaagctggaccagggcagactggtggacctggtgaacgccagcttcggcaagaagctgagagacgactacctggccagcctgagacccagactgcacagcatctacgtgagcgagggctacaacgccgccgccatcctgaccatggagcccgtgctgggcggcaccccctacctggacaagttcgtggtgagcagcagcagacagggccagggcagcggccagatgctgtgggagtgcctgagaagagacctgcagaccctgttctggagaagcagagtgaccaaccccatcaacccctggtacttcaagcacagcgacggcagcttcagcaacaagcagtggatcttcttctggttcggcctggccgacatcagagacagctacgagctggtgaaccacgccaagggcctgcccgacagcttccacaagcccgccagcgaccccggcagctag

SEQ ID NO: 2071 - DNA, 1107 bp, synthetic construct
  misc_feature 1..1107: note = source = /note="Description of Artificial Sequence: Synthetic coding sequence"
  source 1..1107: mol_type = other DNA
atggacatgaagcccctggtggtgctgggcctgcccgcccccaccgcccccagcggctgcctgagcttctgggaggccaaggcccagctggccaagagctgcaaggtgctggtggacgccctgagacacaacgccgccgccgccgtgcccttcttcggcggcggcagcgtgctgagagccgccgagcccgccccccacgccagctacggcggcatcgtgagcgtggagaccgacctgctgcagtggtgcctggagagcggcagcatccccatcctgtgccccatcggcgagaccgccgccagaagaagcgtgctgctggacagcctggaggtgaccgccagcctggccaaggccctgagacccaccaagatcatcttcctgaacaacaccggcggcctgagagacagcagccacaaggtgctgagcaacgtgaacctgcccgccgacctggacctggtgtgcaacgccgagtgggtgagcaccaaggagagacagcagatgagactgatcgtggacgtgctgagcagactgccccaccacagcagcgccgtgatcaccgccgccagcaccctgctgaccgagctgttcagcaacaagggcagcggcaccctgttcaagaacgccgagagaatgctgagagtgagaagcctggacaagctggaccagggcagactggtggacctggtgaacgccagcttcggcaagaagctgagagacgactacctggccagcctgagacccagactgcacagcatctacgtgagcgagggctacaacgccgccgccatcctgaccatggagcccgtgctgggcggcaccccctacctggacaagttcgtggtgagcagcagcagacagggccagggcagcggccagatgctgtgggagtgcctgagaagagacctgcagaccctgttctggagaagcagagtgaccaaccccatcaacccctggtacttcaagcacagcgacggcagcttcagcaacaagcagtggatcttcttctggttcggcctggccgacatcagagacagctacgagctggtgaaccacgccaagggcctgcccgacagcttccacaagcccgccagcgaccccggcagctag

SEQ ID NO: 2072 - DNA, 1188 bp, synthetic construct
  misc_feature 1..1188: note = source = /note="Description of Artificial Sequence: Synthetic coding sequence"
  source 1..1188: mol_type = other DNA
atgcccggcagaagctgcgtggccctggtgctgctggccgccgccgtgagctgcgccgtggcccagcacgcccccccctggaccgaggactgcagaaagagcacctacccccccagcggccccacctacagaggcgccgtgccctggtacaccatcaacctggacctgcccccctacaagagatggcacgagctgatgctggacaaggcccccgtgctgaaggtgatcgtgaacagcctgaagaacatgatcaacaccttcgtgcccagcggcaagatcatgcaggtggtggacgagaagctgcccggcctgctgggcaacttccccggccccttcgaggaggagatgaagggcatcgccgccgtgaccgacatccccctgggcgagatcatcagcttcaacatcttctacgagctgttcaccatctgcaccagcatcgtggccgaggacaagaagggccacctgatccacggcagaaacatggacttcggcgtgttcctgggctggaacatcaacaacgacacctgggtgatcaccgagcagctgaagcccctgaccgtgaacctggacttccagagaaacaacaagaccgtgttcaaggccagcagcttcgccggctacgtgggcatgctgaccggcttcaagcccggcctgttcagcctgaccctgaacgagagattcagcatcaacggcggctacctgggcatcctggagtggatcctgggcaagaaggacgtgatgtggatcggcttcctgaccagaaccgtgctggagaacagcaccagctacgaggaggccaagaacctgctgaccaagaccaagatcctggcccccgcctacttcatcctgggcggcaaccagagcggcgagggctgcgtgatcaccagagacagaaaggagagcctggacgtgtacgagctggacgccaagcagggcagatggtacgtggtgcagaccaactacgacagatggaagcaccccttcttcctggacgacagaagaacccccgccaagatgtgcctgaacagaaccagccaggagaacatcagcttcgagaccatgtacgacgtgctgagcaccaagcccgtgctgaacaagctgaccgtgtacaccaccctgatcgacgtgaccaagggccagttcgagacctacctgagagactgccccgacccctgcatcggctggtag

SEQ ID NO: 2073 - DNA, 1170 bp, synthetic construct
  misc_feature 1..1170: note = source = /note="Description of Artificial Sequence: Synthetic coding sequence"
  source 1..1170: mol_type = other DNA
atgaactgctgcatcggcctgggcgagaaggccagaggcagccacagagccagctaccccagcctgagcgccctgttcaccgaggccagcatcctgggcttcggcagcttcgccgtgaaggcccagtggaccgaggactgcagaaagagcacctacccccccagcggccccaccgtgttccccgccgtgatcagatacagaggcgccgtgccctggtacaccatcaacctggacctgcccccctacaagagatggcacgagctgatgctggacaaggcccccgtgcccggcctgctgggcaacttccccggccccttcgaggaggagatgaagggcatcgccgccgtgaccgacatccccctgggcgagatcatcagcttcaacatcttctacgagctgttcaccatctgcaccagcatcgtggccgaggacaagaagggccacctgatccacggcagaaacatggacttcggcgtgttcctgggctggaacatcaacaacgacacctgggtgatcaccgagcagctgaagcccctgaccgtgaacctggacttccagagaaacaacaagaccgtgttcaaggccagcagcttcgccggctacgtgggcatgctgaccggcttcaagcccggcctgttcagcctgaccctgaacgagagattcagcatcaacggcggctacctgggcatcctggagtggatcctgggcaagaaggacgtgatgtggatcggcttcctgaccagaaccgtgctggagaacagcaccagctacgaggaggccaagaacctgctgaccaagaccaagatcctggcccccgcctacttcatcctgggcggcaaccagagcggcgagggctgcgtgatcaccagagacagaaaggagagcctggacgtgtacgagctggacgccaagcagggcagatggtacgtggtgcagaccaactacgacagatggaagcaccccttcttcctggacgacagaagaacccccgccaagatgtgcctgaacagaaccagccaggagaacatcagcttcgagaccatgtacgacgtgctgagcaccaagcccgtgctgaacaagctgaccgtgtacaccaccctgatcgacgtgaccaagggccagttcgagacctacctgagagactgccccgacccctgcatcggctggtag

SEQ ID NO: 2074 - DNA, 1236 bp, synthetic construct
  misc_feature 1..1236: note = source = /note="Description of Artificial Sequence: Synthetic coding sequence"
  source 1..1236: mol_type = other DNA
atgaactgctgcatcggcctgggcgagaaggccagaggcagccacagagccagctaccccagcctgagcgccctgttcaccgaggccagcatcctgggcttcggcagcttcgccgtgaaggcccagtggaccgaggactgcagaaagagcacctacccccccagcggccccacctacagaggcgccgtgccctggtacaccatcaacctggacctgcccccctacaagagatggcacgagctgatgctggacaaggcccccgtgctgaaggtgatcgtgaacagcctgaagaacatgatcaacaccttcgtgcccagcggcaagatcatgcaggtggtggacgagaagctgcccggcctgctgggcaacttccccggccccttcgaggaggagatgaagggcatcgccgccgtgaccgacatccccctgggcgagatcatcagcttcaacatcttctacgagctgttcaccatctgcaccagcatcgtggccgaggacaagaagggccacctgatccacggcagaaacatggacttcggcgtgttcctgggctggaacatcaacaacgacacctgggtgatcaccgagcagctgaagcccctgaccgtgaacctggacttccagagaaacaacaagaccgtgttcaaggccagcagcttcgccggctacgtgggcatgctgaccggcttcaagcccggcctgttcagcctgaccctgaacgagagattcagcatcaacggcggctacctgggcatcctggagtggatcctgggcaagaaggacgtgatgtggatcggcttcctgaccagaaccgtgctggagaacagcaccagctacgaggaggccaagaacctgctgaccaagaccaagatcctggcccccgcctacttcatcctgggcggcaaccagagcggcgagggctgcgtgatcaccagagacagaaaggagagcctggacgtgtacgagctggacgccaagcagggcagatggtacgtggtgcagaccaactacgacagatggaagcaccccttcttcctggacgacagaagaacccccgccaagatgtgcctgaacagaaccagccaggagaacatcagcttcgagaccatgtacgacgtgctgagcaccaagcccgtgctgaacaagctgaccgtgtacaccaccctgatcgacgtgaccaagggccagttcgagacctacctgagagactgccccgacccctgcatcggctggtag

SEQ ID NO: 2075 - DNA, 918 bp, synthetic construct
  misc_feature 1..918: note = source = /note="Description of Artificial Sequence: Synthetic coding sequence"
  source 1..918: mol_type = other DNA
atgctggacaaggcccccgtgctgaaggtgatcgtgaacagcctgaagaacatgatcaacaccttcgtgcccagcggcaagatcatgcaggtggtggacgagaagctgcccggcctgctgggcaacttccccggccccttcgaggaggagatgaagggcatcgccgccgtgaccgacatccccctgggccacctgatccacggcagaaacatggacttcggcgtgttcctgggctggaacatcaacaacgacacctgggtgatcaccgagcagctgaagcccctgaccgtgaacctggacttccagagaaacaacaagaccgtgttcaaggccagcagcttcgccggctacgtgggcatgctgaccggcttcaagcccggcctgttcagcctgaccctgaacgagagattcagcatcaacggcggctacctgggcatcctggagtggatcctgggcaagaaggacgtgatgtggatcggcttcctgaccagaaccgtgctggagaacagcaccagctacgaggaggccaagaacctgctgaccaagaccaagatcctggcccccgcctacttcatcctgggcggcaaccagagcggcgagggctgcgtgatcaccagagacagaaaggagagcctggacgtgtacgagctggacgccaagcagggcagatggtacgtggtgcagaccaactacgacagatggaagcaccccttcttcctggacgacagaagaacccccgccaagatgtgcctgaacagaaccagccaggagaacatcagcttcgagaccatgtacgacgtgctgagcaccaagcccgtgctgaacaagctgaccgtgtacaccaccctgatcgacgtgaccaagggccagttcgagacctacctgagagactgccccgacccctgcatcggctggtag

SEQ ID NO: 2076 - DNA, 1113 bp, synthetic construct
  misc_feature 1..1113: note = source = /note="Description of Artificial Sequence: Synthetic coding sequence"
  source 1..1113: mol_type = other DNA
atgcccggcagaagctgcgtggccctggtgctgctggccgccgccgtgagctgcgccgtggcccagcacgcccccccctggaccgaggactgcagaaagagcacctacccccccagcggccccacctacagaggcgccgtgccctggtacaccatcaacctggacctgcccccctacaagagatggcacgagctgatgctggacaaggcccccgtgctgaaggtgatcgtgaacagcctgaagaacatgatcaacaccttcgtgcccagcggcaagatcatgcaggtggtggacgagaagctgcccggcctgctgggcaacttccccggccccttcgaggaggagatgaagggcatcgccgccgtgaccgacatccccctgggccacctgatccacggcagaaacatggacttcggcgtgttcctgggctggaacatcaacaacgacacctgggtgatcaccgagcagctgaagcccctgaccgtgaacctggacttccagagaaacaacaagaccgtgttcaaggccagcagcttcgccggctacgtgggcatgctgaccggcttcaagcccggcctgttcagcctgaccctgaacgagagattcagcatcaacggcggctacctgggcatcctggagtggatcctgggcaagaaggacgtgatgtggatcggcttcctgaccagaaccgtgctggagaacagcaccagctacgaggaggccaagaacctgctgaccaagaccaagatcctggcccccgcctacttcatcctgggcggcaaccagagcggcgagggctgcgtgatcaccagagacagaaaggagagcctggacgtgtacgagctggacgccaagcagggcagatggtacgtggtgcagaccaactacgacagatggaagcaccccttcttcctggacgacagaagaacccccgccaagatgtgcctgaacagaaccagccaggagaacatcagcttcgagaccatgtacgacgtgctgagcaccaagcccgtgctgaacaagctgaccgtgtacaccaccctgatcgacgtgaccaagggccagttcgagacctacctgagagactgccccgacccctgcatcggctggtag

SEQ ID NO: 2077 - DNA, 405 bp, synthetic construct
  misc_feature 1..405: note = source = /note="Description of Artificial Sequence: Synthetic coding sequence"
  source 1..405: mol_type = other DNA
atggacccccagaccgcccccagcagagccctgctgctgctgctgttcctgcacctggccttcctgggcggcagaagccaccccctgggcagccccggcagcgccagcgacctggagaccagcggcctgcaggagcagagaaaccacctgcagggcaagctgagcgagctgcaggtggagcagaccagcctggagcccctgcaggagagccccagacccaccggcgtgtggaagagcagagaggtggccaccgagggcatcagaggccacagaaagatggtgctgtacaccctgagagcccccagaagccccaagatggtgcagggcagcggctgcttcggcagaaagatggacagaatcagcagcagcagcggcctgggctgcaaggtgctgagaagacactag

SEQ ID NO: 2078 - DNA, 726 bp, synthetic construct
  misc_feature 1..726: note = source = /note="Description of Artificial Sequence: Synthetic coding sequence"
  source 1..726: mol_type = other DNA
atgagcatgctgttctacaccctgatcaccgccttcctgatcggcatccaggccgagccccacagcgagagcaacgtgcccgccggccacaccatcccccaggcccactggaccaagctgcagcacagcctggacaccgccctgagaagagccagaagcgcccccgccgccgccatcgccgccagagtggccggccagaccagaaacatcaccgtggaccccagactgttcaagaagagaagactgagaagccccagagtgctgttcagcacccagccccccagagaggccgccgacacccaggacctggacttcgaggtgggcggcgccgcccccttcaacagaacccacagaagcaagagaagcagcagccaccccatcttccacagaggcgagttcagcgtgtgcgacagcgtgagcgtgtgggtgggcgacaagaccaccgccaccgacatcaagggcaaggaggtgatggtgctgggcgaggtgaacatcaacaacagcgtgttcaagcagtacttcttcgagaccaagtgcagagaccccaaccccgtggacagcggctgcagaggcatcgacagcaagcactggaacagctactgcaccaccacccacaccttcgtgaaggccctgaccatggacggcaagcaggccgcctggagattcatcagaatcgacaccgcctgcgtgtgcgtgctgagcagaaaggccgtgagaagagcctag

SEQ ID NO: 2079 - DNA, 1923 bp, synthetic construct
  misc_feature 1..1923: note = source = /note="Description of Artificial Sequence: Synthetic coding sequence"
  source 1..1923: mol_type = other DNA
atgagcgagagaaaggagggcagaggcaagggcaagggcaagaagaaggagagaggcagcggcaagaagcccgagagcgccgccggcagccagagccccgccctgccccccagactgaaggagatgaagagccaggagagcgccgccggcagcaagctggtgctgagatgcgagaccagcagcgagtacagcagcctgagattcaagtggttcaagaacggcaacgagctgaacagaaagaacaagccccagaacatcaagatccagaagaagcccggcaagagcgagctgagaatcaacaaggccagcctggccgacagcggcgagtacatgtgcaaggtgatcagcaagctgggcaacgacagcgccagcgccaacatcaccatcgtggagagcaacgagatcatcaccggcatgcccgccagcaccgagggcgcctacgtgagcagcgagagccccatcagaatcagcgtgagcaccgagggcgccaacaccagcagcagcaccagcaccagcaccaccggcaccagccacctggtgaagtgcgccgagaaggagaagaccttctgcgtgaacggcggcgagtgcttcatggtgaaggacctgagcaaccccagcagatacctgtgcaagtgccagcccggcttcaccggcgccagatgcaccgagaacgtgcccatgaaggtgcagaaccaggagaaggccgaggagctgtaccagaagagagtgctgaccatcaccggcatctgcatcgccctgctggtggtgggcatcatgtgcgtggtggcctactgcaagaccaagaagcagagaaagaagctgcacgacagactgagacagagcctgagaagcgagagaaacaacatgatgaacatcgccaacggcccccaccaccccaaccccccccccgagaacgtgcagctggtgaaccagtacgtgagcaagaacgtgatcagcagcgagcacatcgtggagagagaggccgagaccagcttcagcaccagccactacaccagcaccgcccaccacagcaccaccgtgacccagacccccagccacagctggagcaacggccacaccgagagcatcctgagcgagagccacagcgtgatcgtgatgagcagcgtggagaacagcagacacagcagccccaccggcggccccagaggcagactgaacggcaccggcggccccagagagtgcaacagcttcctgagacacgccagagagacccccgacagctacagagacagcccccacagcgagagatacgtgagcgccatgaccacccccgccagaatgagccccgtggacttccacacccccagcagccccaagagcccccccagcgagatgagcccccccgtgagcagcatgaccgtgagcatgcccagcatggccgtgagccccttcatggaggaggagagacccctgctgctggtgaccccccccagactgagagagaagaagttcgaccaccacccccagcagttcagcagcttccaccacaaccccgcccacgacagcaacagcctgcccgccagccccctgagaatcgtggaggacgaggagtacgagaccacccaggagtacgagcccgcccaggagcccgtgaagaagctggccaacagcagaagagccaagagaaccaagcccaacggccacatcgccaacagactggaggtggacagcaacaccagcagccagagcagcaacagcgagagcgagaccgaggacgagagagtgggcgaggacacccccttcctgggcatccagaaccccctggccgccagcctggaggccacccccgccttcagactggccgacagcagaaccaaccccgccggcagattcagcacccaggaggagatccaggccagactgagcagcgtgatcgccaaccaggaccccatcgccgtgtag

SEQ ID NO: 2080 - DNA, 1914 bp, synthetic construct
  misc_feature 1..1914: note = source = /note="Description of Artificial Sequence: Synthetic coding sequence"
  source 1..1914: mol_type = other DNA
atgagcgagagaaaggagggcagaggcaagggcaagggcaagaagaaggagagaggcagcggcaagaagcccgagagcgccgccggcagccagagccccgccctgccccccagactgaaggagatgaagagccaggagagcgccgccggcagcaagctggtgctgagatgcgagaccagcagcgagtacagcagcctgagattcaagtggttcaagaacggcaacgagctgaacagaaagaacaagccccagaacatcaagatccagaagaagcccggcaagagcgagctgagaatcaacaaggccagcctggccgacagcggcgagtacatgtgcaaggtgatcagcaagctgggcaacgacagcgccagcgccaacatcaccatcgtggagagcaacgagatcatcaccggcatgcccgccagcaccgagggcgcctacgtgagcagcgagagccccatcagaatcagcgtgagcaccgagggcgccaacaccagcagcagcaccagcaccagcaccaccggcaccagccacctggtgaagtgcgccgagaaggagaagaccttctgcgtgaacggcggcgagtgcttcatggtgaaggacctgagcaaccccagcagatacctgtgcaagtgccccaacgagttcaccggcgacagatgccagaactacgtgatggccagcttctacaaggccgaggagctgtaccagaagagagtgctgaccatcaccggcatctgcatcgccctgctggtggtgggcatcatgtgcgtggtggcctactgcaagaccaagaagcagagaaagaagctgcacgacagactgagacagagcctgagaagcgagagaaacaacatgatgaacatcgccaacggcccccaccaccccaaccccccccccgagaacgtgcagctggtgaaccagtacgtgagcaagaacgtgatcagcagcgagcacatcgtggagagagaggccgagaccagcttcagcaccagccactacaccagcaccgcccaccacagcaccaccgtgacccagacccccagccacagctggagcaacggccacaccgagagcatcctgagcgagagccacagcgtgatcgtgatgagcagcgtggagaacagcagacacagcagccccaccggcggccccagaggcagactgaacggcaccggcggccccagagagtgcaacagcttcctgagacacgccagagagacccccgacagctacagagacagcccccacagcgagagatacgtgagcgccatgaccacccccgccagaatgagccccgtggacttccacacccccagcagccccaagagcccccccagcgagatgagcccccccgtgagcagcatgaccgtgagcatgcccagcatggccgtgagccccttcatggaggaggagagacccctgctgctggtgaccccccccagactgagagagaagaagttcgaccaccacccccagcagttcagcagcttccaccacaaccccgcccacgacagcaacagcctgcccgccagccccctgagaatcgtggaggacgaggagtacgagaccacccaggagtacgagcccgcccaggagcccgtgaagaagctggccaacagcagaagagccaagagaaccaagcccaacggccacatcgccaacagactggaggtggacagcaacaccagcagccagagcagcaacagcgagagcgagaccgaggacgagagagtgggcgaggacacccccttcctgggcatccagaaccccctggccgccagcctggaggccacccccgccttcagactggccgacagcagaaccaaccccgccggcagattcagcacccaggaggagatccaggccagactgagcagcgtgatcgccaaccaggaccccatcgccgtgtag

SEQ ID NO: 2081 - DNA, 1836 bp, synthetic construct
  misc_feature 1..1836: note = source = /note="Description of Artificial Sequence: Synthetic coding sequence"
  source 1..1836: mol_type = other DNA
atgagcgagagaaaggagggcagaggcaagggcaagggcaagaagaaggagagaggcagcggcaagaagcccgagagcgccgccggcagccagagccccgccctgccccccagactgaaggagatgaagagccaggagagcgccgccggcagcaagctggtgctgagatgcgagaccagcagcgagtacagcagcctgagattcaagtggttcaagaacggcaacgagctgaacagaaagaacaagccccagaacatcaagatccagaagaagcccggcaagagcgagctgagaatcaacaaggccagcctggccgacagcggcgagtacatgtgcaaggtgatcagcaagctgggcaacgacagcgccagcgccaacatcaccatcgtggagagcaacgccaccagcaccagcaccaccggcaccagccacctggtgaagtgcgccgagaaggagaagaccttctgcgtgaacggcggcgagtgcttcatggtgaaggacctgagcaaccccagcagatacctgtgcaagtgccccaacgagttcaccggcgacagatgccagaactacgtgatggccagcttctacaagcacctgggcatcgagttcatggaggccgaggagctgtaccagaagagagtgctgaccatcaccggcatctgcatcgccctgctggtggtgggcatcatgtgcgtggtggcctactgcaagaccaagaagcagagaaagaagctgcacgacagactgagacagagcctgagaagcgagagaaacaacatgatgaacatcgccaacggcccccaccaccccaaccccccccccgagaacgtgcagctggtgaaccagtacgtgagcaagaacgtgatcagcagcgagcacatcgtggagagagaggccgagaccagcttcagcaccagccactacaccagcaccgcccaccacagcaccaccgtgacccagacccccagccacagctggagcaacggccacaccgagagcatcctgagcgagagccacagcgtgatcgtgatgagcagcgtggagaacagcagacacagcagccccaccggcggccccagaggcagactgaacggcaccggcggccccagagagtgcaacagcttcctgagacacgccagagagacccccgacagctacagagacagcccccacagcgagagatacgtgagcgccatgaccacccccgccagaatgagccccgtggacttccacacccccagcagccccaagagcccccccagcgagatgagcccccccgtgagcagcatgaccgtgagcatgcccagcatggccgtgagccccttcatggaggaggagagacccctgctgctggtgaccccccccagactgagagagaagaagttcgaccaccacccccagcagttcagcagcttccaccacaaccccgcccacgacagcaacagcctgcccgccagccccctgagaatcgtggaggacgaggagtacgagaccacccaggagtacgagcccgcccaggagcccgtgaagaagctggccaacagcagaagagccaagagaaccaagcccaacggccacatcgccaacagactggaggtggacagcaacaccagcagccagagcagcaacagcgagagcgagaccgaggacgagagagtgggcgaggacacccccttcctgggcatccagaaccccctggccgccagcctggaggccacccccgccttcagactggccgacagcagaaccaaccccgccggcagattcagcacccaggaggagatccaggccagactgagcagcgtgatcgccaaccaggaccccatcgccgtgtag

SEQ ID NO: 2082 - DNA, 1947 bp, synthetic construct
  misc_feature 1..1947: note = source = /note="Description of Artificial Sequence: Synthetic coding sequence"
  source 1..1947: mol_type = other DNA
atgagcgagagaaaggagggcagaggcaagggcaagggcaagaagaaggagagaggcagcggcaagaagcccgagagcgccgccggcagccagagccccgccctgccccccagactgaaggagatgaagagccaggagagcgccgccggcagcaagctggtgctgagatgcgagaccagcagcgagtacagcagcctgagattcaagtggttcaagaacggcaacgagctgaacagaaagaacaagccccagaacatcaagatccagaagaagcccggcaagagcgagctgagaatcaacaaggccagcctggccgacagcggcgagtacatgtgcaaggtgatcagcaagctgggcaacgacagcgccagcgccaacatcaccatcgtggagagcaacgagatcatcaccggcatgcccgccagcaccgagggcgcctacgtgagcagcgagagccccatcagaatcagcgtgagcaccgagggcgccaacaccagcagcagcaccagcaccagcaccaccggcaccagccacctggtgaagtgcgccgagaaggagaagaccttctgcgtgaacggcggcgagtgcttcatggtgaaggacctgagcaaccccagcagatacctgtgcaagtgccagcccggcttcaccggcgccagatgcaccgagaacgtgcccatgaaggtgcagaaccaggagaagcacagcggcgagcccttccccgaggccgaggagctgtaccagaagagagtgctgaccatcaccggcatctgcatcgccctgctggtggtgggcatcatgtgcgtggtggcctactgcaagaccaagaagcagagaaagaagctgcacgacagactgagacagagcctgagaagcgagagaaacaacatgatgaacatcgccaacggcccccaccaccccaaccccccccccgagaacgtgcagctggtgaaccagtacgtgagcaagaacgtgatcagcagcgagcacatcgtggagagagaggccgagaccagcttcagcaccagccactacaccagcaccgcccaccacagcaccaccgtgacccagacccccagccacagctggagcaacggccacaccgagagcatcctgagcgagagccacagcgtgatcgtgatgagcagcgtggagaacagcagacacagcagccccaccggcggccccagaggcagactgaacggcaccggcggccccagagagtgcaacagcttcctgagacacgccagagagacccccgacagctacagagacagcccccacagcgagagatacgtgagcgccatgaccacccccgccagaatgagccccgtggacttccacacccccagcagccccaagagcccccccagcgagatgagcccccccgtgagcagcatgaccgtgagcatgcccagcatggccgtgagccccttcatggaggaggagagacccctgctgctggtgaccccccccagactgagagagaagaagttcgaccaccacccccagcagttcagcagcttccaccacaaccccgcccacgacagcaacagcctgcccgccagccccctgagaatcgtggaggacgaggagtacgagaccacccaggagtacgagcccgcccaggagcccgtgaagaagctggccaacagcagaagagccaagagaaccaagcccaacggccacatcgccaacagactggaggtggacagcaacaccagcagccagagcagcaacagcgagagcgagaccgaggacgagagagtgggcgaggacacccccttcctgggcatccagaaccccctggccgccagcctggaggccacccccgccttcagactggccgacagcagaaccaaccccgccggcagattcagcacccaggaggagatccaggccagactgagcagcgtgatcgccaaccaggaccccatcgccgtgtag

SEQ ID NO: 2083 - DNA, 744 bp, synthetic construct
  misc_feature 1..744: note = source = /note="Description of Artificial Sequence: Synthetic coding sequence"
  source 1..744: mol_type = other DNA
atgagcgagagaaaggagggcagaggcaagggcaagggcaagaagaaggagagaggcagcggcaagaagcccgagagcgccgccggcagccagagccccgccctgccccccagactgaaggagatgaagagccaggagagcgccgccggcagcaagctggtgctgagatgcgagaccagcagcgagtacagcagcctgagattcaagtggttcaagaacggcaacgagctgaacagaaagaacaagccccagaacatcaagatccagaagaagcccggcaagagcgagctgagaatcaacaaggccagcctggccgacagcggcgagtacatgtgcaaggtgatcagcaagctgggcaacgacagcgccagcgccaacatcaccatcgtggagagcaacgagatcatcaccggcatgcccgccagcaccgagggcgcctacgtgagcagcgagagccccatcagaatcagcgtgagcaccgagggcgccaacaccagcagcagcaccagcaccagcaccaccggcaccagccacctggtgaagtgcgccgagaaggagaagaccttctgcgtgaacggcggcgagtgcttcatggtgaaggacctgagcaaccccagcagatacctgtgcaagtgccagcccggcttcaccggcgccagatgcaccgagaacgtgcccatgaaggtgcagaaccaggagagcgcccagatgagcctgctggtgatcgccgccaagaccacctag

SEQ ID NO: 2084 - DNA, 1938 bp, synthetic construct
  misc_feature 1..1938: note = source = /note="Description of Artificial Sequence: Synthetic coding sequence"
  source 1..1938: mol_type = other DNA
atgagcgagagaaaggagggcagaggcaagggcaagggcaagaagaaggagagaggcagcggcaagaagcccgagagcgccgccggcagccagagccccgccctgccccccagactgaaggagatgaagagccaggagagcgccgccggcagcaagctggtgctgagatgcgagaccagcagcgagtacagcagcctgagattcaagtggttcaagaacggcaacgagctgaacagaaagaacaagccccagaacatcaagatccagaagaagcccggcaagagcgagctgagaatcaacaaggccagcctggccgacagcggcgagtacatgtgcaaggtgatcagcaagctgggcaacgacagcgccagcgccaacatcaccatcgtggagagcaacgagatcatcaccggcatgcccgccagcaccgagggcgcctacgtgagcagcgagagccccatcagaatcagcgtgagcaccgagggcgccaacaccagcagcagcaccagcaccagcaccaccggcaccagccacctggtgaagtgcgccgagaaggagaagaccttctgcgtgaacggcggcgagtgcttcatggtgaaggacctgagcaaccccagcagatacctgtgcaagtgccccaacgagttcaccggcgacagatgccagaactacgtgatggccagcttctacaagcacctgggcatcgagttcatggaggccgaggagctgtaccagaagagagtgctgaccatcaccggcatctgcatcgccctgctggtggtgggcatcatgtgcgtggtggcctactgcaagaccaagaagcagagaaagaagctgcacgacagactgagacagagcctgagaagcgagagaaacaacatgatgaacatcgccaacggcccccaccaccccaaccccccccccgagaacgtgcagctggtgaaccagtacgtgagcaagaacgtgatcagcagcgagcacatcgtggagagagaggccgagaccagcttcagcaccagccactacaccagcaccgcccaccacagcaccaccgtgacccagacccccagccacagctggagcaacggccacaccgagagcatcctgagcgagagccacagcgtgatcgtgatgagcagcgtggagaacagcagacacagcagccccaccggcggccccagaggcagactgaacggcaccggcggccccagagagtgcaacagcttcctgagacacgccagagagacccccgacagctacagagacagcccccacagcgagagatacgtgagcgccatgaccacccccgccagaatgagccccgtggacttccacacccccagcagccccaagagcccccccagcgagatgagcccccccgtgagcagcatgaccgtgagcatgcccagcatggccgtgagccccttcatggaggaggagagacccctgctgctggtgaccccccccagactgagagagaagaagttcgaccaccacccccagcagttcagcagcttccaccacaaccccgcccacgacagcaacagcctgcccgccagccccctgagaatcgtggaggacgaggagtacgagaccacccaggagtacgagcccgcccaggagcccgtgaagaagctggccaacagcagaagagccaagagaaccaagcccaacggccacatcgccaacagactggaggtggacagcaacaccagcagccagagcagcaacagcgagagcgagaccgaggacgagagagtgggcgaggacacccccttcctgggcatccagaaccccctggccgccagcctggaggccacccccgccttcagactggccgacagcagaaccaaccccgccggcagattcagcacccaggaggagatccaggccagactgagcagcgtgatcgccaaccaggaccccatcgccgtgtag

SEQ ID NO: 2085 - DNA, 1923 bp, synthetic construct; identical to SEQ ID NO: 2079
  misc_feature 1..1923: note = source = /note="Description of Artificial Sequence: Synthetic coding sequence"
  source 1..1923: mol_type = other DNA

SEQ ID NO: 2086 - DNA, 1773 bp, synthetic construct
  misc_feature 1..1773: note = source = /note="Description of Artificial Sequence: Synthetic coding sequence"
  source 1..1773: mol_type = other DNA
atgggcaagggcagagccggcagagtgggcaccaccgccctgccccccagactgaaggagatgaagagccaggagagcgccgccggcagcaagctggtgctgagatgcgagaccagcagcgagtacagcagcctgagattcaagtggttcaagaacggcaacgagctgaacagaaagaacaagccccagaacatcaagatccagaagaagcccggcaagagcgagctgagaatcaacaaggccagcctggccgacagcggcgagtacatgtgcaaggtgatcagcaagctgggcaacgacagcgccagcgccaacatcaccatcgtggagagcaacgccaccagcaccagcaccaccggcaccagccacctggtgaagtgcgccgagaaggagaagaccttctgcgtgaacggcggcgagtgcttcatggtgaaggacctgagcaaccccagcagatacctgtgcaagtgccccaacgagttcaccggcgacagatgccagaactacgtgatggccagcttctacaagcacctgggcatcgagttcatggaggccgaggagctgtaccagaagagagtgctgaccatcaccggcatctgcatcgccctgctggtggtgggcatcatgtgcgtggtggcctactgcaagaccaagaagcagagaaagaagctgcacgacagactgagacagagcctgagaagcgagagaaacaacatgatgaacatcgccaacggcccccaccaccccaaccccccccccgagaacgtgcagctggtgaaccagtacgtgagcaagaacgtgatcagcagcgagcacatcgtggagagagaggccgagaccagcttcagcaccagccactacaccagcaccgcccaccacagcaccaccgtgacccagacccccagccacagctggagcaacggccacaccgagagcatcctgagcgagagccacagcgtgatcgtgatgagcagcgtggagaacagcagacacagcagccccaccggcggccccagaggcagactgaacggcaccggcggccccagagagtgcaacagcttcctgagacacgccagagagacccccgacagctacagagacagcccccacagcgagagatacgtgagcgccatgaccacccccgccagaatgagccccgtggacttccacacccccagcagccccaagagcccccccagcgagatgagcccccccgtgagcagcatgaccgtgagcatgcccagcatggccgtgagccccttcatggaggaggagagacccctgctgctggtgaccccccccagactgagagagaagaagttcgaccaccacccccagcagttcagcagcttccaccacaaccccgcccacgacagcaacagcctgcccgccagccccctgagaatcgtggaggacgaggagtacgagaccacccaggagtacgagcccgcccaggagcccgtgaagaagctggccaacagcagaagagccaagagaaccaagcccaacggccacatcgccaacagactggaggtggacagcaacaccagcagccagagcagcaacagcgagagcgagaccgaggacgagagagtgggcgaggacacccccttcctgggcatccagaaccccctggccgccagcctggaggccacccccgccttcagactggccgacagcagaaccaaccccgccggcagattcagcacccaggaggagatccaggccagactgagcagcgtgatcgccaaccaggaccccatcgccgtgtag

SEQ ID NO: 2087 - DNA, 1269 bp, synthetic construct
  misc_feature 1..1269: note = source = /note="Description of Artificial Sequence: Synthetic coding sequence"
  source 1..1269: mol_type = other DNA
atgagatggagaagagcccccagaagaagcggcagacccggccccagagcccagagacccggcagcgccgccagaagcagcccccccctgcccctgctgcccctgctgctgctgctgggcaccgccgccctggcccccggcgccgccgccggcaacgaggccgcccccgccggcgccagcgtgtgctacagcagcccccccagcgtgggcagcgtgcaggagctggcccagagagccgccgtggtgatcgagggcaaggtgcacccccagagaagacagcagggcgccctggacagaaaggccgccgccgccgccggcgaggccggcgcctggggcggcgacagagagccccccgccgccggccccagagccctgggcccccccgccgaggagcccctgctggccgccaacggcaccgtgcccagctggcccaccgcccccgtgcccagcgccggcgagcccggcgaggaggccccctacctggtgaaggtgcaccaggtgtgggccgtgaaggccggcggcctgaagaaggacagcctgctgaccgtgagactgggcacctggggccaccccgccttccccagctgcggcagactgaaggaggacagcagatacatcttcttcatggagcccgacgccaacagcaccagcagagcccccgccgccttcagagccagcttcccccccctggagaccggcagaaacctgaagaaggaggtgagcagagtgctgtgcaagagatgcgccctgccccccagactgaaggagatgaagagccaggagagcgccgccggcagcaagctggtgctgagatgcgagaccagcagcgagtacagcagcctgagattcaagtggttcaagaacggcaacgagctgaacagaaagaacaagccccagaacatcaagatccagaagaagcccggcaagagcgagctgagaatcaacaaggccagcctggccgacagcggcgagtacatgtgcaaggtgatcagcaagctgggcaacgacagcgccagcgccaacatcaccatcgtggagagcaacgccaccagcaccagcaccaccggcaccagccacctggtgaagtgcgccgagaaggagaagaccttctgcgtgaacggcggcgagtgcttcatggtgaaggacctgagcaaccccagcagatacctgtgcaagtgccccaacgagttcaccggcgacagatgccagaactacgtgatggccagcttctacagcaccagcacccccttcctgagcctgcccgagtag

SEQ ID NO: 2088 - DNA, 891 bp, synthetic construct
  misc_feature 1..891: note = source = /note="Description of Artificial Sequence: Synthetic coding sequence"
  source 1..891: mol_type = other DNA
atggagatctacagccccgacatgagcgaggtggccgccgagagaagcagcagccccagcacccagctgagcgccgaccccagcctggacggcctgcccgccgccgaggacatgcccgagccccagaccgaggacggcagaacccccggcctggtgggcctggccgtgccctgctgcgcctgcctggaggccgagagactgagaggctgcctgaacagcgagaagatctgcatcgtgcccatcctggcctgcctggtgagcctgtgcctgtgcatcgccggcctgaagtgggtgttcgtggacaagatcttcgagtacgacagccccacccacctggaccccggcggcctgggccaggaccccatcatcagcctggacgccaccgccgccagcgccgtgtgggtgagcagcgaggcctacaccagccccgtgagcagagcccagagcgagagcgaggtgcaggtgaccgtgcagggcgacaaggccgtggtgagcttcgagcccagcgccgcccccacccccaagaacagaatcttcgccttcagcttcctgcccagcaccgcccccagcttccccagccccaccagaaaccccgaggtgagaacccccaagagcgccacccagccccagaccaccgagaccaacctgcagaccgcccccaagctgagcaccagcaccagcaccaccggcaccagccacctggtgaagtgcgccgagaaggagaagaccttctgcgtgaacggcggcgagtgcttcatggtgaaggacctgagcaaccccagcagatacctgtgcaagtgccccaacgagttcaccggcgacagatgccagaactacgtgatggccagcttctacagcaccagcacccccttcctgagcctgcccgagtag

SEQ ID NO: 2089 - DNA, 1389 bp, synthetic construct
  misc_feature 1..1389: note = source = /note="Description of Artificial Sequence: Synthetic coding sequence"
  source 1..1389: mol_type = other DNA
atgagcgagagaaaggagggcagaggcaagggcaagggcaagaagaaggagagaggcagcggcaagaagcccgagagcgccgccggcagccagagccccgccctgccccccagactgaaggagatgaagagccaggagagcgccgccggcagcaagctggtgctgagatgcgagaccagcagcgagtacagcagcctgagattcaagtggttcaagaacggcaacgagctgaacagaaagaacaagccccagaacatcaagatccagaagaagcccggcaagagcgagctgagaatcaacaaggccagcctggccgacagcggcgagtacatgtgcaaggtgatcagcaagctgggcaacgacagcgccagcgccaacatcaccatcgtggagagcaacgagatcatcaccggcatgcccgccagcaccgagggcgcctacgtgagcagcgagagccccatcagaatcagcgtgagcaccgagggcgccaacaccagcagcagcaccagcaccagcaccaccggcaccagccacctggtgaagtgcgccgagaaggagaagaccttctgcgtgaacggcggcgagtgcttcatggtgaaggacctgagcaaccccagcagatacctgtgcaagtgccagcccggcttcaccggcgccagatgcaccgagaacgtgcccatgaaggtgcagaaccaggagaaggccgaggagctgtaccagaagagagtgctgaccatcaccggcatctgcatcgccctgctggtggtgggcatcatgtgcgtggtggcctactgcaagaccaagaagcagagaaagaagctgcacgacagactgagacagagcctgagaagcgagagaaacaacatgatgaacatcgccaacggcccccaccaccccaaccccccccccgagaacgtgcagctggtgaaccagtacgtgagcaagaacgtgatcagcagcgagcacatcgtggagagagaggccgagaccagcttcagcaccagccactacaccagcaccgcccaccacagcaccaccgtgacccagacccccagccacagctggagcaacggccacaccgagagcatcctgagcgagagccacagcgtgatcgtgatgagcagcgtggagaacagcagacacagcagccccaccggcggccccagaggcagactgaacggcaccggcggccccagagagtgcaacagcttcctgagacacgccagagagacccccgacagctacagagacagcccccacagcgagagacacaacctgatcgccgagctgagaagaaacaaggcccacagaagcaagtgcatgcagatccagctgagcgccacccacctgagaagcagcagcatcccccacctgggcttcatcctgtag

SEQ ID NO: 2090 - DNA, 1452 bp, synthetic construct
  misc_feature 1..1452: note = source = /note="Description of Artificial Sequence: Synthetic coding sequence"
  source 1..1452: mol_type = other DNA
atgcagatccccaagcacatcagcatcgaggacatcaccgccaccagcaccagcaccaccggcaccagccacctggtgaagtgcgccgagaaggagaagaccttctgcgtgaacggcggcgagtgcttcatggtgaaggacctgagcaaccccagcagatacctgtgcaagtgccccaacgagttcaccggcgacagatgccagaactacgtgatggccagcttctacaaggccgaggagctgtaccagaagagagtgctgaccatcaccggcatctgcatcgccctgctggtggtgggcatcatgtgcgtggtggcctactgcaagaccaagaagcagagaaagaagctgcacgacagactgagacagagcctgagaagcgagagaaacaacatgatgaacatcgccaacggcccccaccaccccaaccccccccccgagaacgtgcagctggtgaaccagtacgtgagcaagaacgtgatcagcagcgagcacatcgtggagagagaggccgagaccagcttcagcaccagccactacaccagcaccgcccaccacagcaccaccgtgacccagacccccagccacagctggagcaacggccacaccgagagcatcctgagcgagagccacagcgtgatcgtgatgagcagcgtggagaacagcagacacagcagccccaccggcggccccagaggcagactgaacggcaccggcggccccagagagtgcaacagcttcctgagacacgccagagagacccccgacagctacagagacagcccccacagcgagagatacgtgagcgccatgaccacccccgccagaatgagccccgtggacttccacacccccagcagccccaagagcccccccagcgagatgagcccccccgtgagcagcatgaccgtgagcatgcccagcatggccgtgagccccttcatggaggaggagagacccctgctgctggtgaccccccccagactgagagagaagaagttcgaccaccacccccagcagttcagcagcttccaccacaaccccgcccacgacagcaacagcctgcccgccagccccctgagaatcgtggaggacgaggagtacgagaccacccaggagtacgagcccgcccaggagcccgtgaagaagctggccaacagcagaagagccaagagaaccaagcccaacggccacatcgccaacagactggaggtggacagcaacaccagcagccagagcagcaacagcgagagcgagaccgaggacgagagagtgggcgaggacacccccttcctgggcatccagaaccccctggccgccagcctggaggccacccccgccttcagactggccgacagcagaaccaaccccgccggcagattcagcacccaggaggagatccaggccagactgagcagcgtgatcgccaaccaggaccccatcgccgtgtag

SEQ ID NO: 2091 - DNA, 1263 bp, synthetic construct
  misc_feature 1..1263: note = source = /note="Description of Artificial Sequence: Synthetic coding sequence"
  source 1..1263: mol_type = other DNA
atgagcgagagaaaggagggcagaggcaagggcaagggcaagaagaaggagagaggcagcggcaagaagcccgagagcgccgccggcagccagagccccgccctgccccccagactgaaggagatgaagagccaggagagcgccgccggcagcaagctggtgctgagatgcgagaccagcagcgagtacagcagcctgagattcaagtggttcaagaacggcaacgagctgaacagaaagaacaagccccagaacatcaagatccagaagaagcccggcaagagcgagctgagaatcaacaaggccagcctggccgacagcggcgagtacatgtgcaaggtgatcagcaagctgggcaacgacagcgccagcgccaacatcaccatcgtggagagcaacgagatcatcaccggcatgcccgccagcaccgagggcgcctacgtgagcagcgagagccccatcagaatcagcgtgagcaccgagggcgccaacaccagcagcagcaccagcaccagcaccaccggcaccagccacctggtgaagtgcgccgagaaggagaagaccttctgcgtgaacggcggcgagtgcttcatggtgaaggacctgagcaaccccagcagatacctgtgcaagtgccccaacgagttcaccggcgacagatgccagaactacgtgatggccagcttctacaaggccgaggagctgtaccagaagagagtgctgaccatcaccggcatctgcatcgccctgctggtggtgggcatcatgtgcgtggtggcctactgcaagaccaagaagcagagaaagaagctgcacgacagactgagacagagcctgagaagcgagagaaacaacatgatgaacatcgccaacggcccccaccaccccaaccccccccccgagaacgtgcagctggtgaaccagtacgtgagcaagaacgtgatcagcagcgagcacatcgtggagagagaggccgagaccagcttcagcaccagccactacaccagcaccgcccaccacagcaccaccgtgacccagacccccagccacagctggagcaacggccacaccgagagcatcctgagcgagagccacagcgtgatcgtgatgagcagcgtggagaacagcagacacagcagccccaccggcggccccagaggcagactgaacggcaccggcggccccagagagtgcaacagcttcctgagacacgccagagagacccccgacagctacagagacagcccccacagcgagagatag

SEQ ID NO: 2092 - DNA, 1065 bp, synthetic construct
  misc_feature 1..1065: note = source = /note="Description of Artificial Sequence: Synthetic coding sequence"
  source 1..1065: mol_type = other DNA
atgctgttcaacctgagaatcctgctgaacaacgccgccttcagaaacggccacaacttcatggtgagaaacttcagatgcggccagcccctgcagaacaaggtgcagctgaagggcagagacctgctgaccctgaagaacttcaccggcgaggagatcaagtacatgctgtggctgagcgccgacctgaagttcagaatcaagcagaagggcgagtacctgcccctgctgcagggcaagagcctgggcatgatcttcgagaagagaagcaccagaaccagactgagcaccgagaccggcttcgccctgctgggcggccacccctgcttcctgaccacccaggacatccacctgggcgtgaacgagagcctgaccgacaccgccagagtgctgagcagcatggccgacgccgtgctggccagagtgtacaagcagagcgacctggacaccctggccaaggaggccagcatccccatcatcaacggcctgagcgacctgtaccaccccatccagatcctggccgactacctgaccctgcaggagcactacagcagcctgaagggcctgaccctgagctggatcggcgacggcaacaacatcctgcacagcatcatgatgagcgccgccaagttcggcatgcacctgcaggccgccacccccaagggctacgagcccgacgccagcgtgaccaagctggccgagcagtacgccaaggagaacggcaccaagctgctgctgaccaacgaccccctggaggccgcccacggcggcaacgtgctgatcaccgacacctggatcagcatgggccaggaggaggagaagaagaagagactgcaggccttccagggctaccaggtgaccatgaagaccgccaaggtggccgccagcgactggaccttcctgcactgcctgcccagaaagcccgaggaggtggacgacgaggtgttctacagccccagaagcctggtgttccccgaggccgagaacagaaagtggaccatcatggccgtgatggtgagcctgctgaccgactacagcccccagctgcagaagcccaagttctag

SEQ ID NO: 2093 - DNA, 348 bp, synthetic construct
  misc_feature 1..348: note = source = /note="Description of Artificial Sequence: Synthetic coding sequence"
  source 1..348: mol_type = other DNA
atgatccccgccaaggacatggccaaggtgatgatcgtgatgctggccatctgcttcctgaccaagagcgacggcaagagcgtgaagaagagaagcgtgagcgagatccagctgatgcacaacctgggcaagcacctgaacagcatggagagagtggagtggctgagaaagaagctgcaggacgtgcacaacttcgtggccctgggcgcccccctggcccccagagacgccggcagccagagacccagaaagaaggaggacaacgtgctggtggagagccacgagaagagcctgggcgaggccgacaaggccgacgtgaacgtgctgaccaaggccaagagccagtag

SEQ ID NO: 2094 - DNA, 348 bp, synthetic construct; identical to SEQ ID NO: 2093
  misc_feature 1..348: note = source = /note="Description of Artificial Sequence: Synthetic coding sequence"
  source 1..348: mol_type = other DNA

SEQ ID NO: 2095 - DNA, 354 bp, synthetic construct
  misc_feature 1..354: note = source = /note="Description of Artificial Sequence: Synthetic coding sequence"
  source 1..354: mol_type = other DNA
atgagcaccgccgtgctggagaaccccggcctgggcagaaagctgagcgacttcggccaggagaccagctacatcgaggacaactgcaaccagaacggcgccatcagcctgatcttcagcctgaaggaggaggtgggcgccctggccaaggtgctgagactgttcgaggagaacgacgtgaacctgacccacatcgagagcagacccagcagactgaagaaggacgagtacgagttcttcacccacctggacaagagaagcctgcccgccctgaccaacatcatcaagatcctgagacacgacatcggcgccaccgtgcacgagctgagcagagacaagaagaaggacacctag

SEQ ID NO: 2096 - DNA, 411 bp, synthetic construct
  misc_feature 1..411: note = source = /note="Description of Artificial Sequence: Synthetic coding sequence"
  source 1..411: mol_type = other DNA
atgagcaccgccgtgctggagaaccccggcctgggcagaaagctgagcgacttcggccaggagaccagctacatcgaggacaactgcaaccagaacggcgccatcagcctgatcttcagcctgaaggaggaggtgggcgccctggccaaggtgctgagactgttcgaggagaacgacgtgaacctgacccacatcgagagcagacccagcagactgaagaaggacgagtacgagttcttcacccacctggacaagagaagcctgcccgccctgaccaacatcatcaagatcctgagacacgacatcggcgccaccgtgcacgagctgagcagagacaagaagaaggacaccgtgccctggttccccagaaccatccaggagctggacagattcgccaaccagatcctgtag

SEQ ID NO: 2097 - DNA, 1359 bp, synthetic construct
  misc_feature 1..1359: note = source = /note="Description of Artificial Sequence: Synthetic coding sequence"
  source 1..1359: mol_type = other DNA
atgagcaccgccgtgctggagaaccccggcctgggcagaaagctgagcgacttcggccaggagaccagctacatcgaggacaactgcaaccagaacggcgccatcagcctgatcttcagcctgaaggaggaggtgggcgccctggccaaggtgctgagactgttcgaggagaacgacgtgaacctgacccacatcgagagcagacccagcagactgaagaaggacgagtacgagttcttcacccacctggacaagagaagcctgcccgccctgaccaacatcatcaagatcctgagacacgacatcggcgccaccgtgcacgagctgagcagagacaagaagaaggacaccgtgccctggttccccagaaccatccaggagctggacagattcgccaaccagatcctgagctacggcgccgagctggacgccgaccaccccggcttcaaggaccccgtgtacagagccagaagaaagcagttcgccgacatcgcctacaactacagacacggccagcccatccccagagtggagtacatggaggaggagaagaagacctggggcaccgtgttcaagaccctgaagagcctgtacaagacccacgcctgctacgagtacaaccacatcttccccctgctggagaagtactgcggcttccacgaggacaacatcccccagctggaggacgtgagccagttcctgcagacctgcaccggcttcagactgagacccgtggccggcctgctgagcagcagagacttcctgggcggcctggccttcagagtgttccactgcacccagtacatcagacacggcagcaagcccatgtacacccccgagcccgacatctgccacgagctgctgggccacgtgcccctgttcagcgacagaagcttcgcccagttcagccaggagatcggcctggccagcctgggcgcccccgacgagtacatcgagaagctggccaccatctactggttcaccgtggagttcggcctgtgcaagcagggcgacagcatcaaggcctacggcgccggcctgctgagcagcttcggcgagctgcagtactgcctgagcgagaagcccaagctgctgcccctggagctggagaagaccgccatccagaactacaccgtgaccgagttccagcccctgtactacgtggccgagagcttcaacgacgccaaggagaaggtgagaaacttcgccgccaccatccccagacccttcagcgtgagatacgacccctacacccagagaatcgaggtgctggacaacacccagcagctgaagatcctggccgacagcatcaacagcgagatcggcatcctgtgcagcgccctgcagaagatcaagtag

SEQ ID NO: 2098 - DNA, 3261 bp, synthetic construct
  misc_feature 1..3261: note = source = /note="Description of Artificial Sequence: Synthetic coding sequence"
  source 1..3261: mol_type = other DNA
atggcctgcagccccgacgccgtggtgagccccagcagcgccttcctgagaagcggcagcgtgtacgagcccctgaagagcatcaacctgcccagacccgacaacgagaccctgtgggacaagctggaccactactacagaatcgtgaagagcaccctgctgctgtaccagagccccaccaccggcctgttccccaccaagacctgcggcggcgaccagaaggccaagatccaggacagcctgtactgcgccgccggcgcctgggccctggccctggcctacagaagaatcgacgacgacaagggcagaacccacgagctggagcacagcgccatcaagtgcatgagaggcatcctgtactgctacatgagacaggccgacaaggtgcagcagttcaagcaggaccccagacccaccacctgcctgcacagcgtgttcaacgtgcacaccggcgacgagctgctgagctacgaggagtacggccacctgcagatcaacgccgtgagcctgtacctgctgtacctggtggagatgatcagcagcggcctgcagatcatctacaacaccgacgaggtgagcttcatccagaacctggtgttctgcgtggagagagtgtacagagtgcccgacttcggcgtgtgggagagaggcagcaagtacaacaacggcagcaccgagctgcacagcagcagcgtgggcctggccaaggccgccctggaggccatcaacggcttcaacctgttcggcaaccagggctgcagctggagcgtgatcttcgtggacctggacgcccacaacagaaacagacagaccctgtgcagcctgctgcccagagagagcagaagccacaacaccgacgccgccctgctgccctgcatcagctaccccgccttcgccctggacgacgaggtgctgttcagccagaccctggacaaggtggtgagaaagctgaagggcaagtacggcttcaagagattcctgagagacggctacagaaccagcctggaggaccccaacagatgctactacaagcccgccgagatcaagctgttcgacggcatcgagtgcgagttccccatcttcttcctgtacatgatgatcgacggcgtgttcagaggcaaccccaagcaggtgcaggagtaccaggacctgctgacccccgtgctgcaccacaccaccgagggctaccccgtggtgcccaagtactactacgtgcccgccgacttcgtggagtacgagaagaacaaccccggcagccagaagagattccccagcaactgcggcagagacggcaagctgttcctgtggggccaggccctgtacatcatcgccaagctgctggccgacgagctgatcagccccaaggacatcgaccccgtgcagagatacgtgcccctgaaggaccagagaaacgtgagcatgagattcagcaaccagggccccctggagaacgacctggtggtgcacgtggccctgatcgccgagagccagagactgcaggtgttcctgaacacctacggcatccagacccagaccccccagcaggtggagcccatccagatctggccccagcaggagctggtgaaggcctacctgcagctgggcatcaacgagaagctgggcctgagcggcagacccgacagacccatcggctgcctgggcaccagcaagatctacagaatcctgggcaagaccgtggtgtgctaccccatcatcttcgacctgagcgacttctacatgagccaggacgtgttcctgctgatcgacgacatcaagaacgccctgcagttcatcaagcagtactggaagatgcacggcagacccctgttcctggtgctgatcagagaggacaacatcagaggcagcagattcaaccccatcctggacatgctggccgccctgaagaagggcatcatcggcggcgtgaaggtgcacgtggacagactgcagaccctgatcagcggcgccgtggtggagcagctggacttcctgagaatcagcgacaccgaggagctgcccgagttcaagagcttcgaggagctggagccccccaagcacagcaaggtgaagagacagagcagcacccccagcgcccccgagctgggccagcagcccgacgtgaacatcagcgagtggaaggacaagcccacccacgagatcctgcagaagctgaacgactgcagctgcctggccagccaggccatcctgctgggcatcctgctgaagagagagggccccaacttcatcaccaaggagggcaccgtgagcgaccacatcgagagagtgtacagaagagccggcagccagaagctgtggagcgtggtgagaagagccgccagcctgctgagcaaggtggtggacagcctggcccccagcatcaccaacgtgctggtgcagggcaagcaggtgaccctgggcgccttcggccacgaggaggaggtgatcagcaaccccctgagccccagagtgatccagaacatcatctactacaagtgcaacacccacgacgagagagaggccgtgatccagcaggagctggtgatccacatcggctggatcatcagcaacaaccccgagctgttcagcggcatgctgaagatcagaatcggctggatcatccacgccatggagtacgagctgcagatcagaggcggcgacaagcccgccctggacctgtaccagctgagccccagcgaggtgaagcagctgctgctggacatcctgcagccccagcagaacggcagatgctggctgaacagaagacagatcgacggcagcctgaacagaacccccaccggcttctacgacagagtgtggcagatcctggagagaacccccaacggcatcatcgtggccggcaagcacctgccccagcagcccaccctgagcgacatgaccatgtacgagatgaacttcagcctgctggtggaggacaccctgggcaacatcgaccagccccagtacagacagatcgtggtggagctgctgatggtggtgagcatcgtgctggagagaaaccccgagctggagttccaggacaaggtggacctggacagactggtgaaggaggccttcaacgagttccagaaggaccagagcagactgaaggagatcgagaagcaggacgacatgaccagcttctacaacaccccccccctgggcaagagaggcacctgcagctacctgaccaaggccgtgatgaacctgctgctggagggcgaggtgaagcccaacaacgacgacccctgcctgatcagctag

SEQ ID NO: 2099 - DNA, 1221 bp, synthetic construct
  misc_feature 1..1221: note = source = /note="Description of Artificial Sequence: Synthetic coding sequence"
  source 1..1221: mol_type = other DNA
atgaccctggacgtgggccccgaggacgagctgcccgactgggccgccgccaaggagttctaccagaagtacgaccccaaggacgtgatcggcagaggcgtgagcagcgtggtgagaagatgcgtgcacagagccaccggccacgagttcgccgtgaagatcatggaggtgaccgccgagagactgagccccgagcagctggaggaggtgagagaggccaccagaagagagacccacatcctgagacaggtggccggccacccccacatcatcaccctgatcgacagctacgagagcagcagcttcatgttcctggtgttcgacctgatgagaaagggcgagctgttcgactacctgaccgagaaggtggccctgagcgagaaggagaccagaagcatcatgagaagcctgctggaggccgtgagcttcctgcacgccaacaacatcgtgcacagagacctgaagcccgagaacatcctgctggacgacaacatgcagatcagactgagcgacttcggcttcagctgccacctggagcccggcgagaagctgagagagctgtgcggcacccccggctacctggcccccgagatcctgaagtgcagcatggacgagacccaccccggctacggcaaggaggtggacctgtgggcctgcggcgtgatcctgttcaccctgctggccggcagcccccccttctggcacagaagacagatcctgatgctgagaatgatcatggagggccagtaccagttcagcagccccgagtgggacgacagaagcagcaccgtgaaggacctgatcagcagactgctgcaggtggaccccgaggccagactgaccgccgagcaggccctgcagcaccccttcttcgagagatgcgagggcagccagccctggaacctgacccccagacagagattcagagtggccgtgtggaccgtgctggccgccggcagagtggccctgagcacccacagagtgagacccctgaccaagaacgccctgctgagagacccctacgccctgagaagcgtgagacacctgatcgacaactgcgccttcagactgtacggccactgggtgaagaagggcgagcagcagaacagagccgccctgttccagcacagaccccccggccccttccccatcatgggccccgaggaggagggcgacagcgccgccatcaccgaggacgaggccgtgctggtgctgggctag

SEQ ID NO: 2100 - DNA, 3708 bp, synthetic construct
  misc_feature 1..3708: note = source = /note="Description of Artificial Sequence: Synthetic coding sequence"
  source 1..3708: mol_type = other DNA
atgagaagcagaagcaacagcggcgtgagactggacggctacgccagactggtgcagcagaccatcctgtgctaccagaaccccgtgaccggcctgctgagcgccagccacgagcagaaggacgcctgggtgagagacaacatctacagcatcctggccgtgtggggcctgggcatggcctacagaaagaacgccgacagagacgaggacaaggccaaggcctacgagctggagcagaacgtggtgaagctgatgagaggcctgctgcagtgcatgatgagacaggtggccaaggtggagaagttcaagcacacccagagcaccaaggacagcctgcacgccaagtacaacaccgccacctgcggcaccgtggtgggcgacgaccagtggggccacctgcaggtggacgccaccagcctgttcctgctgttcctggcccagatgaccgccagcggcctgagaatcatcttcaccctggacgaggtggccttcatccagaacctggtgttctacatcgaggccgcctacaaggtggccgactacggcatgtgggagagaggcgacaagaccaaccagggcatccccgagctgaacgccagcagcgtgggcatggccaaggccgccctggaggccatcgacgagctggacctgttcggcgcccacggcggcagaaagagcgtgatccacgtgctgcccgacgaggtggagcactgccagagcatcctgttcagcatgctgcccagagccagcaccagcaaggagatcgacgccggcctgctgagcatcatcagcttccccgccttcgccgtggaggacgtgaacctggtgaacgtgaccaagaacgagatcatcagcaagctgcagggcagatacggctgctgcagattcctgagagacggctacaagacccccagagaggaccccaacagactgcactacgaccccgccgagctgaagctgttcgagaacatcgagtgcgagtggcccgtgttctggacctacttcatcatcgacggcgtgttcagcggcgacgccgtgcaggtgcaggagtacagagaggccctggagggcatcctgatcagaggcaagaacggcatcagactggtgcccgagctgtacgccgtgccccccaacaaggtggacgaggagtacaagaacccccacaccgtggacagagtgcccatgggcaaggtgccccacctgtggggccagagcctgtacatcctgagcagcctgctggccgagggcttcctggccgccggcgagatcgaccccctgaacagaagattcagcaccagcgtgaagcccgacgtggtggtgcaggtgaccgtgctggccgagaacaaccacatcaaggacctgctgagaaagcacggcgtgaacgtgcagagcatcgccgacatccaccccatccaggtgcagcccggcagaatcctgagccacatctacgccaagctgggcagaaacaagaacatgaacctgagcggcagaccctacagacacatcggcgtgctgggcaccagcaagctgtacgtgatcagaaaccagatcttcaccttcaccccccagttcaccgaccagcaccacttctacctggccctggacaacgagatgatcgtggagatgctgagaatcgagctggcctacctgtgcacctgctggagaatgaccggcagacccaccctgaccttccccatcagcagaaccatgctgaccaacgacggcagcgacatccacagcgccgtgctgagcaccatcagaaagctggaggacggctacttcggcggcgccagagtgaagctgggcaacctgagcgagttcctgaccaccagcttctacacctacctgaccttcctggaccccgactgcgacgagaagctgttcgacaacgccagcgagggcaccttcagccccgacagcgacagcgacctggtgggctacctggaggacacctgcaaccaggagagccaggacgagctggaccactacatcaaccacctgctgcagagcaccagcctgagaagctacctgccccccctgtgcaagaacaccgaggacagacacgtgttcagcgccatccacagcaccagagacatcctgagcgtgatggccaaggccaagggcctggaggtgcccttcgtgcccatgaccctgcccaccaaggtgctgagcgcccacagaaagagcctgaacctggtggacagcccccagcccctgctggagaaggtgcccgagagcgacttccagtggcccagagacgaccacggcgacgtggactgcgagaagctggtggagcagctgaaggactgcagcaacctgcaggaccaggccgacatcctgtacatcctgtacgtgatcaagggccccagctgggacaccaacctgagcggccagcacggcgtgaccgtgcagaacctgctgggcgagctgtacggcaaggccggcctgaaccaggagtggggcctgatcagatacatcagcggcctgctgagaaagaaggtggaggtgctggccgaggcctgcaccgacctgctgagccaccagaagcagctgaccgtgggcctgccccccgagcccagagagaagatcatcagcgcccccctgccccccgaggagctgaccaagctgatctacgaggccagcggccaggacatcagcatcgccgtgctgacccaggagatcgtggtgtacctggccatgtacgtgagagcccagcccagcctgttcgtggagatgctgagactgagaatcggcctgatcatccaggtgatggccaccgagctggccagaagcctgaactgcagcggcgaggaggccagcgagagcctgatgaacctgagccccttcgacatgaagaacctgctgcaccacatcctgagcggcaaggagttcggcgtggagagaagcgtgagacccatccacagcagcaccagcagccccaccatcagcatccacgaggtgggccacaccggcgtgaccaagaccgagagaagcggcatcaacagactgagaagcgagatgaagcagatgaccagaagattcagcgccgacgagcagttcttcagcgtgggccaggccgccagcagcagcgcccacagcagcaagagcgccagaagcagcacccccagcagccccaccggcaccagcagcagcgacagcggcggccaccacatcggctggggcgagagacagggccagtggctgagaagaagaagactggacggcgccatcaacagagtgcccgtgggcttctaccagagagtgtggaagatcctgcagaagtgccacggcctgagcatcgacggctacgtgctgcccagcagcaccaccagagagatgaccccccacgagatcaagttcgccgtgcacgtggagagcgtgctgaacagagtgccccagcccgagtacagacagctgctggtggaggccatcatggtgctgaccctgctgagcgacaccgagatgaccagcatcggcggcatcatccacgtggaccagatcgtgcagatggccagccagctgttcctgcaggaccaggtgagcatcggcgccatggacaccctggagaaggaccaggccaccggcatctgccacttcttctacgacagcgcccccagcggcgcctacggcaccatgacctacctgaccagagccgtggccagctacctgcaggagctgctgcccaacagcggctgccagatgcagtag

SEQ ID NO: 2101 - DNA, 3261 bp, synthetic construct; identical to SEQ ID NO: 2098
  misc_feature 1..3261: note = source = /note="Description of Artificial Sequence: Synthetic coding sequence"
  source 1..3261: mol_type = other DNA

SEQ ID NO: 2102 - DNA, 3282 bp, synthetic construct
  misc_feature 1..3282: note = source = /note="Description of Artificial Sequence: Synthetic coding sequence"
  source 1..3282: mol_type = other DNA
atggccggcgccgccggcctgaccgccgaggtgagctggaaggtgctggagagaagagccagaaccaagagaagcggcagcgtgtacgagcccctgaagagcatcaacctgcccagacccgacaacgagaccctgtgggacaagctggaccactactacagaatcgtgaagagcaccctgctgctgtaccagagccccaccaccggcctgttccccaccaagacctgcggcggcgaccagaaggccaagatccaggacagcctgtactgcgccgccggcgcctgggccctggccctggcctacagaagaatcgacgacgacaagggcagaacccacgagctggagcacagcgccatcaagtgcatgagaggcatcctgtactgctacatgagacaggccgacaaggtgcagcagttcaagcaggaccccagacccaccacctgcctgcacagcgtgttcaacgtgcacaccggcgacgagctgctgagctacgaggagtacggccacctgcagatcaacgccgtgagcctgtacctgctgtacctggtggagatgatcagcagcggcctgcagatcatctacaacaccgacgaggtgagcttcatccagaacctggtgttctgcgtggagagagtgtacagagtgcccgacttcggcgtgtgggagagaggcagcaagtacaacaacggcagcaccgagctgcacagcagcagcgtgggcctggccaaggccgccctggaggccatcaacggcttcaacctgttcggcaaccagggctgcagctggagcgtgatcttcgtggacctggacgcccacaacagaaacagacagaccctgtgcagcctgctgcccagagagagcagaagccacaacaccgacgccgccctgctgccctgcatcagctaccccgccttcgccctggacgacgaggtgctgttcagccagaccctggacaaggtggtgagaaagctgaagggcaagtacggcttcaagagattcctgagagacggctacagaaccagcctggaggaccccaacagatgctactacaagcccgccgagatcaagctgttcgacggcatcgagtgcgagttccccatcttcttcctgtacatgatgatcgacggcgtgttcagaggcaaccccaagcaggtgcaggagtaccaggacctgctgacccccgtgctgcaccacaccaccgagggctaccccgtggtgcccaagtactactacgtgcccgccgacttcgtggagtacgagaagaacaaccccggcagccagaagagattccccagcaactgcggcagagacggcaagctgttcctgtggggccaggccctgtacatcatcgccaagctgctggccgacgagctgatcagccccaaggacatcgaccccgtgcagagatacgtgcccctgaaggaccagagaaacgtgagcatgagattcagcaaccagggccccctggagaacgacctggtggtgcacgtggccctgatcgccgagagccagagactgcaggtgttcctgaacacctacggcatccagacccagaccccccagcaggtggagcccatccagatctggccccagcaggagctggtgaaggcctacctgcagctgggcatcaacgagaagctgggcctgagcggcagacccgacagacccatcggctgcctgggcaccagcaagatctacagaatcctgggcaagaccgtggtgtgctaccccatcatcttcgacctgagcgacttctacatgagccaggacgtgttcctgctgatcgacgacatcaagaacgccctgcagttcatcaagcagtactggaagatgcacggcagacccctgttcctggtgctgatcagagaggacaacatcagaggcagcagattcaaccccatcctggacatgctggccgccctgaagaagggcatcatcggcggcgtgaaggtgcacgtggacagactgcagaccctgatcagcggcgccgtggtggagcagctggacttcctgagaatcagcgacaccgaggagctgcccgagttcaagagcttcgaggagctggagccccccaagcacagcaaggtgaagagacagagcagcacccccagcgcccccgagctgggccagcagcccgacgtgaacatcagcgagtggaaggacaagcccacccacgagatcctgcagaagctgaacgactgcagctgcctggccagccaggccatcctgctgggcatcctgctgaagagagagggccccaacttcatcaccaaggagggcaccgtgagcgaccacatcgagagagtgtacagaagagccggcagccagaagctgtggctggccgtgagatacggcgccgccttcacccagaagttcagcagcagcatcgccccccacatcaccaccttcctggtgcacggcaagcaggtgaccctgggcgccttcggccacgaggaggaggtgatcagcaaccccctgagccccagagtgatccagaacatcatctactacaagtgcaacacccacgacgagagagaggccgtgatccagcaggagctggtgatccacatcggctggatcatcagcaacaaccccgagctgttcagcggcatgctgaagatcagaatcggctggatcatccacgccatggagtacgagctgcagatcagaggcggcgacaagcccgccctggacctgtaccagctgagccccagcgaggtgaagcagctgctgctggacatcctgcagccccagcagaacggcagatgctggctgaacagaagacagatcgacggcagcctgaacagaacccccaccggcttctacgacagagtgtggcagatcctggagagaacccccaacggcatcatcgtggccggcaagcacctgccccagcagcccaccctgagcgacatgaccatgtacgagatgaacttcagcctgctggtggaggacaccctgggcaacatcgaccagccccagtacagacagatcgtggtggagctgctgatggtggtgagcatcgtgctggagagaaaccccgagctggagttccaggacaaggtggacctggacagactggtgaaggaggccttcaacgagttccagaaggaccagagcagactgaaggagatcgagaagcaggacgacatgaccagcttctacaacaccccccccctgggcaagagaggcacctgcagctacctgaccaaggccgtgatgaacctgctgctggagggcgaggtgaagcccaacaacgacgacccctgcctgatcagctag

SEQ ID NO: 2103 - DNA, 3261 bp, synthetic construct
  misc_feature 1..3261: note = source = /note="Description of Artificial Sequence: Synthetic coding sequence"
  source 1..3261: mol_type = other DNA
atggcctgcagccccgacgccgtggtgagccccagcagcgccttcctgagaagcggcagcgtgtacgagcccctgaagagcatcaacctgcccagacccgacaacgagaccctgtgggacaagctggaccactactacagaatcgtgaagagcaccctgctgctgtaccagagccccaccaccggcctgttccccaccaagacctgcggcggcgaccagaaggccaagatccaggacagcctgtactgcgccgccggcgcctgggccctggccctggcctacagaagaatcgacgacgacaagggcagaacccacgagctggagcacagcgccatcaagtgcatgagaggcatcctgtactgctacatgagacaggccgacaaggtgcagcagttcaagcaggaccccagacccaccacctgcctgcacagcgtgttcaacgtgcacaccggcgacgagctgctgagctacgaggagtacggccacctgcagatcaacgccgtgagcctgtacctgctgtacctggtggagatgatcagcagcggcctgcagatcatctacaacaccgacgaggtgagcttcatccagaacctggtgttctgcgtggagagagtgtacagagtgcccgacttcggcgtgtgggagagaggcagcaagtacaacaacggcagcaccgagctgcacagcagcagcgtgggcctggccaaggccgccctggaggccatcaacggcttcaacctgttcggcaaccagggctgcagctggagcgtgatcttcgtggacctggacgcccacaacagaaacagacagaccctgtgcagcctgctgcccagagagagcagaagccacaacaccgacgccgccctgctgccctgcatcagctaccccgccttcgccctggacgacgaggtgctgttcagccagaccctggacaaggtggtgagaaagctgaagggcaagtacggcttcaagagattcctgagagacggctacagaaccagcctggaggaccccaacagatgctactacaagcccgccgagatcaagctgttcgacggcatcgagtgcgagttccccatcttcttcctgtacatgatgatcgacggcgtgttcagaggcaaccccaagcaggtgcaggagtaccaggacctgctgacccccgtgctgcaccacaccaccgagggctaccccgtggtgcccaagtactactacgtgcccgccgacttcgtggagtacgagaagaacaaccccggcagccagaagagattccccagcaactgcggcagagacggcaagctgttcctgtggggccaggccctgtacatcatcgccaagctgctggccgacgagctgatcagccccaaggacatcgaccccgtgcagagatacgtgcccctgaaggaccagagaaacgtgagcatgagattcagcaaccagggccccctggagaacgacctggtggtgcacgtggccctgatcgccgagagccagagactgcaggtgttcctgaacacctacggcatccagacccagaccccccagcaggtggagcccatccagatctggccccagcaggagctggtgaaggcctacctgcagctgggcatcaacgagaagctgggcctgagcggcagacccgacagacccatcggctgcctgggcaccagcaagatctacagaatcctgggcaagaccgtggtgtgctaccccatcatcttcgacctgagcgacttctacatgagccaggacgtgttcctgctgatcgacgacatcaagaacgccctgcagttcatcaagcagtactggaagatgcacggcagacccctgttcctggtgctgatcagagaggacaacatcagaggcagcagattcaaccccatcctggacatgctggccgccctgaagaagggcatcatcggcggcgtgaaggtgcacgtggacagactgcagaccctgatcagcggcgccgtggtggagcagctggacttcctgagaatcagcgacaccgaggagctgcccgagttcaagagcttcgaggagctggagccccccaagcacagcaaggtgaagagacagagcagcacccccagcgcccccgagctgggccagcagcccgacgtgaacatcagcgagtggaaggacaagcccacccacgagatcctgcagaagctgaacgactgcagctgcctggccagccaggccatcctgctgggcatcctgctgaagagagagggccccaacttcatcaccaaggagggcaccgtgagcgaccacatcgagagagtgtacagaagagccggcagccagaagctgtggctggccgtgagatacggcgccgccttcacccagaagttcagcagcagcatcgccccccacatcaccaccttcctggtgcacggcaagcaggtgaccctgggcgccttcggccacgaggaggaggtgatcagcaaccccctgagccccagagtgatccagaacatcatctactacaagtgcaacacccacgacgagagagaggccgtgatccagcaggagctggtgatccacatcggctggatcatcagcaacaaccccgagctgttcagcggcatgctgaagatcagaatcggctggatcatccacgccatggagtacgagctgcagatcagaggcggcgacaagcccgccctggacctgtaccagctgagccccagcgaggtgaagcagctgctgctggacatcctgcagccccagcagaacggcagatgctggctgaacagaagacagatcgacggcagcctgaacagaacccccaccggcttctacgacagagtgtggcagatcctggagagaacccccaacggcatcatcgtggccggcaagcacctgccccagcagcccaccctgagcgacatgaccatgtacgagatgaacttcagcctgctggtggaggacaccctgggcaacatcgaccagccccagtacagacagatcgtggtggagctgctgatggtggtgagcatcgtgctggagagaaaccccgagctggagttccaggacaaggtggacctggacagactggtgaaggaggccttcaacgagttccagaaggaccagagcagactgaaggagatcgagaagcaggacgacatgaccagcttctacaacaccccccccctgggcaagagaggcacctgcagctacctgaccaaggccgtgatgaacctgctgctggagggcgaggtgaagcccaacaacgacgacccctgcctgatcagctag

SEQ ID NO: 2104 - DNA, 1221 bp, synthetic construct; identical to SEQ ID NO: 2099
  misc_feature 1..1221: note = source = /note="Description of Artificial Sequence: Synthetic coding sequence"
  source 1..1221: mol_type = other DNA

SEQ ID NO: 2105 - DNA, 1125 bp, synthetic construct
  misc_feature 1..1125: note = source = /note="Description of Artificial Sequence: Synthetic coding sequence"
  source 1..1125: mol_type = other DNA
atgaccctggacgtgggccccgaggacgagctgcccgactgggccgccgccaaggagttctaccagaagtacgaccccaaggacgtgatcggcagaggcgtgagcagcgtggtgagaagatgcgtgcacagagccaccggccacgagttcgccgtgaagatcatggaggtgaccgccgagagactgagccccgagcagctggaggaggtgagagaggccaccagaagagagacccacatcctgagacaggtggccggccacccccacatcatcaccctgatcgacagctacgagagcagcagcttcatgttcctggtgttcgacctgatgagaaagggcgagctgttcgactacctgaccgagaaggtggccctgagcgagaaggagaccagaagcatcatgagaagcctgctggaggccgtgagcttcctgcacgccaacaacatcgtgcacagagacctgaagcccgagaacatcctgctggacgacaacatgcagatcagactgagcgacttcggcttcagctgccacctggagcccggcgagaagctgagagagctgtgcggcacccccggctacctggcccccgagatcctgaagtgcagcatggacgagacccaccccggctacggcaaggaggtggacctgtgggcctgcggcgtgatcctgttcaccctgctggccggcagcccccccttctggcacagaagacagatcctgatgctgagaatgatcatggagggccagtaccagttcagcagccccgagtgggacgacagaagcagcaccgtgaaggacctgatcagcagactgctgcaggtggaccccgaggccagactgaccgccgagcaggccctgcagcaccccttcttcgagagatgcgagggcagccagccctggaacctgacccccagacagagattcagagtggccgtgtggaccgtgctggccgccggcagagtggccctgagcacccacagagtgagacccctgaccaagaacgccctgctgagagacccctacgccctgagaagcgtgagacacctgatcgacaactgcgccttcagactgtacggccactggatcagaaagcagtggatcggcaagctgatggcctgcgtgtag

SEQ ID NO: 2106 - DNA, 3999 bp, synthetic construct
  misc_feature 1..3999: note = source = /note="Description of Artificial Sequence: Synthetic coding sequence"
  source 1..3999: mol_type = other DNA
atgcagcaggccccccagccctacgagttcttcagcgaggagaacagccccaagtggagaggcctgctggtgagcgccctgagaaaggtgcaggagcaggtgcaccccaccctgagcgccaacgaggagagcctgtactacatcgaggagctgatcttccagctgctgaacaagctgtgcatggcccagcccagaaccgtgcaggacgtggaggagagagtgcagaagaccttcccccaccccatcgacaagtgggccatcgccgacgcccagagcgccatcgagaagagaaagagaagaaaccccctgctgctgcccgtggacaagatccaccccagcctgaaggaggtgctgggctacaaggtggactaccacgtgagcctgtacatcgtggccgtgctggagtacatcagcgccgacatcctgaagctggccggcaactacgtgttcaacatcagacactacgagatcagccagcaggacatcaaggtgagcatgtgcgccgacaaggtgctgatggacatgttcgaccaggacgacatcggcctggtgagcctgtgcgaggacgagcccagcagcagcggcgagctgaactactacgacctggtgagaaccgagatcgccgaggagagacagtacctgagagagctgaacatgatcatcaaggtgttcagagaggccttcctgagcgacagaaagctgttcaagcccagcgacatcgagaagatcttcagcaacatcagcgacatccacgagctgaccgtgaagctgctgggcctgatcgaggacaccgtggagatgaccgacgagagcagcccccaccccctggccggcagctgcttcgaggacctggccgaggagcaggccttcgacccctacgagaccctgagccaggacatcctgagccccgagttccacgagcacttcaacaagctgatggccagacccgccgtggccctgcacttccagagcatcgccgacggcttcaaggaggccgtgagatacgtgctgcccagactgatgctggtgcccgtgtaccactgctggcactacttcgagctgctgaagcagctgaaggcctgcagcgaggagcaggaggacagagagtgcctgaaccaggccatcaccgccctgatgaacctgcagggcagcatggacagaatctacaagcagtacagccccagaagaagacccggcgaccccgtgtgccccttctacagccaccagctgagaagcaagcacctggccatcaagaagatgaacgagatccagaagaacatcgacggctgggagggcaaggacatcggccagtgctgcaacgagttcatcatggagggccccctgaccagaatcggcgccaagcacgagagacacatcttcctgttcgacggcctgatgatcagctgcaagcccaaccacggccagaccagactgcccggctacagcagcgccgagtacagactgaaggagaagttcgtgatgagaaagatccagatctgcgacaaggaggacacctgcgagcacaagcacgccttcgagctggtgagcaaggacgagaacagcatcatcttcgccgccaagagcgccgaggagaagaacaactggatggccgccctgatcagcctgcactacagaagcaccctggacagaatgctggacagcgtgctgctgaaggaggagaacgagcagcccctgagactgcccagccccgaggtgtacagattcgtggtgaaggacagcgaggagaacatcgtgttcgaggacaacctgcagagcagaagcggcatccccatcatcaagggcggcaccgtggtgaagctgatcgagagactgacctaccacatgtacgccgaccccaacttcgtgagaaccttcctgaccacctacagaagcttctgcaagccccaggagctgctgagcctgctgatcgagagattcgagatccccgagcccgagcccaccgacgccgacaagctggccatcgagaagggcgagcagcccatcagcgccgacctgaagagattcagaaaggagtacgtgcagcccgtgcagctgagaatcctgaacgtgttcagacactgggtggagcaccacttctacgacttcgagagagacctggagctgctggagagactggagagcttcatcagcagcgtgagaggcaaggccatgaagaagtgggtggagagcatcgccaagatcatcagaagaaagaagcaggcccaggccaacggcgtgagccacaacatcaccttcgagagcccccccccccccatcgagtggcacatcagcaagcccggccagttcgagaccttcgacctgatgaccctgcaccccatcgagatcgccagacagctgaccctgctggagagcgacctgtacagaaaggtgcagcccagcgagctggtgggcagcgtgtggaccaaggaggacaaggagatcaacagccccaacctgctgaagatgatcagacacaccaccaacctgaccctgtggttcgagaagtgcatcgtggaggccgagaacttcgaggagagagtggccgtgctgagcagaatcatcgagatcctgcaggtgttccaggacctgaacaacttcaacggcgtgctggagatcgtgagcgccgtgaacagcgtgagcgtgtacagactggaccacaccttcgaggccctgcaggagagaaagagaaagatcctggacgaggccgtggagctgagccaggaccacttcaagaagtacctggtgaagctgaagagcatcaaccccccctgcgtgcccttcttcggcatctacctgaccaacatcctgaagaccgaggagggcaacaacgacttcctgaagaagaagggcaaggacctgatcaacttcagcaagagaagaaaggtggccgagatcaccggcgagatccagcagtaccagaaccagccctactgcctgagaatcgagcccgacatgagaagattcttcgagaacctgaaccccatgggcagcgccagcgagaaggagttcaccgactacctgttcaacaagagcctggagatcgagcccagaaactgcaagcagccccccagattccccagaaagagcaccttcagcctgaagagccccggcatcagacccaacaccggcagacacggcagcaccagcggcaccctgagaggccaccccacccccctggagagagagccctgcaagatcagcttcagcagaatcgccgagaccgagctggagagcaccgtgagcgcccccaccagccccaacacccccagcaccccccccgtgagcgccagcagcgacctgagcgtgttcctggacgtggacctgaacagcagctgcggcagcaacagcatcttcgcccccgtgctgctgccccacagcaagagcttcttcagcagctgcggcagcctgcacaagctgagcgaggagcccctgatccccccccccctgccccccagaaagaagttcgaccacgacgccagcaacagcaagggcaacatgaagagcgacgacgacccccccgccatcccccccagacagccccccccccccaaggtgaagcccagagtgcccgtgcccaccggcgccttcgacggccccctgcacagcccccccccccccccccccagagaccccctgcccgacacccccccccccgtgcccctgagaccccccgagcacttcatcaactgccccttcaacctgcagcccccccccctgggccacctgcacagagacagcgactggctgagagacatcagcacctgccccaacagccccagcaccccccccagcacccccagccccagagtgcccagaagatgctacgtgctgagcagcagccagaacaacctggcccacccccccgccccccccgtgccccccagacagaacagcagcccccacctgcccaagctgccccccaagacctacaagagagagctgagccacccccccctgtacagactgcccctgctggagaacgccgagaccccccagtag

SEQ ID NO: 2107 - DNA, 2442 bp, synthetic construct
  misc_feature 1..2442: note = source = /note="Description of Artificial Sequence: Synthetic coding sequence"
  source 1..2442: mol_type = other DNA
atggccaagcccctgaccgaccaggagaagagaagacagatcagcatcagaggcatcgtgggcgtggagaacgtggccgagctgaagaagagcttcaacagacacctgcacttcaccctggtgaaggacagaaacgtggccaccaccagagactactacttcgccctggcccacaccgtgagagaccacctggtgggcagatggatcagaacccagcagcactactacgacaagtgccccaagctgggcctggacatcgaggagctggaggagatcgaggaggacgccggcctgggcaacggcggcctgggcagactggccgcctgcttcctggacagcatggccaccctgggcctggccgcctacggctacggcatcagatacgagtacggcatcttcaaccagaagatcagagacggctggcaggtggaggaggccgacgactggctgagatacggcaacccctgggagaagagcagacccgagttcatgctgcccgtgcacttctacggcaaggtggagcacaccaacaccggcaccaagtggatcgacacccaggtggtgctggccctgccctacgacacccccgtgcccggctacatgaacaacaccgtgaacaccatgagactgtggagcgccagagcccccaacgacttcaacctgagagacttcaacgtgggcgactacatccaggccgtgctggacagaaacctggccgagaacatcagcagagtgctgtaccccaacgacaacttcttcgagggcaaggagctgagactgaagcaggagtacttcgtggtggccgccaccctgcaggacatcatcagaagattcaaggccagcaagttcggcagcaccagaggcgccggcaccgtgttcgacgccttccccgaccaggtggccatccagctgaacgacacccaccccgccctggccatccccgagctgatgagaatcttcgtggacatcgagaagctgccctggagcaaggcctgggagctgacccagaagaccttcgcctacaccaaccacaccgtgctgcccgaggccctggagagatggcccgtggacctggtggagaagctgctgcccagacacctggagatcatctacgagatcaaccagaagcacctggacagaatcgtggccctgttccccaaggacgtggacagactgagaagaatgagcctgatcgaggaggagggcagcaagagaatcaacatggcccacctgtgcatcgtgggcagccacgccgtgaacggcgtggccaagatccacagcgacatcgtgaagaccaaggtgttcaaggacttcagcgagctggagcccgacaagttccagaacaagaccaacggcatcacccccagaagatggctgctgctgtgcaaccccggcctggccgagctgatcgccgagaagatcggcgaggactacgtgaaggacctgagccagctgaccaagctgcacagcttcctgggcgacgacgtgttcctgagagagctggccaaggtgaagcaggagaacaagctgaagttcagccagttcctggagaccgagtacaaggtgaagatcaaccccagcagcatgttcgacgtgcaggtgaagagaatccacgagtacaagagacagctgctgaactgcctgcacgtgatcaccatgtacaacagaatcaagaaggaccccaagaagctgttcgtgcccagaaccgtgatcatcggcggcaaggccgcccccggctaccacatggccaagatgatcatcaagctgatcaccagcgtggccgacgtggtgaacaacgaccccatggtgggcagcaagctgaaggtgatcttcctggagaactacagagtgagcctggccgagaaggtgatccccgccaccgacctgagcgagcagatcagcaccgccggcaccgaggccagcggcaccggcaacatgaagttcatgctgaacggcgccctgaccatcggcaccatggacggcgccaacgtggagatggccgaggaggccggcgaggagaacctgttcatcttcggcatgagaatcgacgacgtggccgccctggacaagaagggctacgaggccaaggagtactacgaggccctgcccgagctgaagctggtgatcgaccagatcgacaacggcttcttcagccccaagcagcccgacctgttcaaggacatcatcaacatgctgttctaccacgacagattcaaggtgttcgccgactacgaggcctacgtgaagtgccaggacaaggtgagccagctgtacatgaaccccaaggcctggaacaccatggtgctgaagaacatcgccgccagcggcaagttcagcagcgacagaaccatcaaggagtacgcccagaacatctggaacgtggagcccagcgacctgaagatcagcctgagcaacgagagcaacaaggtgaacggcaactag

SEQ ID NO: 2108 - DNA, 2433 bp, synthetic construct
  misc_feature 1..2433: note = source = /note="Description of Artificial Sequence: Synthetic coding sequence"
  source 1..2433: mol_type = other DNA
atggagcacaaggaggtggtgctgctgctgctgctgttcctgaagagcggccagggcgagcccctggacgactacgtgaacacccagggcgccagcctgttcagcgtgaccaagaagcagctgggcgccggcagcatcgaggagtgcgccgccaagtgcgaggaggacgaggagttcacctgcagagccttccagtaccacagcaaggagcagcagtgcgtgatcatggccgagaacagaaagagcagcatcatcatcagaatgagagacgtggtgctgttcgagaagaaggtgtacctgagcgagtgcaagaccggcaacggcaagaactacagaggcaccatgagcaagaccaagaacggcatcacctgccagaagtggagcagcaccagcccccacagacccagattcagccccgccacccaccccagcgagggcctggaggagaactactgcagaaaccccgacaacgacccccagggcccctggtgctacaccaccgaccccgagaagagatacgactactgcgacatcctggagtgcgaggaggagtgcatgcactgcagcggcgagaactacgacggcaagatcagcaagaccatgagcggcctggagtgccaggcctgggacagccagagcccccacgcccacggctacatccccagcaagttccccaacaagaacctgaagaagaactactgcagaaaccccgacagagagctgagaccctggtgcttcaccaccgaccccaacaagagatgggagctgtgcgacatccccagatgcaccacccccccccccagcagcggccccacctaccagtgcctgaagggcaccggcgagaactacagaggcaacgtggccgtgaccgtgagcggccacacctgccagcactggagcgcccagaccccccacacccacaacagaacccccgagaacttcccctgcaagaacctggacgagaactactgcagaaaccccgacggcaagagagccccctggtgccacaccaccaacagccaggtgagatgggagtactgcaagatccccagctgcgacagcagccccgtgagcaccgagcagctggcccccaccgccccccccgagctgacccccgtggtgcaggactgctaccacggcgacggccagagctacagaggcaccagcagcaccaccaccaccggcaagaagtgccagagctggagcagcatgaccccccacagacaccagaagacccccgagaactaccccaacgccggcctgaccatgaactactgcagaaaccccgacgccgacaagggcccctggtgcttcaccaccgaccccagcgtgagatgggagtactgcaacctgaagaagtgcagcggcaccgaggccagcgtggtggcccccccccccgtggtgctgctgcccgacgtggagacccccagcgaggaggactgcatgttcggcaacggcaagggctacagaggcaagagagccaccaccgtgaccggcaccccctgccaggactgggccgcccaggagccccacagacacagcatcttcacccccgagaccaaccccagagccggcctggagaagaactactgcagaaaccccgacggcgacgtgggcggcccctggtgctacaccaccaaccccagaaagctgtacgactactgcgacgtgccccagtgcgccgcccccagcttcgactgcggcaagccccaggtggagcccaagaagtgccccggcagagtggtgggcggctgcgtggcccacccccacagctggccctggcaggtgagcctgagaaccagattcggcatgcacttctgcggcggcaccctgatcagccccgagtgggtgctgaccgccgcccactgcctggagaagagccccagacccagcagctacaaggtgatcctgggcgcccaccaggaggtgaacctggagccccacgtgcaggagatcgaggtgagcagactgttcctggagcccaccagaaaggacatcgccctgctgaagctgagcagccccgccgtgatcaccgacaaggtgatccccgcctgcctgcccagccccaactacgtggtggccgacagaaccgagtgcttcatcaccggctggggcgagacccagggcaccttcggcgccggcctgctgaaggaggcccagctgcccgtgatcgagaacaaggtgtgcaacagatacgagttcctgaacggcagagtgcagagcaccgagctgtgcgccggccacctggccggcggcaccgacagctgccagggcgacagcggcggccccctggtgtgcttcgagaaggacaagtacatcctgcagggcgtgaccagctggggcctgggctgcgccagacccaacaagcccggcgtgtacgtgagagtgagcagattcgtgacctggatcgagggcgtgatgagaaacaactag

SEQ ID NO: 2109 - DNA, 633 bp, synthetic construct
  misc_feature 1..633: note = source = /note="Description of Artificial Sequence: Synthetic coding sequence"
  source 1..633: mol_type = other DNA
agattcggcatgcacttctgcggcggcaccctgatcagccccgagtgggtgctgaccgccgcccactgcctggagaagagccccagacccagcagctacaaggtgatcctgggcgcccaccaggaggtgaacctggagccccacgtgcaggagatcgaggtgagcagactgttcctggagcccaccagaaaggacatcgccctgctgaagctgagcagccccgccgtgatcaccgacaaggtgatccccgcctgcctgcccagccccaactacgtggtggccgacagaaccgagtgcttcatcaccggctggggcgagacccagggcaccttcggcgccggcctgctgaaggaggcccagctgcccgtgatcgagaacaaggtgtgcaacagatacgagttcctgaacggcagagtgcagagcaccgagctgtgcgccggccacctggccggcggcaccgacagctgccagggcgacagcggcggccccctggtgtgcttcgagaaggacaagtacatcctgcagggcgtgaccagctggggcctgggctgcgccagacccaacaagcccggcgtgtacgtgagagtgagcagattcgtgacctggatcgagggcgtgatgagaaacaactag

SEQ ID NO: 2110 - DNA, 411 bp, synthetic construct
  misc_feature 1..411: note = source = /note="Description of Artificial Sequence: Synthetic coding sequence"
  source 1..411: mol_type = other DNA
atggagcacaaggaggtggtgctgctgctgctgctgttcctgaagagcggccagggcgagcccctggacgactacgtgaacacccagggcgccagcctgttcagcgtgaccaagaagcagctgggcgccggcagcatcgaggagtgcgccgccaagtgcgaggaggacgaggagttcacctgcagagccttccagtaccacagcaaggagcagcagtgcgtgatcatggccgagaacagaaagagcagcatcatcatcagaatgagagacgtggtgctgttcgagaagaaggtgtacctgagcgagtgcaagaccggcaacggcaagaactacagaggcaccatgagcaagaccaagaacggcatcacctgccagaagtggagcagcaccagcccccacagacccagatag

SEQ ID NO: 2111 - DNA, 945 bp, synthetic construct
  misc_feature 1..945: note = source = /note="Description of Artificial Sequence: Synthetic coding sequence"
  source 1..945: mol_type = other DNA
atgggcatcggcagaagcgagggcggcagaagaggcgccgccctgggcgtgctgctggccctgggcgccgccctgctggccgtgggcagcgccagcgagtacgactacgtgagcttccagagcgacatcggcccctaccagagcggcagattctacaccaagcccccccagtgcgtggacatccccgccgacctgagactgtgccacaacgtgggctacaagaagatggtgctgcccaacctgctggagcacgagaccatggccgaggtgaagcagcaggccagcagctgggtgcccctgctgaacaagaactgccacgccggcacccaggtgttcctgtgcagcctgttcgcccccgtgtgcctggacagacccatctacccctgcagatggctgtgcgaggccgtgagagacagctgcgagcccgtgatgcagttcttcggcttctactggcccgagatgctgaagtgcgacaagttccccgagggcgacgtgtgcatcgccatgaccccccccaacgccaccgaggccagcaagccccagggcaccaccgtgtgccccccctgcgacaacgagctgaagagcgaggccatcatcgagcacctgtgcgccagcgagttcgccctgagaatgaagatcaaggaggtgaagaaggagaacggcgacaagaagatcgtgcccaagaagaagaagcccctgaagctgggccccatcaagaagaaggacctgaagaagctggtgctgtacctgaagaacggcgccgactgcccctgccaccagctggacaacctgagccaccacttcctgatcatgggcagaaaggtgaagagccagtacctgctgaccgccatccacaagtgggacaagaagaacaaggagttcaagaacttcatgaagaagatgaagaaccacgagtgccccaccttccagagcgtgttcaagtag

SEQ ID NO: 2112 - DNA, 882 bp, synthetic construct
  misc_feature 1..882: note = source = /note="Description of Artificial Sequence: Synthetic coding sequence"
  source 1..882: mol_type = other DNA
atggacgccatgaagagaggcctgtgctgcgtgctgctgctgtgcggcgccgtgttcgtgagccccagccaggagatccacgccagattcagaagaggcgccagaagctaccaggtgatctgcagagacgagaagacccagatgatctaccagcagcaccagagctggctgagacccgtgctgagaagcaacagagtggagtactgctggtgcaacagcggcagagcccagtgccacagcgtgcccgtgaagagctgcagcgagcccagatgcttcaacggcggcacctgccagcaggccctgtacttcagcgacttcgtgtgccagtgccccgagggcttcgccggcaagtgctgcgagatcgacaccagagccacctgctacgaggaccagggcatcagctacagaggcacctggagcaccgccgagagcggcgccgagtgcaccaactggaacagcagcgccctggcccagaagccctacagcggcagaagacccgacgccatcagactgggcctgggcaaccacaactactgcagaaaccccgacagagacagcaagccctggtgctacgtgttcaaggccggcaagtacagcagcgagttctgcagcacccccgcctgcagcgagggcaacagcgactgctacttcggcaacggcagcgcctacagaggcacccacagcctgaccgagagcggcgccagctgcctgccctggaacagcatgatcctgatcggcaaggtgtacaccgcccagaaccccagcgcccaggccctgggcctgggcaagcacaactactgcagatgcagaaccggcagaagcgtgagcagccccgccaccgccagcatgagaccctgcctgctgagcatcagaagcggctag

SEQ ID NO: 2113 - DNA, 1551 bp, synthetic construct
  misc_feature 1..1551: note = source = /note="Description of Artificial Sequence: Synthetic coding sequence"
  source 1..1551: mol_type = other DNA
atggacgccatgaagagaggcctgtgctgcgtgctgctgctgtgcggcgccgtgttcgtgagccccagccaggagatccacgccagattcagaagaggcgccagaagctaccagggctgcagcgagcccagatgcttcaacggcggcacctgccagcaggccctgtacttcagcgacttcgtgtgccagtgccccgagggcttcgccggcaagtgctgcgagatcgacaccagagccacctgctacgaggaccagggcatcagctacagaggcacctggagcaccgccgagagcggcgccgagtgcaccaactggaacagcagcgccctggcccagaagccctacagcggcagaagacccgacgccatcagactgggcctgggcaaccacaactactgcagaaaccccgacagagacagcaagccctggtgctacgtgttcaaggccggcaagtacagcagcgagttctgcagcacccccgcctgcagcgagggcaacagcgactgctacttcggcaacggcagcgcctacagaggcacccacagcctgaccgagagcggcgccagctgcctgccctggaacagcatgatcctgatcggcaaggtgtacaccgcccagaaccccagcgcccaggccctgggcctgggcaagcacaactactgcagaaaccccgacggcgacgccaagccctggtgccacgtgctgaagaacagaagactgacctgggagtactgcgacgtgcccagctgcagcacctgcggcctgagacagtacagccagccccagttcagaatcaagggcggcctgttcgccgacatcgccagccacccctggcaggccgccatcttcgccaagcacagaagaagccccggcgagagattcctgtgcggcggcatcctgatcagcagctgctggatcctgagcgccgcccactgcttccaggagagattccccccccaccacctgaccgtgatcctgggcagaacctacagagtggtgcccggcgaggaggagcagaagttcgaggtggagaagtacatcgtgcacaaggagttcgacgacgacacctacgacaacgacatcgccctgctgcagctgaagagcgacagcagcagatgcgcccaggagagcagcgtggtgagaaccgtgtgcctgccccccgccgacctgcagctgcccgactggaccgagtgcgagctgagcggctacggcaagcacgaggccctgagccccttctacagcgagagactgaaggaggcccacgtgagactgtaccccagcagcagatgcaccagccagcacctgctgaacagaaccgtgaccgacaacatgctgtgcgccggcgacaccagaagcggcggcccccaggccaacctgcacgacgcctgccagggcgacagcggcggccccctggtgtgcctgaacgacggcagaatgaccctggtgggcatcatcagctggggcctgggctgcggccagaaggacgtgcccggcgtgtacaccaaggtgaccaactacctggactggatcagagacaacatgagaccctag

SEQ ID NO: 2114 - DNA, 1689 bp, synthetic construct
  misc_feature 1..1689: note = source = /note="Description of Artificial Sequence: Synthetic coding sequence"
  source 1..1689: mol_type = other DNA
atggacgccatgaagagaggcctgtgctgcgtgctgctgctgtgcggcgccgtgttcgtgagccccagccaggagatccacgccagattcagaagaggcgccagaagctaccaggtgatctgcagagacgagaagacccagatgatctaccagcagcaccagagctggctgagacccgtgctgagaagcaacagagtggagtactgctggtgcaacagcggcagagcccagtgccacagcgtgcccgtgaagagctgcagcgagcccagatgcttcaacggcggcacctgccagcaggccctgtacttcagcgacttcgtgtgccagtgccccgagggcttcgccggcaagtgctgcgagatcgacaccagagccacctgctacgaggaccagggcatcagctacagaggcacctggagcaccgccgagagcggcgccgagtgcaccaactggaacagcagcgccctggcccagaagccctacagcggcagaagacccgacgccatcagactgggcctgggcaaccacaactactgcagaaaccccgacagagacagcaagccctggtgctacgtgttcaaggccggcaagtacagcagcgagttctgcagcacccccgcctgcagcgagggcaacagcgactgctacttcggcaacggcagcgcctacagaggcacccacagcctgaccgagagcggcgccagctgcctgccctggaacagcatgatcctgatcggcaaggtgtacaccgcccagaaccccagcgcccaggccctgggcctgggcaagcacaactactgcagaaaccccgacggcgacgccaagccctggtgccacgtgctgaagaacagaagactgacctgggagtactgcgacgtgcccagctgcagcacctgcggcctgagacagtacagccagccccagttcagaatcaagggcggcctgttcgccgacatcgccagccacccctggcaggccgccatcttcgccaagcacagaagaagccccggcgagagattcctgtgcggcggcatcctgatcagcagctgctggatcctgagcgccgcccactgcttccaggagagattccccccccaccacctgaccgtgatcctgggcagaacctacagagtggtgcccggcgaggaggagcagaagttcgaggtggagaagtacatcgtgcacaaggagttcgacgacgacacctacgacaacgacatcgccctgctgcagctgaagagcgacagcagcagatgcgcccaggagagcagcgtggtgagaaccgtgtgcctgccccccgccgacctgcagctgcccgactggaccgagtgcgagctgagcggctacggcaagcacgaggccctgagccccttctacagcgagagactgaaggaggcccacgtgagactgtaccccagcagcagatgcaccagccagcacctgctgaacagaaccgtgaccgacaacatgctgtgcgccggcgacaccagaagcggcggcccccaggccaacctgcacgacgcctgccagggcgacagcggcggccccctggtgtgcctgaacgacggcagaatgaccctggtgggcatcatcagctggggcctgggctgcggccagaaggacgtgcccggcgtgtacaccaaggtgaccaactacctggactggatcagagacaacatgagaccctag

SEQ ID NO: 2115 - DNA, 1311 bp, synthetic construct
  misc_feature 1..1311: note = source = /note="Description of Artificial Sequence: Synthetic coding sequence"
  source 1..1311: mol_type = other DNA
atggacgccatgaagagaggcctgtgctgcgtgctgctgctgtgcggcgccgtgttcgtgagccccagccaggagatccacgccagattcagaagaggcgccagaagctaccaggtgatctgcagagacgagaagacccagatgatctaccagcagcaccagagctggctgagacccgtgctgagaagcaacagagtggagtactgctggtgcaacagcggcagagcccagtgccacagcgtgcccgtgaagagaaacagcgactgctacttcggcaacggcagcgcctacagaggcacccacagcctgaccgagagcggcgccagctgcctgccctggaacagcatgatcctgatcggcaaggtgtacaccgcccagaaccccagcgcccaggccctgggcctgggcaagcacaactactgcagaaaccccgacggcgacgccaagccctggtgccacgtgctgaagaacagaagactgacctgggagtactgcgacgtgcccagctgcagcacctgcggcctgagacagtacagccagccccagttcagaatcaagggcggcctgttcgccgacatcgccagccacccctggcaggccgccatcttcgccaagcacagaagaagccccggcgagagattcctgtgcggcggcatcctgatcagcagctgctggatcctgagcgccgcccactgcttccaggagagattccccccccaccacctgaccgtgatcctgggcagaacctacagagtggtgcccggcgaggaggagcagaagttcgaggtggagaagtacatcgtgcacaaggagttcgacgacgacacctacgacaacgacatcgccctgctgcagctgaagagcgacagcagcagatgcgcccaggagagcagcgtggtgagaaccgtgtgcctgccccccgccgacctgcagctgcccgactggaccgagtgcgagctgagcggctacggcaagcacgaggccctgagccccttctacagcgagagactgaaggaggcccacgtgagactgtaccccagcagcagatgcaccagccagcacctgctgaacagaaccgtgaccgacaacatgctgtgcgccggcgacaccagaagcggcggcccccaggccaacctgcacgacgcctgccagggcgacagcggcggccccctggtgtgcctgaacgacggcagaatgaccctggtgggcatcatcagctggggcctgggctgcggccagaaggacgtgcccggcgtgtacaccaaggtgaccaactacctggactggatcagagacaacatgagaccctag

SEQ ID NO: 2116 - DNA, 1500 bp, synthetic construct
  misc_feature 1..1500: note = source = /note="Description of Artificial Sequence: Synthetic coding sequence"
  source 1..1500: mol_type = other DNA
atggacgccatgaagagaggcctgtgctgcgtgctgctgctgtgcggcgccgtgttcgtgagccccagccaggagatccacgccagattcagaagaggcgccagaagctaccaggtgatctgcagagacgagaagacccagatgatctaccagcagcaccagagctggctgagacccgtgctgagaagcaacagagtggagtactgctggtgcaacagcggcagagcccagtgccacagcgtgcccgtgaagagctgcagcgagcccagatgcttcaacggcggcacctgccagcaggccctgtacttcagcgacttcgtgtgccagtgccccgagggcttcgccggcaagtgctgcgagatcgacagcaagccctggtgctacgtgttcaaggccggcaagtacagcagcgagttctgcagcacccccgcctgcagcgagggcaacagcgactgctacttcggcaacggcagcgcctacagaggcacccacagcctgaccgagagcggcgccagctgcctgccctggaacagcatgatcctgatcggcaaggtgtacaccgcccagaaccccagcgcccaggccctgggcctgggcaagcacaactactgcagaaaccccgacggcgacgccaagccctggtgccacgtgctgaagaacagaagactgacctgggagtactgcgacgtgcccagctgcagcacctgcggcctgagacagtacagccagccccagttcagaatcaagggcggcctgttcgccgacatcgccagccacccctggcaggccgccatcttcgccaagcacagaagaagccccggcgagagattcctgtgcggcggcatcctgatcagcagctgctggatcctgagcgccgcccactgcttccaggagagattccccccccaccacctgaccgtgatcctgggcagaacctacagagtggtgcccggcgaggaggagcagaagttcgaggtggagaagtacatcgtgcacaaggagttcgacgacgacacctacgacaacgacatcgccctgctgcagctgaagagcgacagcagcagatgcgcccaggagagcagcgtggtgagaaccgtgtgcctgccccccgccgacctgcagctgcccgactggaccgagtgcgagctgagcggctacggcaagcacgaggccctgagccccttctacagcgagagactgaaggaggcccacgtgagactgtaccccagcagcagatgcaccagccagcacctgctgaacagaaccgtgaccgacaacatgctgtgcgccggcgacaccagaagcggcggcccccaggccaacctgcacgacgcctgccagggcgacagcggcggccccctggtgtgcctgaacgacggcagaatgaccctggtgggcatcatcagctggggcctgggctgcggccagaaggacgtgcccggcgtgtacaccaaggtgaccaactacctggactggatcagagacaacatgagaccctag

SEQ ID NO: 2117 - DNA, 537 bp, synthetic construct
  misc_feature 1..537: note = source = /note="Description of Artificial Sequence: Synthetic coding sequence"
  source 1..537: mol_type = other DNA
atggacgccatgaagagaggcctgtgctgcgtgctgctgctgtgcggcgccgtgttcgtgagccccagccaggagatccacgccagattcagaagaggcgccagaagctaccaggtgatctgcagagacgagaagacccagatgatctaccagcagcaccagagctggctgagacccgtgctgagaagcaacagagtggagtactgctggtgcaacagcggcagagcccagtgccacagcgtgcccgtgaagagctgcagcgagcccagatgcttcaacggcggcacctgccagcaggccctgtacttcagcgacttcgtgtgccagtgccccgagggcttcgccggcaagtgctgcgagatcgacaccagagccacctgctacgaggaccagggcatcagctacagaggcacctggagcaccgccgagagcggcgccgagtgcaccaactggaacagcagcgccctggcccagaagccctacagcggcagaagacccgacgccatcagactgggcctgggcaaccacaactactag

SEQ ID NO: 2118 - DNA, 474 bp, synthetic construct
  misc_feature 1..474: note = source = /note="Description of Artificial Sequence: Synthetic coding sequence"
  source 1..474: mol_type = other DNA
atggacgccatgaagagaggcctgtgctgcgtgctgctgctgtgcggcgccgtgttcgtgagccccagccaggagatccacgccagattcagaagaggcgccagaagctaccaggtgatctgcagagacgagaagacccagatgatctaccagcagcaccagagctggctgagacccgtgctgagaagcaacagagtggagtactgctggtgcaacagcggcagagcccagtgccacagcgtgcccgtgaagagctgcagcgagcccagatgcttcaacggcggcacctgccagcaggccctgtacttcagcgacttcgtgtgccagtgccccgagggcttcgccggcaagtgctgcgagatcgacaccagagccacctgctacgaggaccagggcatcagctacagaggcacctggagcaccgccgagagcggcgccgagtgcaccaactggaacagcagcgccctggcctag

SEQ ID NO: 2119 - DNA, 1422 bp, synthetic construct
  misc_feature 1..1422: note = source = /note="Description of Artificial Sequence: Synthetic coding sequence"
  source 1..1422: mol_type = other DNA
atggacgccatgaagagaggcctgtgctgcgtgctgctgctgtgcggcgccgtgttcgtgagccccagccaggagatccacgccagattcagaagaggcgccagaagctaccaggtgatctgcagagacgagaagacccagatgatctaccagcagcaccagagctggctgagacccgtgctgagaagcaacagagtggagtactgctggtgcaacagcggcagagcccagtgccacagcgtgcccgtgaagagctgcagcgagcccagatgcttcaacggcggcacctgccagcaggccctgtacttcagcgacttcgtgtgccagtgccccgagggcttcgccggcaagtgctgcgagatcggcaacagcgactgctacttcggcaacggcagcgcctacagaggcacccacagcctgaccgagagcggcgccagctgcctgccctggaacagcatgatcctgatcggcaaggtgtacaccgcccagaaccccagcgcccaggccctgggcctgggcaagcacaactactgcagaaaccccgacggcgacgccaagccctggtgccacgtgctgaagaacagaagactgacctgggagtactgcgacgtgcccagctgcagcacctgcggcctgagacagtacagccagccccagttcagaatcaagggcggcctgttcgccgacatcgccagccacccctggcaggccgccatcttcgccaagcacagaagaagccccggcgagagattcctgtgcggcggcatcctgatcagcagctgctggatcctgagcgccgcccactgcttccaggagagattccccccccaccacctgaccgtgatcctgggcagaacctacagagtggtgcccggcgaggaggagcagaagttcgaggtggagaagtacatcgtgcacaaggagttcgacgacgacacctacgacaacgacatcgccctgctgcagctgaagagcgacagcagcagatgcgcccaggagagcagcgtggtgagaaccgtgtgcctgccccccgccgacctgcagctgcccgactggaccgagtgcgagctgagcggctacggcaagcacgaggccctgagccccttctacagcgagagactgaaggaggcccacgtgagactgtaccccagcagcagatgcaccagccagcacctgctgaacagaaccgtgaccgacaacatgctgtgcgccggcgacaccagaagcggcggcccccaggccaacctgcacgacgcctgccagggcgacagcggcggccccctggtgtgcctgaacgacggcagaatgaccctggtgggcatcatcagctggggcctgggctgcggccagaaggacgtgcccggcgtgtacaccaaggtgaccaactacctggactggatcagagacaacatgagaccctag

SEQ ID NO: 2120 - DNA, 1083 bp, synthetic construct
  misc_feature 1..1083: note = source = /note="Description of Artificial Sequence: Synthetic coding sequence"
  source 1..1083: mol_type = other DNA
atggccggccacctggccagcgacttcgccttcagccccccccccggcggcggcggcgacggccccggcggccccgagcccggctgggtggaccccagaacctggctgagcttccagggcccccccggcggccccggcatcggccccggcgtgggccccggcagcgaggtgtggggcatccccccctgcccccccccctacgagttctgcggcggcatggcctactgcggcccccaggtgggcgtgggcctggtgccccagggcggcctggagaccagccagcccgagggcgaggccggcgtgggcgtggagagcaacagcgacggcgccagccccgagccctgcaccgtgacccccggcgccgtgaagctggagaaggagaagctggagcagaaccccgaggagagccaggacatcaaggccctgcagaaggagctggagcagttcgccaagctgctgaagcagaagagaatcaccctgggctacacccaggccgacgtgggcctgaccctgggcgtgctgttcggcaaggtgttcagccagaccaccatctgcagattcgaggccctgcagctgagcttcaagaacatgtgcaagctgagacccctgctgcagaagtgggtggaggaggccgacaacaacgagaacctgcaggagatctgcaaggccgagaccctggtgcaggccagaaagagaaagagaaccagcatcgagaacagagtgagaggcaacctggagaacctgttcctgcagtgccccaagcccaccctgcagcagatcagccacatcgcccagcagctgggcctggagaaggacgtggtgagagtgtggttctgcaacagaagacagaagggcaagagaagcagcagcgactacgcccagagagaggacttcgaggccgccggcagccccttcagcggcggccccgtgagcttccccctggcccccggcccccacttcggcacccccggctacggcagcccccacttcaccgccctgtacagcagcgtgcccttccccgagggcgaggccttcccccccgtgagcgtgaccaccctgggcagccccatgcacagcaactag

SEQ ID NO: 2121 - DNA, 798 bp, synthetic construct
  misc_feature 1..798: note = source = /note="Description of Artificial Sequence: Synthetic coding sequence"
  source 1..798: mol_type = other DNA
atgcacttctacagactgttcctgggcgccaccagaagattcctgaaccccgagtggaagggcgagatcgacaactggtgcgtgtacgtgctgaccagcctgctgcccttcaagatccagagccaggacatcaaggccctgcagaaggagctggagcagttcgccaagctgctgaagcagaagagaatcaccctgggctacacccaggccgacgtgggcctgaccctgggcgtgctgttcggcaaggtgttcagccagaccaccatctgcagattcgaggccctgcagctgagcttcaagaacatgtgcaagctgagacccctgctgcagaagtgggtggaggaggccgacaacaacgagaacctgcaggagatctgcaaggccgagaccctggtgcaggccagaaagagaaagagaaccagcatcgagaacagagtgagaggcaacctggagaacctgttcctgcagtgccccaagcccaccctgcagcagatcagccacatcgcccagcagctgggcctggagaaggacgtggtgagagtgtggttctgcaacagaagacagaagggcaagagaagcagcagcgactacgcccagagagaggacttcgaggccgccggcagccccttcagcggcggccccgtgagcttccccctggcccccggcccccacttcggcacccccggctacggcagcccccacttcaccgccctgtacagcagcgtgcccttccccgagggcgaggccttcccccccgtgagcgtgaccaccctgggcagccccatgcacagcaactag

SEQ ID NO: 2122 - DNA, 1083 bp, synthetic construct; identical to SEQ ID NO: 2120
  misc_feature 1..1083: note = source = /note="Description of Artificial Sequence: Synthetic coding sequence"
  source 1..1083: mol_type = other DNA

SEQ ID NO: 2123 - DNA, 798 bp, synthetic construct; identical to SEQ ID NO: 2121
  misc_feature 1..798: note = source = /note="Description of Artificial Sequence: Synthetic coding sequence"
  source 1..798: mol_type = other DNA

SEQ ID NO: 2124 - DNA, 798 bp, synthetic construct; identical to SEQ ID NO: 2121
  misc_feature 1..798: note = source = /note="Description of Artificial Sequence: Synthetic coding sequence"
  source 1..798: mol_type = other DNA

SEQ ID NO: 2125 - DNA, 1083 bp, synthetic construct; identical to SEQ ID NO: 2120
  misc_feature 1..1083: note = source = /note="Description of Artificial Sequence: Synthetic coding sequence"
  source 1..1083: mol_type = other DNA

SEQ ID NO: 2126 - DNA, 1083 bp, synthetic construct; identical to SEQ ID NO: 2120
  misc_feature 1..1083: note = source = /note="Description of Artificial Sequence: Synthetic coding sequence"
  source 1..1083: mol_type = other DNA

SEQ ID NO: 2127 - DNA, 798 bp, synthetic construct; identical to SEQ ID NO: 2121
  misc_feature 1..798: note = source = /note="Description of Artificial Sequence: Synthetic coding sequence"
  source 1..798: mol_type = other DNA

SEQ ID NO: 2128 - DNA, 1083 bp, synthetic construct; identical to SEQ ID NO: 2120
  misc_feature 1..1083: note = source = /note="Description of Artificial Sequence: Synthetic coding sequence"
  source 1..1083: mol_type = other DNA

SEQ ID NO: 2129 - DNA, 369 bp, synthetic construct
  misc_feature 1..369: note = source = /note="Description of Artificial Sequence: Synthetic coding sequence"
  source 1..369: mol_type = other DNA
atggccggccacctggccagcgacttcgccttcagccccccccccggcggcggcggcgacggccccggcggccccgagcccggctgggtggaccccagaacctggctgagcttccagggcccccccggcggccccggcatcggccccggcgtgggccccggcagcgaggtgtggggcatccccccctgcccccccccctacgagttctgcggcggcatggcctactgcggcccccaggtgggcgtgggcctggtgccccagggcggcctggagaccagccagcccgagggcgaggccggcggcggcgagcagctgagatggggcctgcccggcgccctgcacagacacccctggtgcagagaggcctag

SEQ ID NO: 2130 - DNA, 798 bp, synthetic construct; identical to SEQ ID NO: 2121
  misc_feature 1..798: note = source = /note="Description of Artificial Sequence: Synthetic coding sequence"
  source 1..798: mol_type = other DNA

SEQ ID NO: 2131 - DNA, 1083 bp, synthetic construct; identical to SEQ ID NO: 2120
  misc_feature 1..1083: note = source = /note="Description of Artificial Sequence: Synthetic coding sequence"
  source 1..1083: mol_type = other DNA

SEQ ID NO: 2132 - DNA, 372 bp, synthetic construct
  misc_feature 1..372: note = source = /note="Description of Artificial Sequence: Synthetic coding sequence"
  source 1..372: mol_type = other DNA
atggccggccacctggccagcgacttcgccttcagccccccccccggcggcggcggcgacggccccggcggccccgagcccggctgggtggaccccagaacctggctgagcttccagggcccccccggcggccccggcatcggccccggcgtgggccccggcagcgaggtgtggggcatccccccctgcccccccccctacgagttctgcggcggcatggcctactgcggcccccaggtgggcgtgggcctggtgccccagggcggcctggagaccagccagcccgagggcgaggccggcgtgggcgtggagacccccatgggcccccccagaagccccgccccccaccccttccccttccccctgctgtag

SEQ ID NO: 2133 - DNA, 558 bp, synthetic construct
  misc_feature 1..558: note = source = /note="Description of Artificial Sequence: Synthetic coding sequence"
  source 1..558: mol_type = other DNA
atggccggccacctggccagcgacttcgccttcagccccccccccggcggcggcggcgacggccccggcggccccgagcccggctgggtggaccccagaacctggctgagcttccagggcccccccggcggccccggcatcggccccggcgtgggccccggcagcgaggtgtggggcatccccccctgcccccccccctacgagttctgcggcggcatggcctactgcggcccccaggtgggcgtgggcctggtgccccagggcggcctggagaccagccagcccgagggcgaggccggcgtgggcgtggagagcaacagcgacggcgccagccccgagccctgcaccgtgacccccggcgccgtgaagctggagaaggagaagctggagcagaaccccgaggagagccaggacatcaaggccctgcagaaggagctggagcagttcgccaagctgctgaagcagaagagaatcaccctgggctacacccaggccgacgtgcaccccggcggcagcatctgggagggcatccagcccaacgaccacctgcccctgtag

SEQ ID NO: 2134 - DNA, 372 bp, synthetic construct; identical to SEQ ID NO: 2132
  misc_feature 1..372: note = source = /note="Description of Artificial Sequence: Synthetic coding sequence"
  source 1..372: mol_type = other DNA

SEQ ID NO: 2135 - DNA, 558 bp, synthetic construct; identical to SEQ ID NO: 2133
  misc_feature 1..558: note = source = /note="Description of Artificial Sequence: Synthetic coding sequence"
  source 1..558: mol_type = other DNA

SEQ ID NO: 2136 - DNA, 372 bp, synthetic construct; identical to SEQ ID NO: 2132
  misc_feature 1..372: note = source = /note="Description of Artificial Sequence: Synthetic coding sequence"
  source 1..372: mol_type = other DNA

SEQ ID NO: 2137 - DNA, 558 bp, synthetic construct; identical to SEQ ID NO: 2133
  misc_feature 1..558: note = source = /note="Description of Artificial Sequence: Synthetic coding sequence"
  source 1..558: mol_type = other DNA

SEQ ID NO: 2138 - DNA, 558 bp, synthetic construct; identical to SEQ ID NO: 2133
  misc_feature 1..558: note = source = /note="Description of Artificial Sequence: Synthetic coding sequence"
  source 1..558: mol_type = other DNA

SEQ ID NO: 2139 - DNA, 372 bp, synthetic construct; identical to SEQ ID NO: 2132
  misc_feature 1..372: note = source = /note="Description of Artificial Sequence: Synthetic coding sequence"
  source 1..372: mol_type = other DNA

SEQ ID NO: 2140 - DNA, 372 bp, synthetic construct; identical to SEQ ID NO: 2132
  misc_feature 1..372: note = source = /note="Description of Artificial Sequence: Synthetic coding sequence"
  source 1..372: mol_type = other DNA

SEQ ID NO: 2141 - DNA, 2079 bp, synthetic construct
  misc_feature 1..2079: note = source = /note="Description of Artificial Sequence: Synthetic coding sequence"
  source 1..2079: mol_type = other DNA
atgggcaccgtgagcagcagaagaagctggtggcccctgcccctgctgctgctgctgctgctgctgctgggccccgccggcgccagagcccaggaggacgaggacggcgactacgaggagctggtgctggccctgagaagcgaggaggacggcctggccgaggcccccgagcacggcaccaccgccaccttccacagatgcgccaaggacccctggagactgcccggcacctacgtggtggtgctgaaggaggagacccacctgagccagagcgagagaaccgccagaagactgcaggcccaggccgccagaagaggctacctgaccaagatcctgcacgtgttccacggcctgctgcccggcttcctggtgaagatgagcggcgacctgctggagctggccctgaagctgccccacgtggactacatcgaggaggacagcagcgtgttcgcccagagcatcccctggaacctggagagaatcaccccccccagatacagagccgacgagtaccagccccccgacggcggcagcctggtggaggtgtacctgctggacaccagcatccagagcgaccacagagagatcgagggcagagtgatggtgaccgacttcgagaacgtgcccgaggaggacggcaccagattccacagacaggccagcaagtgcgacagccacggcacccacctggccggcgtggtgagcggcagagacgccggcgtggccaagggcgccagcatgagaagcctgagagtgctgaactgccagggcaagggcaccgtgagcggcaccctgatcggcctggagttcatcagaaagagccagctggtgcagcccgtgggccccctggtggtgctgctgcccctggccggcggctacagcagagtgctgaacgccgcctgccagagactggccagagccggcgtggtgctggtgaccgccgccggcaacttcagagacgacgcctgcctgtacagccccgccagcgcccccgaggtgatcaccgtgggcgccaccaacgcccaggaccagcccgtgaccctgggcaccctgggcaccaacttcggcagatgcgtggacctgttcgcccccggcgaggacatcatcggcgccagcagcgactgcagcacctgcttcgtgagccagagcggcaccagccaggccgccgcccacgtggccggcatcgccgccatgatgctgagcgccgagcccgagctgaccctggccgagctgagacagagactgatccacttcagcgccaaggacgtgatcaacgaggcctggttccccgaggaccagagagtgctgacccccaacctggtggccgccctgccccccagcacccacggcgccggctggcagctgttctgcagaaccgtgtggagcgcccacagcggccccaccagaatggccaccgccgtggccagatgcgcccccgacgaggagctgctgagctgcagcagcttcagcagaagcggcaagagaagaggcgagagaatggaggcccagggcggcaagctggtgtgcagagcccacaacgccttcggcggcgagggcgtgtacgccatcgccagatgctgcctgctgccccaggccaactgcagcgtgcacaccgccccccccgccgaggccagcatgggcaccagagtgcactgccaccagcagggccacgtgctgaccggctgcagcagccactgggaggtggaggacctgggcacccacaagccccccgtgctgagacccagaggccagcccaaccagtgcgtgggccacagagaggccagcatccacgccagctgctgccacgcccccggcctggagtgcaaggtgaaggagcacggcatccccgccccccaggagcaggtgaccgtggcctgcgaggagggctggaccctgaccggctgcagcgccctgcccggcaccagccacgtgctgggcgcctacgccgtggacaacacctgcgtggtgagaagcagagacgtgagcaccaccggcagcaccagcgagggcgccgtgaccgccgtggccatctgctgcagaagcagacacctggcccaggccagccaggagctgcagtag

SEQ ID NO: 2142 - DNA, 618 bp, synthetic construct
  misc_feature 1..618: note = source = /note="Description of Artificial Sequence: Synthetic coding sequence"
  source 1..618: mol_type = other DNA
atgggcaccgtgagcagcagaagaagctggtggcccctgcccctgctgctgctgctgctgctgctgctgggccccgccggcgccagagcccaggaggacgaggacggcgactacgaggagctggtgctggccctgagaagcgaggaggacggcctggccgaggcccccgagcacggcaccaccgccaccttccacagatgcgccaaggacccctggagactgcccggcacctacgtggtggtgctgaaggaggagacccacctgagccagagcgagagaaccgccagaagactgcaggcccaggccgccagaagaggctacctgaccaagatcctgcacgtgttccacggcctgctgcccggcttcctggtgaagatgagcggcgacctgctggagctggccctgaagctgccccacgtggactacatcgaggaggacagcagcgtgttcgcccagagcatcccctggaacctggagagaatcaccccccccagatacagagccgacgagtaccagccccccgcctacctggaggaccactgcggcggccacagaggcgccgtgcagatggccctgcagaagacccaggagaccctgggccaggagcagttcgactag

SEQ ID NO: 2143 - DNA, 801 bp, synthetic construct
  misc_feature 1..801: note = source = /note="Description of Artificial Sequence: Synthetic coding sequence"
  source 1..801: mol_type = other DNA
atggtgaccgacttcgagaacgtgcccgaggaggacggcaccagattccacagacaggccagcaagtgcgacagccacggcacccacctggccggcgtggtgagcggcagagacgccggcgtggccaagggcgccagcatgagaagcctgagagtgctgaactgccagggcaagggcaccgtgagcggcaccctgatcggcctggagttcatcagaaagagccagctggtgcagcccgtgggccccctggtggtgctgctgcccctggccggcggctacagcagagtgctgaacgccgcctgccagagactggccagagccggcgtggtgctggtgaccgccgccggcaacttcagagacgacgcctgcctgtacagccccgccagcgcccccgaggtgatcaccgtgggcgccaccaacgcccaggaccagcccgtgaccctgggcaccctgggcaccaacttcggcagatgcgtggacctgttcgcccccggcgaggacatcatcggcgccagcagcgactgcagcacctgcttcgtgagccagagcggcaccagccaggccgccgcccacgtggccggcatcgccgccatgatgctgagcgccgagcccgagctgaccctggccgagctgagacagagactgatccacttcagcgccaaggacgtgatcaacgaggcctggttccccgaggaccagagagtgggcagctgcttcgccggcctgtacggccagcacaccagaggcctgcacggctggccccagcccagccccgccgccccccagatgagaagctgctag

SEQ ID NO: 2144 - DNA, 3972 bp, synthetic construct
  misc_feature 1..3972: note = source = /note="Description of Artificial Sequence: Synthetic coding sequence"
  source 1..3972: mol_type = other DNA
atggaggacggcggcctgaccgccttcgaggaggaccagagatgcctgagccagagcctgcccctgcccgtgagcgccgagggccccgccgcccagaccaccgccgagcccagcagaagcttcagcagcgcccacagacacctgagcagaagaaacggcctgagcagactgtgccagagcagaaccgccctgagcgaggacagatggagcagctactgcctgagcagcctggccgcccagaacatctgcaccagcaagctgcactgccccgccgcccccgagcacaccgaccccagcgagcccagaggcagcgtgagctgctgcagcctgctgagaggcctgagcagcggctggagcagccccctgctgcccgcccccgtgtgcaaccccaacaaggccatcttcaccgtggacgccaagaccaccgagatcctggtggccaacgacaaggcctgcggcctgctgggctacagcagccaggacctgatcggccagaagctgacccagttcttcctgagaagcgacagcgacgtggtggaggccctgagcgaggagcacatggaggccgacggccacgccgccgtggtgttcggcaccgtggtggacatcatcagcagaagcggcgagaagatccccgtgagcgtgtggatgaagagaatgagacaggagagaagactgtgctgcgtggtggtgctggagcccgtggagagagtgagcacctgggtggccttccagagcgacggcaccgtgaccagctgcgacagcctgttcgcccacctgcacggctacgtgagcggcgaggacgtggccggccagcacatcaccgacctgatccccagcgtgcagctgccccccagcggccagcacatccccaagaacctgaagatccagagaagcgtgggcagagccagagacggcaccaccttccccctgagcctgaagctgaagagccagcccagcagcgaggaggccaccaccggcgaggccgcccccgtgagcggctacagagccagcgtgtgggtgttctgcaccatcagcggcctgatcaccctgctgcccgacggcaccatccacggcatcaaccacagcttcgccctgaccctgttcggctacggcaagaccgagctgctgggcaagaacatcaccttcctgatccccggcttctacagctacatggacctggcctacaacagcagcctgcagctgcccgacctggccagctgcctggacgtgggcaacgagagcggctgcggcgagagaaccctggacccctggcagggccaggaccccgccgagggcggccaggaccccagaatcaacgtggtgctggccggcggccacgtggtgcccagagacgagatcagaaagctgatggagagccaggacatcttcaccggcacccagaccgagctgatcgccggcggccagctgctgagctgcctgagcccccagcccgcccccggcgtggacaacgtgcccgagggcagcctgcccgtgcacggcgagcaggccctgcccaaggaccagcagatcaccgccctgggcagagaggagcccgtggccatcgagagccccggccaggacctgctgggcgagagcagaagcgagcccgtggacgtgaagcccttcgccagctgcgaggacagcgaggcccccgtgcccgccgaggacggcggcagcgacgccggcatgtgcggcctgtgccagaaggcccagctggagagaatgggcgtgagcggccccagcggcagcgacctgtgggccggcgccgccgtggccaagccccaggccaagggccagctggccggcggcagcctgctgatgcactgcccctgctacggcagcgagtggggcctgtggtggagaagccaggacctggcccccagccccagcggcatggccggcctgagcttcggcacccccaccctggacgagccctggctgggcgtggagaacgacagagaggagctgcagacctgcctgatcaaggagcagctgagccagctgagcctggccggcgccctggacgtgccccacgccgagctggtgcccaccgagtgccaggccgtgaccgcccccgtgagcagctgcgacctgggcggcagagacctgtgcggcggctgcaccggcagcagcagcgcctgctacgccctggccaccgacctgcccggcggcctggaggccgtggaggcccaggaggtggacgtgaacagcttcagctggaacctgaaggagctgttcttcagcgaccagaccgaccagaccagcagcaactgcagctgcgccaccagcgagctgagagagacccccagcagcctggccgtgggcagcgaccccgacgtgggcagcctgcaggagcagggcagctgcgtgctggacgacagagagctgctgctgctgaccggcacctgcgtggacctgggccagggcagaagattcagagagagctgcgtgggccacgaccccaccgagcccctggaggtgtgcctggtgagcagcgagcactacgccgccagcgacagagagagccccggccacgtgcccagcaccctggacgccggccccgaggacacctgccccagcgccgaggagcccagactgaacgtgcaggtgaccagcacccccgtgatcgtgatgagaggcgccgccggcctgcagagagagatccaggagggcgcctacagcggcagctgctaccacagagacggcctgagactgagcatccagttcgaggtgagaagagtggagctgcagggccccacccccctgttctgctgctggctggtgaaggacctgctgcacagccagagagacagcgccgccagaaccagactgttcctggccagcctgcccggcagcacccacagcaccgccgccgagctgaccggccccagcctggtggaggtgctgagagccagaccctggttcgaggagccccccaaggccgtggagctggagggcctggccgcctgcgagggcgagtacagccagaagtacagcaccatgagccccctgggcagcggcgccttcggcttcgtgtggaccgccgtggacaaggagaagaacaaggaggtggtggtgaagttcatcaagaaggagaaggtgctggaggactgctggatcgaggaccccaagctgggcaaggtgaccctggagatcgccatcctgagcagagtggagcacgccaacatcatcaaggtgctggacatcttcgagaaccagggcttcttccagctggtgatggagaagcacggcagcggcctggacctgttcgccttcatcgacagacaccccagactggacgagcccctggccagctacatcttcagacagctggtgagcgccgtgggctacctgagactgaaggacatcatccacagagacatcaaggacgagaacatcgtgatcgccgaggacttcaccatcaagctgatcgacttcggcagcgccgcctacctggagagaggcaagctgttctacaccttctgcggcaccatcgagtactgcgcccccgaggtgctgatgggcaacccctacagaggccccgagctggagatgtggagcctgggcgtgaccctgtacaccctggtgttcgaggagaaccccttctgcgagctggaggagaccgtggaggccgccatccaccccccctacctggtgagcaaggagctgatgagcctggtgagcggcctgctgcagcccgtgcccgagagaagaaccaccctggagaagctggtgaccgacccctgggtgacccagcccgtgaacctggccgactacacctgggaggaggtgttcagagtgaacaagcccgagagcggcgtgctgagcgccgccagcctggagatgggcaacagaagcctgagcgacgtggcccaggcccaggagctgtgcggcggccccgtgcccggcgaggcccccaacggccagggctgcctgcaccccggcgaccccagactgctgaccagctag

SEQ ID NO: 2145 - DNA, 1488 bp, synthetic construct
  misc_feature 1..1488: note = source = /note="Description of Artificial Sequence: Synthetic coding sequence"
  source 1..1488: mol_type = other DNA
atgtggcagctgaccagcctgctgctgttcgtggccacctggggcatcagcggcacccccgcccccctggacagcgtgttcagcagcagcgagagagcccaccaggtgctgagaatcagaaagagagccaacagcttcctggaggagctgagacacagcagcctggagagagagtgcatcgaggagatctgcgacttcgaggaggccaaggagatcttccagaacgtggacgacaccctggccttctggagcaagcacgtggacggcgaccagtgcctggtgctgcccctggagcacccctgcgccagcctgtgctgcggccacggcacctgcatcgacggcatcggcagcttcagctgcgactgcagaagcggctgggagggcagattctgccagagaggcgagggcgagagatggatgctggccggcggcggcgccggcctgggccccggctggggcagaggcaccagcaccagctgccccagaccccccctgcccgccgaggtgagcttcctgaactgcagcctggacaacggcggctgcacccactactgcctggaggaggtgggctggagaagatgcagctgcgcccccggctacaagctgggcgacgacctgctgcagtgccaccccgccgtgaagttcccctgcggcagaccctggaagagaatggagaagaagagaagccacctgaagagagacaccgaggaccaggaggaccaggtggaccccagactgatcgacggcaagatgaccagaagaggcgacagcccctggcaggtggtgctgctggacagcaagaagaagctggcctgcggcgccgtgctgatccaccccagctgggtgctgaccgccgcccactgcatggacgagagcaagaagctgctggtgagactgggcgagtacgacctgagaagatgggagaagtgggagctggacctggacatcaaggaggtgttcgtgcaccccaactacagcaagagcaccaccgacaacgacatcgccctgctgcacctggcccagcccgccaccctgagccagaccatcgtgcccatctgcctgcccgacagcggcctggccgagagagagctgaaccaggccggccaggagaccctggtgaccggctggggctaccacagcagcagagagaaggaggccaagagaaacagaaccttcgtgctgaacttcatcaagatccccgtggtgccccacaacgagtgcagcgaggtgatgagcaacatggtgagcgagaacatgctgtgcgccggcatcctgggcgacagacaggacgcctgcgagggcgacagcggcggccccatggtggccagcttccacggcacctggttcctggtgggcctggtgagctggggcgagggctgcggcctgctgcacaactacggcgtgtacaccaaggtgagcagatacctggactggatccacggccacatcagagacaaggaggccccccagaagagctgggccccctag

SEQ ID NO: 2146 - DNA, 1386 bp, synthetic construct
  misc_feature 1..1386: note = source = /note="Description of Artificial Sequence: Synthetic coding sequence"
  source 1..1386: mol_type = other DNA
atgtggcagctgaccagcctgctgctgttcgtggccacctggggcatcagcggcacccccgcccccctggacagcgtgttcagcagcagcgagagagcccaccaggtgctgagaatcagaaagagagccaacagcttcctggaggagctgagacacagcagcctggagagagagtgcatcgaggagatctgcgacttcgaggaggccaaggagatcttccagaacgtggacgacaccctggccttctggagcaagcacgtggacggcgaccagtgcctggtgctgcccctggagcacccctgcgccagcctgtgctgcggccacggcacctgcatcgacggcatcggcagcttcagctgcgactgcagaagcggctgggagggcagattctgccagagagaggtgagcttcctgaactgcagcctggacaacggcggctgcacccactactgcctggaggaggtgggctggagaagatgcagctgcgcccccggctacaagctgggcgacgacctgctgcagtgccaccccgccgtgaagttcccctgcggcagaccctggaagagaatggagaagaagagaagccacctgaagagagacaccgaggaccaggaggaccaggtggaccccagactgatcgacggcaagatgaccagaagaggcgacagcccctggcaggtggtgctgctggacagcaagaagaagctggcctgcggcgccgtgctgatccaccccagctgggtgctgaccgccgcccactgcatggacgagagcaagaagctgctggtgagactgggcgagtacgacctgagaagatgggagaagtgggagctggacctggacatcaaggaggtgttcgtgcaccccaactacagcaagagcaccaccgacaacgacatcgccctgctgcacctggcccagcccgccaccctgagccagaccatcgtgcccatctgcctgcccgacagcggcctggccgagagagagctgaaccaggccggccaggagaccctggtgaccggctggggctaccacagcagcagagagaaggaggccaagagaaacagaaccttcgtgctgaacttcatcaagatccccgtggtgccccacaacgagtgcagcgaggtgatgagcaacatggtgagcgagaacatgctgtgcgccggcatcctgggcgacagacaggacgcctgcgagggcgacagcggcggccccatggtggccagcttccacggcacctggttcctggtgggcctggtgagctggggcgagggctgcggcctgctgcacaactacggcgtgtacaccaaggtgagcagatacctggactggatccacggccacatcagagacaaggaggccccccagaagagctgggccccctag

SEQ ID NO: 2147 - DNA, 351 bp, synthetic construct
  misc_feature 1..351: note = source = /note="Description of Artificial Sequence: Synthetic coding sequence"
  source 1..351: mol_type = other DNA
atgtggcagctgaccagcctgctgctgttcgtggccacctggggcatcagcggcacccccgcccccctggacagcgtgttcagcagcagcgagagagcccaccaggtgctgagaatcagaaagagagccaacagcttcctggaggagctgagacacagcagcctggagagagagtgcatcgaggagatctgcgacttcgaggaggccaaggagatcttccagaacgtggacgacaccctggccttctggagcaagcacgtggacggcgaccagtgcctggtgctgcccctggagcacccctgcgccagcctgtgctgcggccacggcacctgcatcgacggcatcggctag

SEQ ID NO: 2148 - DNA, 381 bp, synthetic construct
  misc_feature 1..381: note = source = /note="Description of Artificial Sequence: Synthetic coding sequence"
  source 1..381: mol_type = other DNA
atgtggcagctgaccagcctgctgctgttcgtggccacctggggcatcagcggcacccccgcccccctggacagcgtgttcagcagcagcgagagagcccaccaggtgctgagaatcagaaagagagccaacagcttcctggaggagctgagacacagcagcctggagagagagtgcatcgaggagatctgcgacttcgaggaggccaaggagatcttccagaacgtggacgacaccctggccttctggagcaagcacgtggacggcgaccagtgcctggtgctgcccctggagcacccctgcgccagcctgtgctgcggccacggcacctgcatcgacggcatcggcagcttcagctgcgactgcagaagcggctggtag

SEQ ID NO: 2149 - DNA, 1551 bp, synthetic construct
  misc_feature 1..1551: note = source = /note="Description of Artificial Sequence: Synthetic coding sequence"
  source 1..1551: mol_type = other DNA
atggccgccggcagaagaacctgcagcatcagcaccaccagaccctgcgccagcgccagcagaatgtggcagctgaccagcctgctgctgttcgtggccacctggggcatcagcggcacccccgcccccctggacagcgtgttcagcagcagcgagagagcccaccaggtgctgagaatcagaaagagagccaacagcttcctggaggagctgagacacagcagcctggagagagagtgcatcgaggagatctgcgacttcgaggaggccaaggagatcttccagaacgtggacgacaccctggccttctggagcaagcacgtggacggcgaccagtgcctggtgctgcccctggagcacccctgcgccagcctgtgctgcggccacggcacctgcatcgacggcatcggcagcttcagctgcgactgcagaagcggctgggagggcagattctgccagagaggcgagggcgagagatggatgctggccggcggcggcgccggcctgggccccggctggggcagaggcaccagcaccagctgccccagaccccccctgcccgccgaggtgagcttcctgaactgcagcctggacaacggcggctgcacccactactgcctggaggaggtgggctggagaagatgcagctgcgcccccggctacaagctgggcgacgacctgctgcagtgccaccccgccgtgaagttcccctgcggcagaccctggaagagaatggagaagaagagaagccacctgaagagagacaccgaggaccaggaggaccaggtggaccccagactgatcgacggcaagatgaccagaagaggcgacagcccctggcaggtggtgctgctggacagcaagaagaagctggcctgcggcgccgtgctgatccaccccagctgggtgctgaccgccgcccactgcatggacgagagcaagaagctgctggtgagactgggcgagtacgacctgagaagatgggagaagtgggagctggacctggacatcaaggaggtgttcgtgcaccccaactacagcaagagcaccaccgacaacgacatcgccctgctgcacctggcccagcccgccaccctgagccagaccatcgtgcccatctgcctgcccgacagcggcctggccgagagagagctgaaccaggccggccaggagaccctggtgaccggctggggctaccacagcagcagagagaaggaggccaagagaaacagaaccttcgtgctgaacttcatcaagatccccgtggtgccccacaacgagtgcagcgaggtgatgagcaacatggtgagcgagaacatgctgtgcgccggcatcctgggcgacagacaggacgcctgcgagggcgacagcggcggccccatggtggccagcttccacggcacctggttcctggtgggcctggtgagctggggcgagggctgcggcctgctgcacaactacggcgtgtacaccaaggtgagcagatacctggactggatccacggccacatcagagacaaggaggccccccagaagagctgggccccctag

SEQ ID NO: 2150 - DNA, 1263 bp, synthetic construct
  misc_feature 1..1263: note = source = /note="Description of Artificial Sequence: Synthetic coding sequence"
  source 1..1263: mol_type = other DNA
atgtggatgacccactggcccagcggccccagcaccagcaccgtgaccagcgcctggagctgcccctggagcaccagagcccccgcctgcgccgccggcaccgccagagccagcaccgccagcgccgccagcgccgccaccgccgccgccgccggcagagccgccagcgccagcgccgtgagaggcagaggcggctgctggagaggcggcgccggcctgggccccggctggggcagaggcaccagcaccagctgccccagaccccccctgcccgccgaggtgagcttcctgaactgcagcctggacaacggcggctgcacccactactgcctggaggaggtgggctggagaagatgcagctgcgcccccggctacaagctgggcgacgacctgctgcagtgccaccccgccgtgaagttcccctgcggcagaccctggaagagaatggagaagaagagaagccacctgaagagagacaccgaggaccaggaggaccaggtggaccccagactgatcgacggcaagatgaccagaagaggcgacagcccctggcaggtggtgctgctggacagcaagaagaagctggcctgcggcgccgtgctgatccaccccagctgggtgctgaccgccgcccactgcatggacgagagcaagaagctgctggtgagactgggcgagtacgacctgagaagatgggagaagtgggagctggacctggacatcaaggaggtgttcgtgcaccccaactacagcaagagcaccaccgacaacgacatcgccctgctgcacctggcccagcccgccaccctgagccagaccatcgtgcccatctgcctgcccgacagcggcctggccgagagagagctgaaccaggccggccaggagaccctggtgaccggctggggctaccacagcagcagagagaaggaggccaagagaaacagaaccttcgtgctgaacttcatcaagatccccgtggtgccccacaacgagtgcagcgaggtgatgagcaacatggtgagcgagaacatgctgtgcgccggcatcctgggcgacagacaggacgcctgcgagggcgacagcggcggccccatggtggccagcttccacggcacctggttcctggtgggcctggtgagctggggcgagggctgcggcctgctgcacaactacggcgtgtacaccaaggtgagcagatacctggactggatccacggccacatcagagacaaggaggccccccagaagagctgggccccctag

SEQ ID NO: 2151 - DNA, 354 bp, synthetic construct
  misc_feature 1..354: note = source = /note="Description of Artificial Sequence: Synthetic coding sequence"
  source 1..354: mol_type = other DNA
atgcccagactgttcttcttccacctgctgggcgtgtgcctgctgctgaaccagttcagcagagccgtggccgacagctggatggaggaggtgatcaagctgtgcggcagagagctggtgagagcccagatcgccatctgcggcatgagcacctggagcaagagaagcctgagccaggaggacgccccccagacccccagacccgtggccggcgacttcatccagaccgtgagcctgggcatcagccccgacggcggcaaggccctgagaaccggcagctgcttcaccagagagttcctgggcgccctgagcaagctgtgccaccccagcagcaccaagatccagaagccctag

SEQ ID NO: 2152 - DNA, 558 bp, synthetic construct
  misc_feature 1..558: note = source = /note="Description of Artificial Sequence: Synthetic coding sequence"
  source 1..558: mol_type = other DNA
atgcccagactgttcttcttccacctgctgggcgtgtgcctgctgctgaaccagttcagcagagccgtggccgacagctggatggaggaggtgatcaagctgtgcggcagagagctggtgagagcccagatcgccatctgcggcatgagcacctggagcaagagaagcctgagccaggaggacgccccccagacccccagacccgtggccgagatcgtgcccagcttcatcaacaaggacaccgagaccatcaacatgatgagcgagttcgtggccaacctgccccaggagctgaagctgaccctgagcgagatgcagcccgccctgccccagctgcagcagcacgtgcccgtgctgaaggacagcagcctgctgttcgaggagttcaagaagctgatcagaaacagacagagcgaggccgccgacagcagccccagcgagctgaagtacctgggcctggacacccacagcagaaagaagagacagctgtacagcgccctggccaacaagtgctgccacgtgggctgcaccaagagaagcctggccagattctgctag

SEQ ID NO: 2153 - DNA, 1047 bp, synthetic construct
  misc_feature 1..1047: note = source = /note="Description of Artificial Sequence: Synthetic coding sequence"
  source 1..1047: mol_type = other DNA
atgaacggcaccgagggccccaacttctacgtgcccttcagcaacgccaccggcgtggtgagaagccccttcgagtacccccagtactacctggccgagccctggcagttcagcatgctggccgcctacatgttcctgctgatcgtgctgggcttccccatcaacttcctgaccctgtacgtgaccgtgcagcacaagaagctgagaacccccctgaactacatcctgctgaacctggccgtggccgacctgttcatggtgctgggcggcttcaccagcaccctgtacaccagcctgcacggctacttcgtgttcggccccaccggctgcaacctggagggcttcttcgccaccctgggcggcgagatcgccctgtggagcctggtggtgctggccatcgagagatacgtggtggtgtgcaagcccatgagcaacttcagattcggcgagaaccacgccatcatgggcgtggccttcacctgggtgatggccctggcctgcgccgccccccccctggccggctggagcagatacatccccgagggcctgcagtgcagctgcggcatcgactactacaccctgaagcccgaggtgaacaacgagagcttcgtgatctacatgttcgtggtgcacttcaccatccccatgatcatcatcttcttctgctacggccagctggtgttcaccgtgaaggaggccgccgcccagcagcaggagagcgccaccacccagaaggccgagaaggaggtgaccagaatggtgatcatcatggtgatcgccttcctgatctgctgggtgccctacgccagcgtggccttctacatcttcacccaccagggcagcaacttcggccccatcttcatgaccatccccgccttcttcgccaagagcgccgccatctacaaccccgtgatctacatcatgatgaacaagcagttcagaaactgcatgctgaccaccatctgctgcggcaagaaccccctgggcgacgacgaggccagcgccaccgtgagcaagaccgagaccagccaggtggcccccgcctag

SEQ ID NO: 2154 - DNA, 1257 bp, synthetic construct
  misc_feature 1..1257: note = source = /note="Description of Artificial Sequence: Synthetic coding sequence"
  source 1..1257: mol_type = other DNA
atgcccagcagcgtgagctggggcatcctgctgctggccggcctgtgctgcctggtgcccgtgagcctggccgaggacccccagggcgacgccgcccagaagaccgacaccagccaccacgaccaggaccaccccaccttcaacaagatcacccccaacctggccgagttcgccttcagcctgtacagacagctggcccaccagagcaacagcaccaacatcttcttcagccccgtgagcatcgccaccgccttcgccatgctgagcctgggcaccaaggccgacacccacgacgagatcctggagggcctgaacttcaacctgaccgagatccccgaggcccagatccacgagggcttccaggagctgctgagaaccctgaaccagcccgacagccagctgcagctgaccaccggcaacggcctgttcctgagcgagggcctgaagctggtggacaagttcctggaggacgtgaagaagctgtaccacagcgaggccttcaccgtgaacttcggcgacaccgaggaggccaagaagcagatcaacgactacgtggagaagggcacccagggcaagatcgtggacctggtgaaggagctggacagagacaccgtgttcgccctggtgaactacatcttcttcaagggcaagtgggagagacccttcgaggtgaaggacaccgaggaggaggacttccacgtggaccaggtgaccaccgtgaaggtgcccatgatgaagagactgggcatgttcaacatccagcactgcaagaagctgagcagctgggtgctgctgatgaagtacctgggcaacgccaccgccatcttcttcctgcccgacgagggcaagctgcagcacctggagaacgagctgacccacgacatcatcaccaagttcctggagaacgaggacagaagaagcgccagcctgcacctgcccaagctgagcatcaccggcacctacgacctgaagagcgtgctgggccagctgggcatcaccaaggtgttcagcaacggcgccgacctgagcggcgtgaccgaggaggcccccctgaagctgagcaaggccgtgcacaaggccgtgctgaccatcgacgagaagggcaccgaggccgccggcgccatgttcctggaggccatccccatgagcatcccccccgaggtgaagttcaacaagcccttcgtgttcctgatgatcgagcagaacaccaagagccccctgttcatgggcaaggtggtgaaccccacccagaagtag

SEQ ID NO: 2155 - DNA, 1257 bp, synthetic construct; identical to SEQ ID NO: 2154
  misc_feature 1..1257: note = source = /note="Description of Artificial Sequence: Synthetic coding sequence"
  source 1..1257: mol_type = other DNA

SEQ ID NO: 2156 - DNA, 1257 bp, synthetic construct; identical to SEQ ID NO: 2154
  misc_feature 1..1257: note = source = /note="Description of Artificial Sequence: Synthetic coding sequence"
  source 1..1257: mol_type = other DNA

SEQ ID NO: 2157 - DNA, 1080 bp, synthetic construct
  misc_feature 1..1080: note = source = /note="Description of Artificial Sequence: Synthetic coding sequence"
  source 1..1080: mol_type = other DNA
atgcccagcagcgtgagctggggcatcctgctgctggccggcctgtgctgcctggtgcccgtgagcctggccgaggacccccagggcgacgccgcccagaagaccgacaccagccaccacgaccaggaccaccccaccttcaacaagatcacccccaacctggccgagttcgccttcagcctgtacagacagctggcccaccagagcaacagcaccaacatcttcttcagccccgtgagcatcgccaccgccttcgccatgctgagcctgggcaccaaggccgacacccacgacgagatcctggagggcctgaacttcaacctgaccgagatccccgaggcccagatccacgagggcttccaggagctgctgagaaccctgaaccagcccgacagccagctgcagctgaccaccggcaacggcctgttcctgagcgagggcctgaagctggtggacaagttcctggaggacgtgaagaagctgtaccacagcgaggccttcaccgtgaacttcggcgacaccgaggaggccaagaagcagatcaacgactacgtggagaagggcacccagggcaagatcgtggacctggtgaaggagctggacagagacaccgtgttcgccctggtgaactacatcttcttcaagggcaagtgggagagacccttcgaggtgaaggacaccgaggaggaggacttccacgtggaccaggtgaccaccgtgaaggtgcccatgatgaagagactgggcatgttcaacatccagcactgcaagaagctgagcagctgggtgctgctgatgaagtacctgggcaacgccaccgccatcttcttcctgcccgacgagggcaagctgcagcacctggagaacgagctgacccacgacatcatcaccaagttcctggagaacgaggacagaagaagcgccagcctgcacctgcccaagctgagcatcaccggcacctacgacctgaagagcgtgctgggccagctgggcatcaccaaggtgttcagcaacggcgccgacctgagcggcgtgaccgaggaggcccccctgaagctgagcaaggtgagaagcccctag

SEQ ID NO: 2158 - DNA, 1257 bp, synthetic construct; identical to SEQ ID NO: 2154
  misc_feature 1..1257: note = source = /note="Description of Artificial Sequence: Synthetic coding sequence"
  source 1..1257: mol_type = other DNA

SEQ ID NO: 2159 - DNA, 1257 bp, synthetic construct; identical to SEQ ID NO: 2154
  misc_feature 1..1257: note = source = /note="Description of Artificial Sequence: Synthetic coding sequence"
  source 1..1257: mol_type = other DNA

SEQ ID NO: 2160 - DNA, 1257 bp, synthetic construct; identical to SEQ ID NO: 2154
  misc_feature 1..1257: note = source = /note="Description of Artificial Sequence: Synthetic coding sequence"
  source 1..1257: mol_type = other DNA

SEQ ID NO: 2161 - DNA, 1257 bp, synthetic construct; identical to SEQ ID NO: 2154
  misc_feature 1..1257: note = source = /note="Description of Artificial Sequence: Synthetic coding sequence"
  source 1..1257: mol_type = other DNA

SEQ ID NO: 2162 - DNA, 1257 bp, synthetic construct; identical to SEQ ID NO: 2154
  misc_feature 1..1257: note = source = /note="Description of Artificial Sequence: Synthetic coding sequence"
  source 1..1257: mol_type = other DNA

SEQ ID NO: 2163 - DNA, 279 bp, synthetic construct
  misc_feature 1..279: note = source = /note="Description of Artificial Sequence: Synthetic coding sequence"
  source 1..279: mol_type = other DNA
atgcccagcagcgtgagctggggcatcctgctgctggccggcctgtgctgcctggtgcccgtgagcctggccgaggacccccagggcgacgccgcccagaagaccgacaccagccaccacgaccaggaccaccccaccttcaacaagatcacccccaacctggccgagttcgccttcagcctgtacagacagctggcccaccagagcaacagcaccaacatcttcttcagccccgtgagcatcgccaccgccttcgccatgctgagcctgggcacctag

SEQ ID NO: 2164 - DNA, 471 bp, synthetic construct
  misc_feature 1..471: note = source = /note="Description of Artificial Sequence: Synthetic coding sequence"
  source 1..471: mol_type = other DNA
atgcccagcagcgtgagctggggcatcctgctgctggccggcctgtgctgcctggtgcccgtgagcctggccgaggacccccagggcgacgccgcccagaagaccgacaccagccaccacgaccaggaccaccccaccttcaacaagatcacccccaacctggccgagttcgccttcagcctgtacagacagctggcccaccagagcaacagcaccaacatcttcttcagccccgtgagcatcgccaccgccttcgccatgctgagcctgggcaccaaggccgacacccacgacgagatcctggagggcctgaacttcaacctgaccgagatccccgaggcccagatccacgagggcttccaggagctgctgagaaccctgaaccagcccgacagccagctgcagctgaccaccggcaacggcctgttcctgagcgagggcctgaagctggtggacaagttcctggagtag

SEQ ID NO: 2165 - DNA, 354 bp, synthetic construct
  misc_feature 1..354: note = source = /note="Description of Artificial Sequence: Synthetic coding sequence"
  source 1..354: mol_type = other DNA
atgcccagcagcgtgagctggggcatcctgctgctggccggcctgtgctgcctggtgcccgtgagcctggccgaggacccccagggcgacgccgcccagaagaccgacaccagccaccacgaccaggaccaccccaccttcaacaagatcacccccaacctggccgagttcgccttcagcctgtacagacagctggcccaccagagcaacagcaccaacatcttcttcagccccgtgagcatcgccaccgccttcgccatgctgagcctgggcaccaaggccgacacccacgacgagatcctggagggcctgaacttcaacctgaccgagatccccgaggcccagatccactag

SEQ ID NO: 2166 - DNA, 69 bp, synthetic construct
  misc_feature 1..69: note = source = /note="Description of Artificial Sequence: Synthetic coding sequence"
  source 1..69: mol_type = other DNA
atgcccagcagcgtgagctggggcatcctgctgctggccggcctgtgctgcctggtgcccgtgagctag

SEQ ID NO: 2167 - DNA, 435 bp, synthetic construct
  misc_feature 1..435: note = source = /note="Description of Artificial Sequence: Synthetic coding sequence"
  source 1..435: mol_type = other DNA
atgcccagcagcgtgagctggggcatcctgctgctggccggcctgtgctgcctggtgcccgtgagcctggccgaggacccccagggcgacgccgcccagaagaccgacaccagccaccacgaccaggaccaccccaccttcaacaagatcacccccaacctggccgagttcgccttcagcctgtacagacagctggcccaccagagcaacagcaccaacatcttcttcagccccgtgagcatcgccaccgccttcgccatgctgagcctgggcaccaaggccgacacccacgacgagatcctggagggcctgaacttcaacctgaccgagatccccgaggcccagatccacgagggcttccaggagctgctgagaaccctgaaccagcccgacagccagctgcagctgaccaccggcaacggcctgttcctgtag

SEQ ID NO: 2168 - DNA, 780 bp, synthetic construct
  misc_feature 1..780: note = source = /note="Description of Artificial Sequence: Synthetic coding sequence"
  source 1..780: mol_type = other DNA
atgtacagcaacgtgatcggcaccgtgaccagcggcaagagaaaggtgtacctgctgagcctgctgctgatcggcttctgggactgcgtgacctgccacggcagccccgtggacatctgcaccgccaagcccagagacatccccatgaaccccatgtgcatctacagaagccccgagaagaaggccaccgaggacgagggcagcgagcagaagatccccgaggccaccaacagaagagtgtgggagctgagcaaggccaacagcagattcgccaccaccttctaccagcacctggccgacagcaagaacgacaacgacaacatcttcctgagccccctgagcatcagcaccgccttcgccatgaccaagctgggcgcctgcaacgacaccctgcagcagctgatggaggtgttcaagttcgacaccatcagcgagaagaccagcgaccagatccacttcttcttcgccaagctgaactgcagactgtacagaaaggccaacaagagcagcaagctggtgagcgccaacagactgttcggcgacaagagcctgaccttcaacgacctgtacgtgagcgacgccttccacaaggccttcctggaggtgaacgaggagggcagcgaggccgccgccagcaccgccgtggtgatcgccggcagaagcctgaaccccaacagagtgaccttcaaggccaacagacccttcctggtgttcatcagagaggtgcccctgaacaccatcatcttcatgggcagagtggccaacccctgcgtgaagtag

SEQ ID NO: 2169 - DNA, 1395 bp, synthetic construct
  misc_feature 1..1395: note = source = /note="Description of Artificial Sequence: Synthetic coding sequence"
  source 1..1395: mol_type = other DNA
atgtacagcaacgtgatcggcaccgtgaccagcggcaagagaaaggtgtacctgctgagcctgctgctgatcggcttctgggactgcgtgacctgccacggcagccccgtggacatctgcaccgccaagcccagagacatccccatgaaccccatgtgcatctacagaagccccgagaagaaggccaccgaggacgagggcagcgagcagaagatccccgaggccaccaacagaagagtgtgggagctgagcaaggccaacagcagattcgccaccaccttctaccagcacctggccgacagcaagaacgacaacgacaacatcttcctgagccccctgagcatcagcaccgccttcgccatgaccaagctgggcgcctgcaacgacaccctgcagcagctgatggaggtgttcaagttcgacaccatcagcgagaagaccagcgaccagatccacttcttcttcgccaagctgaactgcagactgtacagaaaggccaacaagagcagcaagctggtgagcgccaacagactgttcggcgacaagagcctgaccttcaacgagacctaccaggacatcagcgagctggtgtacggcgccaagctgcagcccctggacttcaaggagaacgccgagcagagcagagccgccatcaacaagtgggtgagcaacaagaccgagggcagaatcaccgacgtgatccccagcgaggccatcaacgagctgaccgtgctggtgctggtgaacaccatctacttcaagggcctgtggaagagcaagttcagccccgagaacaccagaaaggagctgttctacaaggccgacggcgagagctgcagcgccagcatgatgtaccaggagggcaagttcagatacagaagagtggccgagggcacccaggtgctggagctgcccttcaagggcgacgacatcaccatggtgctgatcctgcccaagcccgagaagagcctggccaaggtggagaaggagctgacccccgaggtgctgcaggagtggctggacgagctggaggagatgatgctggtggtgcacatgcccagattcagaatcgaggacggcttcagcctgaaggagcagctgcaggacatgggcctggtggacctgttcagccccgagaagagcaagctgcccggcatcgtggccgagggcagagacgacctgtacgtgagcgacgccttccacaaggccttcctggaggtgaacgaggagggcagcgaggccgccgccagcaccgccgtggtgatcgccggcagaagcctgaaccccaacagagtgaccttcaaggccaacagacccttcctggtgttcatcagagaggtgcccctgaacaccatcatcttcatgggcagagtggccaacccctgcgtgaagtag

SEQ ID NO: 2170 - DNA, 1476 bp, synthetic construct
  misc_feature 1..1476: note = source = /note="Description of Artificial Sequence: Synthetic coding sequence"
  source 1..1476: mol_type = other DNA
atggccctgctgtggggcctgctggtgctgagctggagctgcctgcagggcccctgcagcgtgttcagccccgtgagcgccatggagcccctgggcagacagctgaccagcggccccaaccaggagcaggtgagccccctgaccctgctgaagctgggcaaccaggagcccggcggccagaccgccctgaagagcccccccggcgtgtgcagcagagaccccacccccgagcagacccacagactggccagagccatgatggccttcaccgccgacctgttcagcctggtggcccagaccagcacctgccccaacctgatcctgagccccctgagcgtggccctggccctgagccacctggccctgggcgcccagaaccacaccctgcagagactgcagcaggtgctgcacgccggcagcggcccctgcctgccccacctgctgagcagactgtgccaggacctgggccccggcgccttcagactggccgccagaatgtacctgcagaagggcttccccatcaaggaggacttcctggagcagagcgagcagctgttcggcgccaagcccgtgagcctgaccggcaagcaggaggacgacctggccaacatcaaccagtgggtgaaggaggccaccgagggcaagatccaggagttcctgagcggcctgcccgaggacaccgtgctgctgctgctgaacgccatccacttccagggcttctggagaaacaagttcgaccccagcctgacccagagagacagcttccacctggacgagcagttcaccgtgcccgtggagatgatgcaggccagaacctaccccctgagatggttcctgctggagcagcccgagatccaggtggcccacttccccttcaagaacaacatgagcttcgtggtgctggtgcccacccacttcgagtggaacgtgagccaggtgctggccaacctgagctgggacaccctgcacccccccctggtgtgggagagacccaccaaggtgagactgcccaagctgtacctgaagcaccagatggacctggtggccaccctgagccagctgggcctgcaggagctgttccaggcccccgacctgagaggcatcagcgagcagagcctggtggtgagcggcgtgcagcaccagagcaccctggagctgagcgaggtgggcgtggaggccgccgccgccaccagcatcgccatgagcagaatgagcctgagcagcttcagcgtgaacagacccttcctgttcttcatcttcgaggacaccaccggcctgcccctgttcgtgggcagcgtgagaaaccccaaccccagcgcccccagagagctgaaggagcagcaggacagccccggcaacaaggacttcctgcagagcctgaagggcttccccagaggcgacaagctgttcggccccgacctgaagctggtgccccccatggaggaggactacccccagttcggcagccccaagtag

SEQ ID NO: 2171 - DNA, 1476 bp, synthetic construct; identical to SEQ ID NO: 2170
  misc_feature 1..1476: note = source = /note="Description of Artificial Sequence: Synthetic coding sequence"
  source 1..1476: mol_type = other DNA

SEQ ID NO: 2172 - DNA, 1284 bp, synthetic construct
  misc_feature 1..1284: note = source = /note="Description of Artificial Sequence: Synthetic coding sequence"
  source 1..1284: mol_type = other DNA
atggccctgctgtggggcctgctggtgctgagctggagctgcctgcagggcccctgcagcgtgttcagccccgtgagcgccatggagcccctgggcagacagctgaccagcggccccaaccaggagcaggtgagccccctgaccctgctgaagctgggcaaccaggtgcagcccggcgcccagaaccacaccctgcagagactgcagcaggtgctgcacgccggcagcggcccctgcctgccccacctgctgagcagactgtgccaggacctgggccccggcgccttcagactggccgccagaatgtacctgcagaagggcttccccatcaaggaggacttcctggagcagagcgagcagctgttcggcgccaagcccgtgagcctgaccggcaagcaggaggacgacctggccaacatcaaccagtgggtgaaggaggccaccgagggcaagatccaggagttcctgagcggcctgcccgaggacaccgtgctgctgctgctgaacgccatccacttccagggcttctggagaaacaagttcgaccccagcctgacccagagagacagcttccacctggacgagcagttcaccgtgcccgtggagatgatgcaggccagaacctaccccctgagatggttcctgctggagcagcccgagatccaggtggcccacttccccttcaagaacaacatgagcttcgtggtgctggtgcccacccacttcgagtggaacgtgagccaggtgctggccaacctgagctgggacaccctgcacccccccctggtgtgggagagacccaccaaggtgagactgcccaagctgtacctgaagcaccagatggacctggtggccaccctgagccagctgggcctgcaggagctgttccaggcccccgacctgagaggcatcagcgagcagagcctggtggtgagcggcgtgcagcaccagagcaccctggagctgagcgaggtgggcgtggaggccgccgccgccaccagcatcgccatgagcagaatgagcctgagcagcttcagcgtgaacagacccttcctgttcttcatcttcgaggacaccaccggcctgcccctgttcgtgggcagcgtgagaaaccccaaccccagcgcccccagagagctgaaggagcagcaggacagccccggcaacaaggacttcctgcagagcctgaagggcttccccagaggcgacaagctgttcggccccgacctgaagctggtgccccccatggaggaggactacccccagttcggcagccccaagtag

SEQ ID NO: 2173 - DNA, 768 bp, synthetic construct
  misc_feature 1..768: note = source = /note="Description of Artificial Sequence: Synthetic coding sequence"
  source 1..768: mol_type = other DNA
atggccctgctgtggggcctgctggtgctgagctggagctgcctgcagggcccctgcagcgtgttcagccccgtgagcgccatggagcccctgggcagacagctgaccagcggccccaaccaggagcaggtgagccccctgaccctgctgaagctgggcaaccaggagcccggcggccagaccgccctgaagagcccccccggcgtgtgcagcagagaccccacccccgagcagacccacagactggccagagccatgatggccttcaccgccgacctgttcagcctggtggcccagaccagcacctgccccaacctgatcctgagccccctgagcgtggccctggccctgagccacctggccctgggcgcccagaaccacaccctgcagagactgcagcaggtgctgcacgccggcagcggcccctgcctgccccacctgctgagcagactgtgccaggacctgggccccggcgccttcagactggccgccagaatgtacctgcagaagggcttccccatcaaggaggacttcctggagcagagcgagcagctgttcggcgccaagcccgtgagcctgaccggcaagcaggaggacgacctggccaacatcaaccagtgggtgaaggaggccaccgagggcaagatccaggagttcctgagcggcctgcccgaggacaccgtgctgctgctgctgaacgccatccacttccagggcttctggagaaacaagttcgaccccagcctgacccagagagacagcttctag

SEQ ID NO: 2174 - DNA, 1503 bp, synthetic construct
  misc_feature 1..1503: note = source = /note="Description of Artificial Sequence: Synthetic coding sequence"
  source 1..1503: mol_type = other DNA
atggccagcagactgaccctgctgaccctgctgctgctgctgctggccggcgacagagccagcagcaaccccaacgccaccagcagcagcagccaggaccccgagagcctgcaggacagaggcgagggcaaggtggccaccaccgtgatcagcaagatgctgttcgtggagcccatcctggaggtgagcagcctgcccaccaccaacagcaccaccaacagcgccaccaagatcaccgccaacaccaccgacgagcccaccacccagcccaccaccgagcccaccacccagcccaccatccagcccacccagcccaccacccagctgcccaccgacagccccacccagcccaccaccggcagcttctgccccggccccgtgaccctgtgcagcgacctggagagccacagcaccgaggccgtgctgggcgacgccctggtggacttcagcctgaagctgtaccacgccttcagcgccatgaagaaggtggagaccaacatggccttcagccccttcagcatcgccagcctgctgacccaggtgctgctgggcgccggcgagaacaccaagaccaacctggagagcatcctgagctaccccaaggacttcacctgcgtgcaccaggccctgaagggcttcaccaccaagggcgtgaccagcgtgagccagatcttccacagccccgacctggccatcagagacaccttcgtgaacgccagcagaaccctgtacagcagcagccccagagtgctgagcaacaacagcgacgccaacctggagctgatcaacacctgggtggccaagaacaccaacaacaagatcagcagactgctggacagcctgcccagcgacaccagactggtgctgctgaacgccatctacctgagcgccaagtggaagaccaccttcgaccccaagaagaccagaatggagcccttccacttcaagaacagcgtgatcaaggtgcccatgatgaacagcaagaagtaccccgtggcccacttcatcgaccagaccctgaaggccaaggtgggccagctgcagctgagccacaacctgagcctggtgatcctggtgccccagaacctgaagcacagactggaggacatggagcaggccctgagccccagcgtgttcaaggccatcatggagaagctggagatgagcaagttccagcccaccctgctgaccctgcccagaatcaaggtgaccaccagccaggacatgctgagcatcatggagaagctggagttcttcgacttcagctacgacctgaacctgtgcggcctgaccgaggaccccgacctgcaggtgagcgccatgcagcaccagaccgtgctggagctgaccgagaccggcgtggaggccgccgccgccagcgccatcagcgtggccagaaccctgctggtgttcgaggtgcagcagcccttcctgttcgtgctgtgggaccagcagcacaagttccccgtgttcatgggcagagtgtacgaccccagagcctag

SEQ ID NO: 2175 - DNA, 1518 bp, synthetic construct
  misc_feature 1..1518: note = source = /note="Description of Artificial Sequence: Synthetic coding sequence"
  source 1..1518: mol_type = other DNA
atggccagcagactgaccctgctgaccctgctgctgctgctgctggccggcttcctggagccccaggacagagccagcagcaaccccaacgccaccagcagcagcagccaggaccccgagagcctgcaggacagaggcgagggcaaggtggccaccaccgtgatcagcaagatgctgttcgtggagcccatcctggaggtgagcagcctgcccaccaccaacagcaccaccaacagcgccaccaagatcaccgccaacaccaccgacgagcccaccacccagcccaccaccgagcccaccacccagcccaccatccagcccacccagcccaccacccagctgcccaccgacagccccacccagcccaccaccggcagcttctgccccggccccgtgaccctgtgcagcgacctggagagccacagcaccgaggccgtgctgggcgacgccctggtggacttcagcctgaagctgtaccacgccttcagcgccatgaagaaggtggagaccaacatggccttcagccccttcagcatcgccagcctgctgacccaggtgctgctgggcgccggcgagaacaccaagaccaacctggagagcatcctgagctaccccaaggacttcacctgcgtgcaccaggccctgaagggcttcaccaccaagggcgtgaccagcgtgagccagatcttccacagccccgacctggccatcagagacaccttcgtgaacgccagcagaaccctgtacagcagcagccccagagtgctgagcaacaacagcgacgccaacctggagctgatcaacacctgggtggccaagaacaccaacaacaagatcagcagactgctggacagcctgcccagcgacaccagactggtgctgctgaacgccatctacctgagcgccaagtggaagaccaccttcgaccccaagaagaccagaatggagcccttccacttcaagaacagcgtgatcaaggtgcccatgatgaacagcaagaagtaccccgtggcccacttcatcgaccagaccctgaaggccaaggtgggccagctgcagctgagccacaacctgagcctggtgatcctggtgccccagaacctgaagcacagactggaggacatggagcaggccctgagccccagcgtgttcaaggccatcatggagaagctggagatgagcaagttccagcccaccctgctgaccctgcccagaatcaaggtgaccaccagccaggacatgctgagcatcatggagaagctggagttcttcgacttcagctacgacctgaacctgtgcggcctgaccgaggaccccgacctgcaggtgagcgccatgcagcaccagaccgtgctggagctgaccgagaccggcgtggaggccgccgccgccagcgccatcagcgtggccagaaccctgctggtgttcgaggtgcagcagcccttcctgttcgtgctgtgggaccagcagcacaagttccccgtgttcatgggcagagtgtacgaccccagagcctag

SEQ ID NO: 2176 - DNA, 1347 bp, synthetic construct
  misc_feature 1..1347: note = source = /note="Description of Artificial Sequence: Synthetic coding sequence"
  source 1..1347: mol_type = other DNA
atgctgttcgtggagcccatcctggaggtgagcagcctgcccaccaccaacagcaccaccaacagcgccaccaagatcaccgccaacaccaccgacgagcccaccacccagcccaccaccgagcccaccacccagcccaccatccagcccacccagcccaccacccagctgcccaccgacagccccacccagcccaccaccggcagcttctgccccggccccgtgaccctgtgcagcgacctggagagccacagcaccgaggccgtgctgggcgacgccctggtggacttcagcctgaagctgtaccacgccttcagcgccatgaagaaggtggagaccaacatggccttcagccccttcagcatcgccagcctgctgacccaggtgctgctgggcgccggcgagaacaccaagaccaacctggagagcatcctgagctaccccaaggacttcacctgcgtgcaccaggccctgaagggcttcaccaccaagggcgtgaccagcgtgagccagatcttccacagccccgacctggccatcagagacaccttcgtgaacgccagcagaaccctgtacagcagcagccccagagtgctgagcaacaacagcgacgccaacctggagctgatcaacacctgggtggccaagaacaccaacaacaagatcagcagactgctggacagcctgcccagcgacaccagactggtgctgctgaacgccatctacctgagcgccaagtggaagaccaccttcgaccccaagaagaccagaatggagcccttccacttcaagaacagcgtgatcaaggtgcccatgatgaacagcaagaagtaccccgtggcccacttcatcgaccagaccctgaaggccaaggtgggccagctgcagctgagccacaacctgagcctggtgatcctggtgccccagaacctgaagcacagactggaggacatggagcaggccctgagccccagcgtgttcaaggccatcatggagaagctggagatgagcaagttccagcccaccctgctgaccctgcccagaatcaaggtgaccaccagccaggacatgctgagcatcatggagaagctggagttcttcgacttcagctacgacctgaacctgtgcggcctgaccgaggaccccgacctgcaggtgagcgccatgcagcaccagaccgtgctggagctgaccgagaccggcgtggaggccgccgccgccagcgccatcagcgtggccagaaccctgctggtgttcgaggtgcagcagcccttcctgttcgtgctgtgggaccagcagcacaagttccccgtgttcatgggcagagtgtacgaccccagagcctag

SEQ ID NO: 2177 - DNA, 483 bp, synthetic construct
  misc_feature 1..483: note = source = /note="Description of Artificial Sequence: Synthetic coding sequence"
  source 1..483: mol_type = other DNA
atggccagcagactgaccctgctgaccctgctgctgctgctgctggccggcgacagagccagcagcaaccccaacgccaccagcagcagcagccaggaccccgagagcctgcaggacagaggcgagggcaaggtggccaccaccgtgatcagcaagatgctgttcgtggagcccatcctggaggtgagcagcctgcccaccaccaacagcaccaccaacagcgccaccaagatcaccgccaacaccaccgacgagcccaccacccagcccaccaccgagcccaccacccagcccaccatccagcccacccagcccaccacccagctgcccaccgacagccccacccagcccaccaccggcagcttctgccccggccccgtgaccctgtgcagcgacctggagagccacagcaccgaggccgtgctgggcgacgccctggtggacttcagcctgaagctgtaccacgccttcagcgccatgtag

SEQ ID NO: 2178 - DNA, 402 bp, synthetic construct
  misc_feature 1..402: note = source = /note="Description of Artificial Sequence: Synthetic coding sequence"
  source 1..402: mol_type = other DNA
atggccagcagactgaccctgctgaccctgctgctgctgctgctggccggcgacagagccagcagcaaccccaacgccaccagcagcagcagccaggaccccgagagcctgcaggacagaggcgagggcaaggtggccaccaccgtgatcagcaagatgctgttcgtggagcccatcctggaggtgagcagcctgcccaccaccaacagcaccaccaacagcgccaccaagatcaccgccaacaccaccgacgagcccaccacccagcccaccaccgagcccaccacccagcccaccatccagcccacccagcccaccacccagctgcccaccgacagccccacccagcccggctacgccctgaaccacggcgagatcggcatcctgagattcttcctgtag

SEQ ID NO: 2179 - DNA, 3405 bp, synthetic construct
  misc_feature 1..3405: note = source = /note="Description of Artificial Sequence: Synthetic coding sequence"
  source 1..3405: mol_type = other DNA
atgcccgtgttccacaccagaaccatcgagagcatcctggagcccgtggcccagcagatcagccacctggtgatcatgcacgaggagggcgaggtggacggcaaggccatccccgacctgaccgcccccgtggccgccgtgcaggccgccgtgagcaacctggtgagagtgggcaaggagaccgtgcagaccaccgaggaccagatcctgaagagagacatgccccccgccttcatcaaggtggagaacgcctgcaccaagctggtgcaggccgcccagatgctgcagagcgacccctacagcgtgcccgccagagactacctgatcgacggcagcagaggcatcctgagcggcaccagcgacctgctgctgaccttcgacgaggccgaggtgagaaagatcatcagagtgtgcaagggcatcctggagtacctgaccgtggccgaggtggtggagaccatggaggacctggtgacctacaccaagaacctgggccccggcatgaccaagatggccaagatgatcgacgagagacagcaggagctgacccaccaggagcacagagtgatgctggtgaacagcatgaacaccgtgaaggagctgctgcccgtgctgatcagcgccatgaagatcttcgtgaccaccaagaacagcaagaaccagggcatcgaggaggccctgaagaacagaaacttcaccgtggagaagatgagcgccgagatcaacgagatcatcagagtgctgcagctgaccagctgggacgaggacgcctgggccagcaaggacaccgaggccatgaagagagccctggccagcatcgacagcaagctgaaccaggccaagggctggctgagagaccccagcgccagccccggcgacgccggcgagcaggccatcagacagatcctggacgaggccggcaaggtgggcgagctgtgcgccggcaaggagagaagagagatcctgggcacctgcaagatgctgggccagatgaccgaccaggtggccgacctgagagccagaggccagggcagcagccccgtggccatgcagaaggcccagcaggtgagccagggcctggacgtgctgaccgccaaggtggagaacgccgccagaaagctggaggccatgaccaacagcaagcagagcatcgccaagaagatcgacgccgcccagaactggctggccgaccccaacggcggccccgagggcgaggagcagatcagaggcgccctggccgaggccagaaagatcgccgagctgtgcgacgaccccaaggagagagacgacatcctgagaagcctgggcgagatcagcgccctgaccagcaagctggccgacctgagaagacagggcaagggcgacagccccgaggccagagccctggccaagcaggtggccaccgccctgcagaacctgcagaccaagaccaacagagccgtggccaacagcagacccgccaaggccgccgtgcacctggagggcaagatcgagcaggcccagagatggatcgacaaccccaccgtggacgacagaggcgtgggccaggccgccatcagaggcctggtggccgagggccacagactggccaacgtgatgatgggcccctacagacaggacctgctggccaagtgcgacagagtggaccagctgaccgcccagctggccgacctggccgccagaggcgagggcgagagcccccaggccagagccctggccagccagctgcaggacagcctgaaggacctgaaggccagaatgcaggaggccatgacccaggaggtgagcgacgtgttcagcgacaccaccacccccatcaagctgctggccgtggccgccaccgccccccccgacgcccccaacagagaggaggtgttcgacgagagagccgccaacttcgagaaccacagcggcaagctgggcgccaccgccgagaaggccgccgccgtgggcaccgccaacaagagcaccgtggagggcatccaggccagcgtgaagaccgccagagagctgaccccccaggtggtgagcgccgccagaatcctgctgagaaaccccggcaaccaggccgcctacgagcacttcgagaccatgaagaaccagtggatcgacaacgtggagaagatgaccggcctggtggacgaggccatcgacaccaagagcctgctggacgccagcgaggaggccatcaagaaggacctggacaagtgcaaggtggccatggccaacatccagccccagatgctggtggccggcgccaccagcatcgccagaagagccaacagaatcctgctggtggccaagagagaggtggagaacagcgaggaccccaagttcagagaggccgtgaaggccgccagcgacgagctgagcaagaccatcagccccatggtgatggacgccaaggccgtggccggcaacatcagcgaccccggcctgcagaagagcttcctggacagcggctacagaatcctgggcgccgtggccaaggtgagagaggccttccagccccaggagcccgacttccccccccccccccccgacctggagcagctgagactgaccgacgagctggccccccccaagccccccctgcccgagggcgaggtgcccccccccagaccccccccccccgaggagaaggacgaggagttccccgagcagaaggccggcgaggtgatcaaccagcccatgatgatggccgccagacagctgcacgacgaggccagaaagtggagcagcaagcccggcatccccgccgccgaggtgggcatcggcgtggtggccgaggccgacgccgccgacgccgccggcttccccgtgccccccgacatggaggacgactacgagcccgagctgctgctgatgcccagcaaccagcccgtgaaccagcccatcctggccgccgcccagagcctgcacagagaggccaccaagtggagcagcaagggcaacgacatcatcgccgccgccaagagaatggccctgctgatggccgagatgagcagactggtgagaggcggcagcggcaccaagagagccctgatccagtgcgccaaggacatcgccaaggccagcgacgaggtgaccagactggccaaggaggtggccaagcagtgcaccgacaagagaatcagaaccaacctgctgcaggtgtgcgagagaatccccaccatcagcacccagctgaagatcctgagcaccgtgaaggccaccatgctgggcagaaccaacatcagcgacgaggagagcgagcaggccaccgagatgctggtgcacaacgcccagaacctgatgcagagcgtgaaggagaccgtgagagaggccgaggccgccagcatcaagatcagaaccgacgccggcttcaccctgagatgggtgagaaagaccccctggtaccagtag

SEQ ID NO: 2180 - DNA, 1335 bp, synthetic construct
  misc_feature 1..1335: note = source = /note="Description of Artificial Sequence: Synthetic coding sequence"
  source 1..1335: mol_type = other DNA
atgtgcctgtgcagcggcagaaagaccatcctggagatctaccccggccagttccagcccagcctgtgccacaagttcatcgccctgagcgacaaggagggcaagctgctgagaaactacacccagaacatcgacaccctggagcaggtggccggcatccagagaatcatccagtgccacggcagcttcgccaccgccagctgcctgatctgcaagtacaaggtggactgcgaggccgtgagaggcgacatcttcaaccaggtggtgcccagatgccccagatgccccgccgacgagcccctggccatcatgaagcccgagatcgtgttcttcggcgagaacctgcccgagcagttccacagagccatgaagtacgacaaggacgaggtggacctgctgatcgtgatcggcagcagcctgaaggtgagacccgtggccctgatccccagcagcatcccccacgaggtgccccagatcctgatcaacagagagcccctgccccacctgcacttcgacgtggagctgctgggcgactgcgacgtgatcatcaacgagctgtgccacagactgggcggcgagtacgccaagctgtgctgcaaccccgtgaagctgagcgagatcaccgagaagccccccagaacccagaaggagctggcctacctgagcgagctgccccccacccccctgcacgtgagcgaggacagcagcagccccgagagaaccagcccccccgacagcagcgtgatcgtgaccctgctggaccaggccgccaagagcaacgacgacctggacgtgagcgagagcaagggctgcatggaggagaagccccaggaggtgcagaccagcagaaacgtggagagcatcgccgagcagatggagaaccccgacctgaagaacgtgggcagcagcaccggcgagaagaacgagagaaccagcgtggccggcaccgtgagaaagtgctggcccaacagagtggccaaggagcagatcagcagaagactggacggcaaccagtacctgttcctgccccccaacagatacatcttccacggcgccgaggtgtacagcgacagcgaggacgacgtgctgagcagcagcagctgcggcagcaacagcgacagcggcacctgccagagccccagcctggaggagcccatggaggacgagagcgagatcgaggagttctacaacggcctggaggacgagcccgacgtgcccgagagagccggcggcgccggcttcggcaccgacggcgacgaccaggaggccatcaacgaggccatcagcgtgaagcaggaggtgaccgacatgaactaccccagcaacaagagctag

SEQ ID NO: 2181 - DNA, 1335 bp, synthetic construct; identical to SEQ ID NO: 2180
  misc_feature 1..1335: note = source = /note="Description of Artificial Sequence: Synthetic coding sequence"
  source 1..1335: mol_type = other DNA

SEQ ID NO: 2182 - DNA, 1359 bp, synthetic construct
  misc_feature 1..1359: note = source = /note="Description of Artificial Sequence: Synthetic coding sequence"
  source 1..1359: mol_type = other DNA
atgttcgacatcgagtacttcagaaaggaccccagacccttcttcaagttcgccaaggagatctaccccggccagttccagcccagcctgtgccacaagttcatcgccctgagcgacaaggagggcaagctgctgagaaactacacccagaacatcgacaccctggagcaggtggccggcatccagagaatcatccagtgccacggcagcttcgccaccgccagctgcctgatctgcaagtacaaggtggactgcgaggccgtgagaggcgacatcttcaaccaggtggtgcccagatgccccagatgccccgccgacgagcccctggccatcatgaagcccgagatcgtgttcttcggcgagaacctgcccgagcagttccacagagccatgaagtacgacaaggacgaggtggacctgctgatcgtgatcggcagcagcctgaaggtgagacccgtggccctgatccccagcagcatcccccacgaggtgccccagatcctgatcaacagagagcccctgccccacctgcacttcgacgtggagctgctgggcgactgcgacgtgatcatcaacgagctgtgccacagactgggcggcgagtacgccaagctgtgctgcaaccccgtgaagctgagcgagatcaccgagaagccccccagaacccagaaggagctggcctacctgagcgagctgccccccacccccctgcacgtgagcgaggacagcagcagccccgagagaaccagcccccccgacagcagcgtgatcgtgaccctgctggaccaggccgccaagagcaacgacgacctggacgtgagcgagagcaagggctgcatggaggagaagccccaggaggtgcagaccagcagaaacgtggagagcatcgccgagcagatggagaaccccgacctgaagaacgtgggcagcagcaccggcgagaagaacgagagaaccagcgtggccggcaccgtgagaaagtgctggcccaacagagtggccaaggagcagatcagcagaagactggacggcaaccagtacctgttcctgccccccaacagatacatcttccacggcgccgaggtgtacagcgacagcgaggacgacgtgctgagcagcagcagctgcggcagcaacagcgacagcggcacctgccagagccccagcctggaggagcccatggaggacgagagcgagatcgaggagttctacaacggcctggaggacgagcccgacgtgcccgagagagccggcggcgccggcttcggcaccgacggcgacgaccaggaggccatcaacgaggccatcagcgtgaagcaggaggtgaccgacatgaactaccccagcaacaagagctag

SEQ ID NO: 2183 - DNA, 987 bp, synthetic construct
  misc_feature 1..987: note = source = /note="Description of Artificial Sequence: Synthetic coding sequence"
  source 1..987: mol_type = other DNA
atgagcgtgaactacgccgccggcctgagcccctacgccgacaagggcaagtgcggcctgcccgagatcttcgacccccccgaggagctggagagaaaggtgtgggagctggccagactggtgtggcagagcagcagcgtggtgttccacaccggcgccggcatcagcaccgccagcggcatccccgacttcagaggcccccacggcgtgtggaccatggaggagagaggcctggcccccaagttcgacaccaccttcgagagcgccagacccacccagacccacatggccctggtgcagctggagagagtgggcctgctgagattcctggtgagccagaacgtggacggcctgcacgtgagaagcggcttccccagagacaagctggccgagctgcacggcaacatgttcgtggaggagtgcgccaagtgcaagacccagtacgtgagagacaccgtggtgggcaccatgggcctgaaggccaccggcagactgtgcaccgtggccaaggccagaggcctgagagcctgcagaaacgccgacctgagcatcaccctgggcaccagcctgcagatcagacccagcggcaacctgcccctggccaccaagagaagaggcggcagactggtgatcgtgaacctgcagcccaccaagcacgacagacacgccgacctgagaatccacggctacgtggacgaggtgatgaccagactgatgaagcacctgggcctggagatccccgcctgggacggccccagagtgctggagagagccctgccccccctgcccagaccccccacccccaagctggagcccaaggaggagagccccaccagaatcaacggcagcatccccgccggccccaagcaggagccctgcgcccagcacaacggcagcgagcccgccagccccaagagagagagacccaccagccccgccccccacagaccccccaagagagtgaaggccaaggccgtgcccagctag

SEQ ID NO: 2184 - DNA, 1068 bp, synthetic construct
  misc_feature 1..1068: note = source = /note="Description of Artificial Sequence: Synthetic coding sequence"
  source 1..1068: mol_type = other DNA
atgagcgtgaactacgccgccggcctgagcccctacgccgacaagggcaagtgcggcctgcccgagatcttcgacccccccgaggagctggagagaaaggtgtgggagctggccagactggtgtggcagagcagcagcgtggtgttccacaccggcgccggcatcagcaccgccagcggcatccccgacttcagaggcccccacggcgtgtggaccatggaggagagaggcctggcccccaagttcgacaccaccttcgagagcgccagacccacccagacccacatggccctggtgcagctggagagagtgggcctgctgagattcctggtgagccagaacgtggacggcctgcacgtgagaagcggcttccccagagacaagctggccgagctgcacggcaacatgttcgtggaggagtgcgccaagtgcaagacccagtacgtgagagacaccgtggtgggcaccatgggcctgaaggccaccggcagactgtgcaccgtggccaaggccagaggcctgagagcctgcagaggcgagctgagagacaccatcctggactgggaggacagcctgcccgacagagacctggccctggccgacgaggccagcagaaacgccgacctgagcatcaccctgggcaccagcctgcagatcagacccagcggcaacctgcccctggccaccaagagaagaggcggcagactggtgatcgtgaacctgcagcccaccaagcacgacagacacgccgacctgagaatccacggctacgtggacgaggtgatgaccagactgatgaagcacctgggcctggagatccccgcctgggacggccccagagtgctggagagagccctgccccccctgcccagaccccccacccccaagctggagcccaaggaggagagccccaccagaatcaacggcagcatccccgccggccccaagcaggagccctgcgcccagcacaacggcagcgagcccgccagccccaagagagagagacccaccagccccgccccccacagaccccccaagagagtgaaggccaaggccgtgcccagctag

SEQ ID NO: 2185 - DNA, 852 bp, synthetic construct
  misc_feature 1..852: note = source = /note="Description of Artificial Sequence: Synthetic coding sequence"
  source 1..852: mol_type = other DNA
atggaggagagaggcctggcccccaagttcgacaccaccttcgagagcgccagacccacccagacccacatggccctggtgcagctggagagagtgggcctgctgagattcctggtgagccagaacgtggacggcctgcacgtgagaagcggcttccccagagacaagctggccgagctgcacggcaacatgttcgtggaggagtgcgccaagtgcaagacccagtacgtgagagacaccgtggtgggcaccatgggcctgaaggccaccggcagactgtgcaccgtggccaaggccagaggcctgagagcctgcagaggcgagctgagagacaccatcctggactgggaggacagcctgcccgacagagacctggccctggccgacgaggccagcagaaacgccgacctgagcatcaccctgggcaccagcctgcagatcagacccagcggcaacctgcccctggccaccaagagaagaggcggcagactggtgatcgtgaacctgcagcccaccaagcacgacagacacgccgacctgagaatccacggctacgtggacgaggtgatgaccagactgatgaagcacctgggcctggagatccccgcctgggacggccccagagtgctggagagagccctgccccccctgcccagaccccccacccccaagctggagcccaaggaggagagccccaccagaatcaacggcagcatccccgccggccccaagcaggagccctgcgcccagcacaacggcagcgagcccgccagccccaagagagagagacccaccagccccgccccccacagaccccccaagagagtgaaggccaaggccgtgcccagctag

SEQ ID NO: 2186 - DNA, 1575 bp, synthetic construct
  misc_feature 1..1575: note = source = /note="Description of Artificial Sequence: Synthetic coding sequence"
  source 1..1575: mol_type = other DNA
atgaccgaggacaaggtgaccggcaccctggtgttcaccgtgatcaccgccgtgctgggcagcttccagttcggctacgacatcggcgtgatcaacgccccccagcaggtgatcatcagccactacagacacgtgctgggcgtgcccctggacgacagaaaggccatcaacaactacgtgatcaacagcaccgacgagctgcccaccatcagctacagcatgaaccccaagcccaccccctgggccgaggaggagaccgtggccgccgcccagctgatcaccatgctgtggagcctgagcgtgagcagcttcgccgtgggcggcatgaccgccagcttcttcggcggctggctgggcgacaccctgggcagaatcaaggccatgctggtggccaacatcctgagcctggtgggcgccctgctgatgggcttcagcaagctgggccccagccacatcctgatcatcgccggcagaagcatcagcggcctgtactgcggcctgatcagcggcctggtgcccatgtacatcggcgagatcgcccccaccgccctgagaggcgccctgggcaccttccaccagctggccatcgtgaccggcatcctgatcagccagatcatcggcctggagttcatcctgggcaactacgacctgtggcacatcctgctgggcctgagcggcgtgagagccatcctgcagagcctgctgctgttcttctgccccgagagccccagatacctgtacatcaagctggacgaggaggtgaaggccaagcagagcctgaagagactgagaggctacgacgacgtgaccaaggacatcaacgagatgagaaaggagagagaggaggccagcagcgagcagaaggtgagcatcatccagctgttcaccaacagcagctacagacagcccatcctggtggccctgatgctgcacgtggcccagcagttcagcggcatcaacggcatcttctactacagcaccagcatcttccagaccgccggcatcagcaagcccgtgtacgccaccatcggcgtgggcgccgtgaacatggtgttcaccgccgtgagcgtgttcctggtggagaaggccggcagaagaagcctgttcctgatcggcatgagcggcatgttcgtgtgcgccatcttcatgagcgtgggcctggtgctgctgaacaagttcagctggatgagctacgtgagcatgatcgccatcttcctgttcgtgagcttcttcgagatcggccccggccccatcccctggttcatggtggccgagttcttcagccagggccccagacccgccgccctggccatcgccgccttcagcaactggacctgcaacttcatcgtggccctgtgcttccagtacatcgccgacttctgcggcccctacgtgttcttcctgttcgccggcgtgctgctggccttcaccctgttcaccttcttcaaggtgcccgagaccaagggcaagagcttcgaggagatcgccgccgagttccagaagaagagcggcagcgcccacagacccaaggccgccgtggagatgaagttcctgggcgccaccgagaccgtgtag

SEQ ID NO: 2187 - DNA, 1218 bp, synthetic construct
  misc_feature 1..1218: note = source = /note="Description of Artificial Sequence: Synthetic coding sequence"
  source 1..1218: mol_type = other DNA
atgcacctgaacagaatcaaggccatgctggtggccaacatcctgagcctggtgggcgccctgctgatgggcttcagcaagctgggccccagccacatcctgatcatcgccggcagaagcatcagcggcctgtactgcggcctgatcagcggcctggtgcccatgtacatcggcgagatcgcccccaccgccctgagaggcgccctgggcaccttccaccagctggccatcgtgaccggcatcctgatcagccagatcatcggcctggagttcatcctgggcaactacgacctgtggcacatcctgctgggcctgagcggcgtgagagccatcctgcagagcctgctgctgttcttctgccccgagagccccagatacctgtacatcaagctggacgaggaggtgaaggccaagcagagcctgaagagactgagaggctacgacgacgtgaccaaggacatcaacgagatgagaaaggagagagaggaggccagcagcgagcagaaggtgagcatcatccagctgttcaccaacagcagctacagacagcccatcctggtggccctgatgctgcacgtggcccagcagttcagcggcatcaacggcatcttctactacagcaccagcatcttccagaccgccggcatcagcaagcccgtgtacgccaccatcggcgtgggcgccgtgaacatggtgttcaccgccgtgagcgtgttcctggtggagaaggccggcagaagaagcctgttcctgatcggcatgagcggcatgttcgtgtgcgccatcttcatgagcgtgggcctggtgctgctgaacaagttcagctggatgagctacgtgagcatgatcgccatcttcctgttcgtgagcttcttcgagatcggccccggccccatcccctggttcatggtggccgagttcttcagccagggccccagacccgccgccctggccatcgccgccttcagcaactggacctgcaacttcatcgtggccctgtgcttccagtacatcgccgacttctgcggcccctacgtgttcttcctgttcgccggcgtgctgctggccttcaccctgttcaccttcttcaaggtgcccgagaccaagggcaagagcttcgaggagatcgccgccgagttccagaagaagagcggcagcgcccacagacccaaggccgccgtggagatgaagttcctgggcgccaccgagaccgtgtag

SEQ ID NO: 2188 - DNA, 1290 bp, synthetic construct
  misc_feature 1..1290: note = source = /note="Description of Artificial Sequence: Synthetic coding sequence"
  source 1..1290: mol_type = other DNA
atggccgcccagggctacggctactacagaaccgtgatcttcagcgccatgttcggcggctacagcctgtactacttcaacagaaagaccttcagcttcgtgatgcccagcctggtggaggagatccccctggacaaggacgacctgggcttcatcaccagcagccagagcgccgcctacgccatcagcaagttcgtgagcggcgtgctgagcgaccagatgagcgccagatggctgttcagcagcggcctgctgctggtgggcctggtgaacatcttcttcgcctggagcagcaccgtgcccgtgttcgccgccctgtggttcctgaacggcctggcccagggcctgggctggcccccctgcggcaaggtgctgagaaagtggttcgagcccagccagttcggcacctggtgggccatcctgagcaccagcatgaacctggccggcggcctgggccccatcctggccaccatcctggcccagagctacagctggagaagcaccctggccctgagcggcgccctgtgcgtggtggtgagcttcctgtgcctgctgctgatccacaacgagcccgccgacgtgggcctgagaaacctggaccccatgcccagcgagggcaagaagggcagcctgaaggaggagagcaccctgcaggagctgctgctgagcccctacctgtgggtgctgagcaccggctacctggtggtgttcggcgtgaagacctgctgcaccgactggggccagttcttcctgatccaggagaagggccagagcgccctggtgggcagcagctacatgagcgccctggaggtgggcggcctggtgggcagcatcgccgccggctacctgagcgacagagccatggccaaggccggcctgagcaactacggcaaccccagacacggcctgctgctgttcatgatggccggcatgaccgtgagcatgtacctgttcagagtgaccgtgaccagcgacagccccaagctgtggatcctggtgctgggcgccgtgttcggcttcagcagctacggccccatcgccctgttcggcgtgatcgccaacgagagcgccccccccaacctgtgcggcaccagccacgccatcgtgggcctgatggccaacgtgggcggcttcctggccggcctgcccttcagcaccatcgccaagcactacagctggagcaccgccttctgggtggccgaggtgatctgcgccgccagcaccgccgccttcttcctgctgagaaacatcagaaccaagatgggcagagtgagcaagaaggccgagtag

SEQ ID NO: 2189 - DNA, 1356 bp, synthetic construct
  misc_feature 1..1356: note = source = /note="Description of Artificial Sequence: Synthetic coding sequence"
  source 1..1356: mol_type = other DNA
atggccgcccagggctacggctactacagaaccgtgatcttcagcgccatgttcggcggctacagcctgtactacttcaacagaaagaccttcagcttcgtgatgcccagcctggtggaggagatccccctggacaaggacgacctgggcttcatcaccagcagccagagcgccgcctacgccatcagcaagttcgtgagcggcgtgctgagcgaccagatgagcgccagatggctgttcagcagcggcctgctgctggtgggcctggtgaacatcttcttcgcctggagcagcaccgtgcccgtgttcgccgccctgtggttcctgaacggcctggcccagggcctgggctggcccccctgcggcaaggtgctgagaaagtggttcgagcccagccagttcggcacctggtgggccatcctgagcaccagcatgaacctggccggcggcctgggccccatcctggccaccatcctggcccagagctacagctggagaagcaccctggccctgagcggcgccctgtgcgtggtggtgagcttcctgtgcctgctgctgatccacaacgagcccgccgacgtgggcctgagaaacctggaccccatgcccagcgagggcaagaagggcagcctgaaggaggagagcaccctgcaggagctgctgctgagcccctacctgtgggtgctgagcaccggctacctggtggtgttcggcgtgaagacctgctgcaccgactggggccagttcttcctgatccaggagaagggccagagcgccctggtgggcagcagctacatgagcgccctggaggtgggcggcctggtgggcagcatcgccgccggctacctgagcgacagagccatggccaaggccggcctgagcaactacggcaaccccagacacggcctgctgctgttcatgatggccggcatgaccgtgagcatgtacctgttcagagtgaccgtgaccagcgacagccccaaggacgtggccttctggaccctggccctgcaccccctggccgagctgaccggcttcaccgagcacgagctgtggatcctggtgctgggcgccgtgttcggcttcagcagctacggccccatcgccctgttcggcgtgatcgccaacgagagcgccccccccaacctgtgcggcaccagccacgccatcgtgggcctgatggccaacgtgggcggcttcctggccggcctgcccttcagcaccatcgccaagcactacagctggagcaccgccttctgggtggccgaggtgatctgcgccgccagcaccgccgccttcttcctgctgagaaacatcagaaccaagatgggcagagtgagcaagaaggccgagtag

SEQ ID NO: 2190 - DNA, 1716 bp, synthetic construct
  misc_feature 1..1716: note = source = /note="Description of Artificial Sequence: Synthetic coding sequence"
  source 1..1716: mol_type = other DNA
atgaccagagccggcgaccacaacagacagagaggctgctgcggcagcctggccgactacctgaccagcgccaagttcctgctgtacctgggccacagcctgagcacctggggcgacagaatgtggcacttcgccgtgagcgtgttcctggtggagctgtacggcaacagcctgctgctgaccgccgtgtacggcctggtggtggccggcagcgtgctggtgctgggcgccatcatcggcgactgggtggacaagaacgccagactgaaggtggcccagaccagcctggtggtgcagaacgtgagcgtgatcctgtgcggcatcatcctgatgatggtgttcctgcacaagcacgagctgctgaccatgtaccacggctgggtgctgaccagctgctacatcctgatcatcaccatcgccaacatcgccaacctggccagcaccgccaccgccatcaccatccagagagactggatcgtggtggtggccggcgaggacagaagcaagctggccaacatgaacgccaccatcagaagaatcgaccagctgaccaacatcctggcccccatggccgtgggccagatcatgaccttcggcagccccgtgatcggctgcggcttcatcagcggctggaacctggtgagcatgtgcgtggagtacgtgctgctgtggaaggtgtaccagaagacccccgccctggccgtgaaggccggcctgaaggaggaggagaccgagctgaagcagctgaacctgcacaaggacaccgagcccaagcccctggagggcacccacctgatgggcgtgaaggacagcaacatccacgagctggagcacgagcaggagcccacctgcgccagccagatggccgagcccttcagaaccttcagagacggctgggtgagctactacaaccagcccgtgttcctggccggcatgggcctggccttcctgtacatgaccgtgctgggcttcgactgcatcaccaccggctacgcctacacccagggcctgagcggcagcatcctgagcatcctgatgggcgccagcgccatcaccggcatcatgggcaccgtggccttcacctggctgagaagaaagtgcggcctggtgagaaccggcctgatcagcggcctggcccagctgagctgcctgatcctgtgcgtgatcagcgtgttcatgcccggcagccccctggacctgagcgtgagccccttcgaggacatcagaagcagattcatccagggcgagagcatcacccccaccaagatccccgagatcaccaccgagatctacatgagcaacggcagcaacagcgccaacatcgtgcccgagaccagccccgagagcgtgcccatcatcagcgtgagcctgctgttcgccggcgtgatcgccgccagaatcggcctgtggagcttcgacctgaccgtgacccagctgctgcaggagaacgtgatcgagagcgagagaggcatcatcaacggcgtgcagaacagcatgaactacctgctggacctgctgcacttcatcatggtgatcctggcccccaaccccgaggccttcggcctgctggtgctgatcagcgtgagcttcgtggccatgggccacatcatgtacttcagattcgcccagaacaccctgggcaacaagctgttcgcctgcggccccgacgccaaggaggtgagaaaggagaaccaggccaacaccagcgtggtgtag

SEQ ID NO: 2191 - DNA, 603 bp, synthetic construct
  misc_feature 1..603: note = source = /note="Description of Artificial Sequence: Synthetic coding sequence"
  source 1..603: mol_type = other DNA
atgaccagagccggcgaccacaacagacagagaggctgctgcggcagcctggccgactacctgaccagcgccaagttcctgctgtacctgggccacagcctgagcacctggggcgacagaatgtggcacttcgccgtgagcgtgttcctggtggagctgtacggcaacagcctgctgctgaccgccgtgtacggcctggtggtggccggcagcgtgctggtgctgggcgccatcatcggcgactgggtggacaagaacgccagactgaaggtggcccagaccagcctggtggtgcagaacgtgagcgtgatcctgtgcggcatcatcctgatgatggtgttcctgcacaagcacgagctgctgaccatgtaccacggctgggtgctgaccagctgctacatcctgatcatcaccatcgccaacatcgccaacctggccagcaccgccaccgccatcaccatccagagagactggatcgtggtggtggccggcgaggacagaagcaagctggccaacatgaacgccaccatcagaagaatcgaccagctgaccaacatcctggcccccatggccgtgggccagatcatgaccttcggcagctag

SEQ ID NO: 2192 - DNA, 78 bp, synthetic construct
  misc_feature 1..78: note = source = /note="Description of Artificial Sequence: Synthetic coding sequence"
  source 1..78: mol_type = other DNA
atgaccagagccggcgaccacaacagacagagaggctgctgcggcagcctggccgactacctgaccagcgccaagtag

SEQ ID NO: 2193 - DNA, 78 bp, synthetic construct; identical to SEQ ID NO: 2192
  misc_feature 1..78: note = source = /note="Description of Artificial Sequence: Synthetic coding sequence"
  source 1..78: mol_type = other DNA

SEQ ID NO: 2194 - DNA, 168 bp, synthetic construct
  misc_feature 1..168: note = source = /note="Description of Artificial Sequence: Synthetic coding sequence"
  source 1..168: mol_type = other DNA
atgaccagagccggcgaccacaacagacagagaggctgctgcggcagcctggccgactacctgaccagcgccaagttcctgctgtacctgggccacagcctgagcacctggggcgacagaatgtggcacttcgccgtgagcgtgttcctggtggagctgtacggctag

SEQ ID NO: 2195 - DNA, 300 bp, synthetic construct
  misc_feature 1..300: note = source = /note="Description of Artificial Sequence: Synthetic coding sequence"
  source 1..300: mol_type = other DNA
atgagagccagcatccacaagaagctgagaaagagcagcggcatcgtgaccatcctgtacagcgccttcgtgctggtgagcaccagcgacatggccgaggagaccgaggacgcctggcccagatgctacctgcagttcctggccctgctgctgaccagcaccagcgccagagccgccgccgccatcgccgccgccgaggagcccgccggcagccccagcgtgatgaccagagccggcgaccacaacagacagagaggctgctgcggcagcctggccgactacctgaccagcgccaagtag

SEQ ID NO: 2196 - DNA, 504 bp, synthetic construct
  misc_feature 1..504: note = source = /note="Description of Artificial Sequence: Synthetic coding sequence"
  source 1..504: mol_type = other DNA
atgggcgtgaaggacagcaacatccacgagctggagcacgagcaggagcccacctgcgccagccagatggccgagcccttcagaaccttcagagacggctgggtgagctactacaaccagcccgtgttcctggccggcatgggcctggccttcctgtacatgaccgtgctgggcttcgactgcatcaccaccggctacgcctacacccagggcctgagcggcagcatcctgagcatcctgatgggcgccagcgccatcaccggcatcatgggcaccgtggccttcacctggctgagaagaaagtgcggcctggtgagaaccggcctgatcagcggcctggcccagctgagctgcctgatcctgtgcgtgatcagcgtgttcatgcccggcagccccctggacctgagcgtgagccccttcgaggacatcagaagcagattcatccagggcgagagcatcacccccaccaagatccccgagatcaccaccgagatccacgtgtag

SEQ ID NO: 2197 - DNA, 2496 bp, synthetic construct
  misc_feature 1..2496: note = source = /note="Description of Artificial Sequence: Synthetic coding sequence"
  source 1..2496: mol_type = other DNA
atggagagaccctggggcgccgccgacggcctgagcagatggccccacggcctgggcctgctgctgctgctgcagctgctgccccccagcaccctgagccaggacagactggacgccccccccccccccgccgcccccctgcccagatggagcggccccatcggcgtgagctggggcctgagagccgccgccgccggcggcgccttccccagaggcggcagatggagaagaagcgcccccggcgaggacgaggagtgcggcagagtgagagacttcgtggccaagctggccaacaacacccaccagcacgtgttcgacgacctgagaggcagcgtgagcctgagctgggtgggcgacagcaccggcgtgatcctggtgctgaccaccttccacgtgcccctggtgatcatgaccttcggccagagcaagctgtacagaagcgaggactacggcaagaacttcaaggacatcaccgacctgatcaacaacaccttcatcagaaccgagttcggcatggccatcggccccgagaacagcggcaaggtggtgctgaccgccgaggtgagcggcggcagcagaggcggcagaatcttcagaagcagcgacttcgccaagaacttcgtgcagaccgacctgcccttccaccccctgacccagatgatgtacagcccccagaacagcgactacctgctggccctgagcaccgagaacggcctgtgggtgagcaagaacttcggcggcaagtgggaggagatccacaaggccgtgtgcctggccaagtggggcagcgacaacaccatcttcttcaccacctacgccaacggcagctgcaaggccgacctgggcgccctggagctgtggagaaccagcgacctgggcaagagcttcaagaccatcggcgtgaagatctacagcttcggcctgggcggcagattcctgttcgccagcgtgatggccgacaaggacaccaccagaagaatccacgtgagcaccgaccagggcgacacctggagcatggcccagctgcccagcgtgggccaggagcagttctacagcatcctggccgccaacgacgacatggtgttcatgcacgtggacgagcccggcgacaccggcttcggcaccatcttcaccagcgacgacagaggcatcgtgtacagcaagagcctggacagacacctgtacaccaccaccggcggcgagaccgacttcaccaacgtgaccagcctgagaggcgtgtacatcaccagcgtgctgagcgaggacaacagcatccagaccatgatcaccttcgaccagggcggcagatggacccacctgagaaagcccgagaacagcgagtgcgacgccaccgccaagaacaagaacgagtgcagcctgcacatccacgccagctacagcatcagccagaagctgaacgtgcccatggcccccctgagcgagcccaacgccgtgggcatcgtgatcgcccacggcagcgtgggcgacgccatcagcgtgatggtgcccgacgtgtacatcagcgacgacggcggctacagctggaccaagatgctggagggcccccactactacaccatcctggacagcggcggcatcatcgtggccatcgagcacagcagcagacccatcaacgtgatcaagttcagcaccgacgagggccagtgctggcagacctacaccttcaccagagaccccatctacttcaccggcctggccagcgagcccggcgccagaagcatgaacatcagcatctggggcttcaccgagagcttcctgaccagccagtgggtgagctacaccatcgacttcaaggacatcctggagagaaactgcgaggagaaggactacaccatctggctggcccacagcaccgaccccgaggactacgaggacggctgcatcctgggctacaaggagcagttcctgagactgagaaagagcagcgtgtgccagaacggcagagactacgtggtgaccaagcagcccagcatctgcctgtgcagcctggaggacttcctgtgcgacttcggctactacagacccgagaacgacagcaagtgcgtggagcagcccgagctgaagggccacgacctggagttctgcctgtacggcagagaggagcacctgaccaccaacggctacagaaagatccccggcgacaagtgccagggcggcgtgaaccccgtgagagaggtgaaggacctgaagaagaagtgcaccagcaacttcctgagccccgagaagcagaacagcaagagcaacagcgtgcccatcatcctggccatcgtgggcctgatgctggtgaccgtggtggccggcgtgctgatcgtgaagaagtacgtgtgcggcggcagattcctggtgcacagatacagcgtgctgcagcagcacgccgaggccaacggcgtggacggcgtggacgccctggacaccgccagccacaccaacaagagcggctaccacgacgacagcgacgaggacctgctggagtag

SEQ ID NO: 2198 - DNA, 2085 bp, synthetic construct
  misc_feature 1..2085: note = source = /note="Description of Artificial Sequence: Synthetic coding sequence"
  source 1..2085: mol_type = other DNA
atgaccttcggccagagcaagctgtacagaagcgaggactacggcaagaacttcaaggacatcaccgacctgatcaacaacaccttcatcagaaccgagttcggcatggccatcggccccgagaacagcggcaaggtggtgctgaccgccgaggtgagcggcggcagcagaggcggcagaatcttcagaagcagcgacttcgccaagaacttcgtgcagaccgacctgcccttccaccccctgacccagatgatgtacagcccccagaacagcgactacctgctggccctgagcaccgagaacggcctgtgggtgagcaagaacttcggcggcaagtgggaggagatccacaaggccgtgtgcctggccaagtggggcagcgacaacaccatcttcttcaccacctacgccaacggcagctgcaccgacctgggcgccctggagctgtggagaaccagcgacctgggcaagagcttcaagaccatcggcgtgaagatctacagcttcggcctgggcggcagattcctgttcgccagcgtgatggccgacaaggacaccaccagaagaatccacgtgagcaccgaccagggcgacacctggagcatggcccagctgcccagcgtgggccaggagcagttctacagcatcctggccgccaacgacgacatggtgttcatgcacgtggacgagcccggcgacaccggcttcggcaccatcttcaccagcgacgacagaggcatcgtgtacagcaagagcctggacagacacctgtacaccaccaccggcggcgagaccgacttcaccaacgtgaccagcctgagaggcgtgtacatcaccagcgtgctgagcgaggacaacagcatccagaccatgatcaccttcgaccagggcggcagatggacccacctgagaaagcccgagaacagcgagtgcgacgccaccgccaagaacaagaacgagtgcagcctgcacatccacgccagctacagcatcagccagaagctgaacgtgcccatggcccccctgagcgagcccaacgccgtgggcatcgtgatcgcccacggcagcgtgggcgacgccatcagcgtgatggtgcccgacgtgtacatcagcgacgacggcggctacagctggaccaagatgctggagggcccccactactacaccatcctggacagcggcggcatcatcgtggccatcgagcacagcagcagacccatcaacgtgatcaagttcagcaccgacgagggccagtgctggcagacctacaccttcaccagagaccccatctacttcaccggcctggccagcgagcccggcgccagaagcatgaacatcagcatctggggcttcaccgagagcttcctgaccagccagtgggtgagctacaccatcgacttcaaggacatcctggagagaaactgcgaggagaaggactacaccatctggctggcccacagcaccgaccccgaggactacgaggacggctgcatcctgggctacaaggagcagttcctgagactgagaaagagcagcgtgtgccagaacggcagagactacgtggtgaccaagcagcccagcatctgcctgtgcagcctggaggacttcctgtgcgacttcggctactacagacccgagaacgacagcaagtgcgtggagcagcccgagctgaagggccacgacctggagttctgcctgtacggcagagaggagcacctgaccaccaacggctacagaaagatccccggcgacaagtgccagggcggcgtgaaccccgtgagagaggtgaaggacctgaagaagaagtgcaccagcaacttcctgagccccgagaagcagaacagcaagagcaacagcgtgcccatcatcctggccatcgtgggcctgatgctggtgaccgtggtggccggcgtgctgatcgtgaagaagtacgtgtgcggcggcagattcctggtgcacagatacagcgtgctgcagcagcacgccgaggccaacggcgtggacggcgtggacgccctggacaccgccagccacaccaacaagagcggctaccacgacgacagcgacgaggacctgctggagtag

SEQ ID NO: 2199 - DNA, 1446 bp, synthetic construct
  misc_feature 1..1446: note = source = /note="Description of Artificial Sequence: Synthetic coding sequence"
  source 1..1446: mol_type = other DNA
atgaaggtgctgagcgagggccagctgaagctgtgcgtggtgcagcccgtgcacctgaccagctggctgctgatcttcttcatcctgaagagcatcagctgcctgaagcccgccagactgcccatctaccagagaaagcccttcatcgccgcctggaacgcccccaccgaccagtgcctgatcaagtacaacctgagactgaacctgaagatgttccccgtgatcggcagccccctggccaaggccagaggccagaacgtgaccatcttctacgtgaacagactgggctactacccctggtacaccagccagggcgtgcccatcaacggcggcctgccccagaacatcagcctgcaggtgcacctggagaaggccgaccaggacatcaactactacatccccgccgaggacttcagcggcctggccgtgatcgactgggagtactggagaccccagtgggccagaaactggaacagcaaggacgtgtacagacagaagagcagaaagctgatcagcgacatgggcaagaacgtgagcgccaccgacatcgagtacctggccaaggtgaccttcgaggagagcgccaaggccttcatgaaggagaccatcaagctgggcatcaagagcagacccaagggcctgtggggctactacctgtaccccgactgccacaactacaacgtgtacgcccccaactacagcggcagctgccccgaggacgaggtgctgagaaacaacgagctgagctggctgtggaacagcagcgccgccctgtaccccagcatcggcgtgtggaagagcctgggcgacagcgagaacatcctgagattcagcaagttcagagtgcacgagagcatgagaatcagcaccatgaccagccacgactacgccctgcccgtgttcgtgtacaccagactgggctacagagacgagcccctgttcttcctgagcaagcaggacctggtgagcaccatcggcgagagcgccgccctgggcgccgccggcatcgtgatctggggcgacatgaacctgaccgccagcaaggccaactgcaccaaggtgaagcagttcgtgagcagcgacctgggcagctacatcgccaacgtgaccagagccgccgaggtgtgcagcctgcacctgtgcagaaacaacggcagatgcatcagaaagatgtggaacgcccccagctacctgcacctgaaccccgccagctaccacatcgaggccagcgaggacggcgagttcaccgtgaagggcaaggccagcgacaccgacctggccgtgatggccgacaccttcagctgccactgctaccagggctacgagggcgccgactgcagagagatcaagaccgccgacggctgcagcggcgtgagccccagccccggcagcctgatgaccctgtgcctgctgctgctggccagctacagaagcatccagctgtag

SEQ ID NO: 2200 - DNA, 1536 bp, synthetic construct
  misc_feature 1..1536: note = source = /note="Description of Artificial Sequence: Synthetic coding sequence"
  source 1..1536: mol_type = other DNA
atgggcgtgctgaagttcaagcacatcttcttcagaagcttcgtgaagagcagcggcgtgagccagatcgtgttcaccttcctgctgatcccctgctgcctgaccctgaacttcagagccccccccgtgatccccaacgtgcccttcctgtgggcctggaacgcccccagcgagttctgcctgggcaagttcgacgagcccctggacatgagcctgttcagcttcatcggcagccccagaatcaacgccaccggccagggcgtgaccatcttctacgtggacagactgggctactacccctacatcgacagcatcaccggcgtgaccgtgaacggcggcatcccccagaagatcagcctgcaggaccacctggacaaggccaagaaggacatcaccttctacatgcccgtggacaacctgggcatggccgtgatcgactgggaggagtggagacccacctgggccagaaactggaagcccaaggacgtgtacaagaacagaagcatcgagctggtgcagcagcagaacgtgcagctgagcctgaccgaggccaccgagaaggccaagcaggagttcgagaaggccggcaaggacttcctggtggagaccatcaagctgggcaagctgctgagacccaaccacctgtggggctactacctgttccccgactgctacaaccaccactacaagaagcccggctacaacggcagctgcttcaacgtggagatcaagagaaacgacgacctgagctggctgtggaacgagagcaccgccctgtaccccagcatctacctgaacacccagcagagccccgtggccgccaccctgtacgtgagaaacagagtgagagaggccatcagagtgagcaagatccccgacgccaagagccccctgcccgtgttcgcctacaccagaatcgtgttcaccgaccaggtgctgaagttcctgagccaggacgagctggtgtacaccttcggcgagaccgtggccctgggcgccagcggcatcgtgatctggggcaccctgagcatcatgagaagcatgaagagctgcctgctgctggacaactacatggagaccatcctgaacccctacatcatcaacgtgaccctggccgccaagatgtgcagccaggtgctgtgccaggagcagggcgtgtgcatcagaaagaactggaacagcagcgactacctgcacctgaaccccgacaacttcgccatccagctggagaagggcggcaagttcaccgtgagaggcaagcccaccctggaggacctggagcagttcagcgagaagttctactgcagctgctacagcaccctgagctgcaaggagaaggccgacgtgaaggacaccgacgccgtggacgtgtgcatcgccgacggcgtgtgcatcgacgccttcctgaagccccccatggagaccgaggagccccagatcttctacaacgccagccccagcaccctgagcgccaccatgttcatctggagactggaggtgtgggaccagggcatcagcagaatcggcttcttctag

SEQ ID NO: 2201 - DNA, 1530 bp, synthetic construct
  misc_feature 1..1530: note = source = /note="Description of Artificial Sequence: Synthetic coding sequence"
  source 1..1530: mol_type = other DNA
atgggcgtgctgaagttcaagcacatcttcttcagaagcttcgtgaagagcagcggcgtgagccagatcgtgttcaccttcctgctgatcccctgctgcctgaccctgaacttcagagccccccccgtgatccccaacgtgcccttcctgtgggcctggaacgcccccagcgagttctgcctgggcaagttcgacgagcccctggacatgagcctgttcagcttcatcggcagccccagaatcaacgccaccggccagggcgtgaccatcttctacgtggacagactgggctactacccctacatcgacagcatcaccggcgtgaccgtgaacggcggcatcccccagaagatcagcctgcaggaccacctggacaaggccaagaaggacatcaccttctacatgcccgtggacaacctgggcatggccgtgatcgactgggaggagtggagacccacctgggccagaaactggaagcccaaggacgtgtacaagaacagaagcatcgagctggtgcagcagcagaacgtgcagctgagcctgaccgaggccaccgagaaggccaagcaggagttcgagaaggccggcaaggacttcctggtggagaccatcaagctgggcaagctgctgagacccaaccacctgtggggctactacctgttccccgactgctacaaccaccactacaagaagcccggctacaacggcagctgcttcaacgtggagatcaagagaaacgacgacctgagctggctgtggaacgagagcaccgccctgtaccccagcatctacctgaacacccagcagagccccgtggccgccaccctgtacgtgagaaacagagtgagagaggccatcagagtgagcaagatccccgacgccaagagccccctgcccgtgttcgcctacaccagaatcgtgttcaccgaccaggtgctgaagttcctgagccaggacgagctggtgtacaccttcggcgagaccgtggccctgggcgccagcggcatcgtgatctggggcaccctgagcatcatgagaagcatgaagagctgcctgctgctggacaactacatggagaccatcctgaacccctacatcatcaacgtgaccctggccgccaagatgtgcagccaggtgctgtgccaggagcagggcgtgtgcatcagaaagaactggaacagcagcgactacctgcacctgaaccccgacaacttcgccatccagctggagaagggcggcaagttcaccgtgagaggcaagcccaccctggaggacctggagcagttcagcgagaagttctactgcagctgctacagcaccctgagctgcaaggagaaggccgacgtgaaggacaccgacgccgtggacgtgtgcatcgccgacggcgtgtgcatcgacgccttcctgaagccccccatggagaccgaggagccccagatcttctacaacgccagccccagcaccctgagcgccaccatgttcatcgtgagcatcctgttcctgatcatcagcagcgtggccagcctgtag

SEQ ID NO: 2202 - DNA, 243 bp, synthetic construct
  misc_feature 1..243: note = source = /note="Description of Artificial Sequence: Synthetic coding sequence"
  source 1..243: mol_type = other DNA
atgggcgtgctgaagttcaagcacatcttcttcagaagcttcgtgaagagcagcggcgtgagccagatcgtgttcaccttcctgctgatcccctgctgcctgaccctgaacttcagagccccccccgtgatccccaacgtgcccttcctgtgggcctggaacgcccccagcgagttctgcctgggcaagttcgacgagcccctggacatgagcctgttcagcttcatcggcagccccagatag

SEQ ID NO: 2203 - DNA, 1530 bp, synthetic construct; identical to SEQ ID NO: 2201
  misc_feature 1..1530: note = source = /note="Description of Artificial Sequence: Synthetic coding sequence"
  source 1..1530: mol_type = other DNA

SEQ ID NO: 2204 - DNA, 1530 bp, synthetic construct; identical to SEQ ID NO: 2201
  misc_feature 1..1530: note = source = /note="Description of Artificial Sequence: Synthetic coding sequence"
  source 1..1530: mol_type = other DNA

SEQ ID NO: 2205 - DNA, 1764 bp, synthetic construct
  misc_feature 1..1764: note = source = /note="Description of Artificial Sequence: Synthetic coding sequence"
  source 1..1764: mol_type = other DNA
atgcccagatacggcgccagcctgagacagagctgccccagaagcggcagagagcagggccaggacggcaccgccggcgcccccggcctgctgtggatgggcctggtgctggccctggccctggccctggccctggccctggccctgagcgacagcagagtgctgtgggcccccgccgaggcccaccccctgagcccccagggccaccccgccagactgcacagaatcgtgcccagactgagagacgtgttcggctggggcaacctgacctgccccatctgcaagggcctgttcaccgccatcaacctgggcctgaagaaggagcccaacgtggccagagtgggcagcgtggccatcaagctgtgcaacctgctgaagatcgccccccccgccgtgtgccagagcatcgtgcacctgttcgaggacgacatggtggaggtgtggagaagaagcgtgctgagccccagcgaggcctgcggcctgctgctgggcagcacctgcggccactgggacatcttcagcagctggaacatcagcctgcccaccgtgcccaagcccccccccaagccccccagcccccccgcccccggcgcccccgtgagcagaatcctgttcctgaccgacctgcactgggaccacgactacctggagggcaccgaccccgactgcgccgaccccctgtgctgcagaagaggcagcggcctgccccccgccagcagacccggcgccggctactggggcgagtacagcaagtgcgacctgcccctgagaaccctggagagcctgctgagcggcctgggccccgccggccccttcgacatggtgtactggaccggcgacatccccgcccacgacgtgtggcaccagaccagacaggaccagctgagagccctgaccaccgtgaccgccctggtgagaaagttcctgggccccgtgcccgtgtaccccgccgtgggcaaccacgagagcacccccgtgaacagcttccccccccccttcatcgagggcaaccacagcagcagatggctgtacgaggccatggccaaggcctgggagccctggctgcccgccgaggccctgagaaccctgagatacctgagcagcgtggagacccaggagggcaagagaaaggtgcacatcatcggccacatcccccccggccactgcctgaagagctggagctggaactactacagaatcgtggccagatacgagaacaccctggccgcccagttcttcggccacacccacgtggacgagttcgaggtgttctacgacgaggagaccctgagcagacccctggccgtggccttcctggcccccagcgccaccacctacatcggcctgaaccccggctacagagtgtaccagatcgacggcaactacagcggcagcagccacgtggtgctggaccacgagacctacatcctgaacctgacccaggccaacatccccggcgccatcccccactggcagctgctgtacagagccagagagacctacggcctgcccaacaccctgcccaccgcctggcacaacctggtgtacagaatgagaggcgacatgcagctgttccagaccttctggttcctgtaccacaagggccacccccccagcgagccctgcggcaccccctgcagactggccaccctgtgcgcccagctgagcgccagagccgacagccccgccctgtgcagacacctgatgcccgacggcagcctgcccgaggcccagagcctgtggcccagacccctgttctgctag

SEQ ID NO: 2206 - DNA, 1896 bp, synthetic construct
  misc_feature 1..1896: note = source = /note="Description of Artificial Sequence: Synthetic coding sequence"
  source 1..1896: mol_type = other DNA
atgcccagatacggcgccagcctgagacagagctgccccagaagcggcagagagcagggccaggacggcaccgccggcgcccccggcctgctgtggatgggcctggtgctggccctggccctggccctggccctggccctggccctgagcgacagcagagtgctgtgggcccccgccgaggcccaccccctgagcccccagggccaccccgccagactgcacagaatcgtgcccagactgagagacgtgttcggctggggcaacctgacctgccccatctgcaagggcctgttcaccgccatcaacctgggcctgaagaaggagcccaacgtggccagagtgggcagcgtggccatcaagctgtgcaacctgctgaagatcgccccccccgccgtgtgccagagcatcgtgcacctgttcgaggacgacatggtggaggtgtggagaagaagcgtgctgagccccagcgaggcctgcggcctgctgctgggcagcacctgcggccactgggacatcttcagcagctggaacatcagcctgcccaccgtgcccaagcccccccccaagccccccagcccccccgcccccggcgcccccgtgagcagaatcctgttcctgaccgacctgcactgggaccacgactacctggagggcaccgaccccgactgcgccgaccccctgtgctgcagaagaggcagcggcctgccccccgccagcagacccggcgccggctactggggcgagtacagcaagtgcgacctgcccctgagaaccctggagagcctgctgagcggcctgggccccgccggccccttcgacatggtgtactggaccggcgacatccccgcccacgacgtgtggcaccagaccagacaggaccagctgagagccctgaccaccgtgaccgccctggtgagaaagttcctgggccccgtgcccgtgtaccccgccgtgggcaaccacgagagcacccccgtgaacagcttccccccccccttcatcgagggcaaccacagcagcagatggctgtacgaggccatggccaaggcctgggagccctggctgcccgccgaggccctgagaaccctgagaatcggcggcttctacgccctgagcccctaccccggcctgagactgatcagcctgaacatgaacttctgcagcagagagaacttctggctgctgatcaacagcaccgaccccgccggccagctgcagtggctggtgggcgagctgcaggccgccgaggacagaggcgacaaggtgcacatcatcggccacatcccccccggccactgcctgaagagctggagctggaactactacagaatcgtggccagatacgagaacaccctggccgcccagttcttcggccacacccacgtggacgagttcgaggtgttctacgacgaggagaccctgagcagacccctggccgtggccttcctggcccccagcgccaccacctacatcggcctgaaccccggctacagagtgtaccagatcgacggcaactacagcggcagcagccacgtggtgctggaccacgagacctacatcctgaacctgacccaggccaacatccccggcgccatcccccactggcagctgctgtacagagccagagagacctacggcctgcccaacaccctgcccaccgcctggcacaacctggtgtacagaatgagaggcgacatgcagctgttccagaccttctggttcctgtaccacaagggccacccccccagcgagccctgcggcaccccctgcagactggccaccctgtgcgcccagctgagcgccagagccgacagccccgccctgtgcagacacctgatgcccgacggcagcctgcccgaggcccagagcctgtggcccagacccctgttctgctag

SEQ ID NO: 2207 - DNA, 1728 bp, synthetic construct
  misc_feature 1..1728: note = source = /note="Description of Artificial Sequence: Synthetic coding sequence"
  source 1..1728: mol_type = other DNA
atgcccagatacggcgccagcctgagacagagctgccccagaagcggcagagagcagggccaggacggcaccgccggcgcccccggcctgctgtggatgggcctggtgctggccctggccctggccctggccctggccctggccctgagcgacagcagagtgctgtgggcccccgccgaggcccaccccctgagcccccagggccaccccgccagactgcacagaatcgtgcccagactgagagacgtgttcggctggggcaacctgacctgccccatctgcaagggcctgttcaccgccatcaacctgggcctgaagaaggagcccaacgtggccagagtgggcagcgtggccatcaagctgtgcaacctgctgaagatcgccccccccgccgtgtgccagagcatcgtgcacctgttcgaggacgacatggtggaggtgtggagaagaagcgtgctgagccccagcgaggcctgcggcctgctgctgggcagcacctgcggccactgggacatcttcagcagctggaacatcagcctgcccaccgtgcccaagcccccccccaagccccccagcccccccgcccccggcgcccccgtgagcagaatcctgttcctgaccgacctgcactgggaccacgactacctggagggcaccgaccccgactgcgccgaccccctgtgctgcagaagaggcagcggcctgccccccgccagcagacccggcgccggctactggggcgagtacagcaagtgcgacctgcccctgagaaccctggagagcctgctgagcggcctgggccccgccggccccttcgacatggtgtactggaccggcgacatccccgcccacgacgtgtggcaccagaccagacaggaccagctgagagccctgaccaccgtgaccgccctggtgagaaagttcctgggccccgtgcccgtgtaccccgccgtgggcaaccacgagagcacccccgtgaacagcttccccccccccttcatcgagggcaaccacagcagcagatggctgtacgaggccatggccaaggcctgggagccctggctgcccgccgaggccctgagaaccctgagaaaggtgcacatcatcggccacatcccccccggccactgcctgaagagctggagctggaactactacagaatcgtggccagatacgagaacaccctggccgcccagttcttcggccacacccacgtggacgagttcgaggtgttctacgacgaggagaccctgagcagacccctggccgtggccttcctggcccccagcgccaccacctacatcggcctgaaccccggctacagagtgtaccagatcgacggcaactacagcggcagcagccacgtggtgctggaccacgagacctacatcctgaacctgacccaggccaacatccccggcgccatcccccactggcagctgctgtacagagccagagagacctacggcctgcccaacaccctgcccaccgcctggcacaacctggtgtacagaatgagaggcgacatgcagctgttccagaccttctggttcctgtaccacaagggccacccccccagcgagccctgcggcaccccctgcagactggccaccctgtgcgcccagctgagcgccagagccgacagccccgccctgtgcagacacctgatgcccgacggcagcctgcccgaggcccagagcctgtggcccagacccctgttctgctag

SEQ ID NO: 2208 - DNA, 1893 bp, synthetic construct
  misc_feature 1..1893: note = source = /note="Description of Artificial Sequence: Synthetic coding sequence"
  source 1..1893: mol_type = other DNA
atgcccagatacggcgccagcctgagacagagctgccccagaagcggcagagagcagggccaggacggcaccgccggcgcccccggcctgctgtggatgggcctggtgctggccctggccctggccctggccctggccctggccctgagcgacagcagagtgctgtgggcccccgccgaggcccaccccctgagcccccagggccaccccgccagactgcacagaatcgtgcccagactgagagacgtgttcggctggggcaacctgacctgccccatctgcaagggcctgttcaccgccatcaacctgggcctgaaggagcccaacgtggccagagtgggcagcgtggccatcaagctgtgcaacctgctgaagatcgccccccccgccgtgtgccagagcatcgtgcacctgttcgaggacgacatggtggaggtgtggagaagaagcgtgctgagccccagcgaggcctgcggcctgctgctgggcagcacctgcggccactgggacatcttcagcagctggaacatcagcctgcccaccgtgcccaagcccccccccaagccccccagcccccccgcccccggcgcccccgtgagcagaatcctgttcctgaccgacctgcactgggaccacgactacctggagggcaccgaccccgactgcgccgaccccctgtgctgcagaagaggcagcggcctgccccccgccagcagacccggcgccggctactggggcgagtacagcaagtgcgacctgcccctgagaaccctggagagcctgctgagcggcctgggccccgccggccccttcgacatggtgtactggaccggcgacatccccgcccacgacgtgtggcaccagaccagacaggaccagctgagagccctgaccaccgtgaccgccctggtgagaaagttcctgggccccgtgcccgtgtaccccgccgtgggcaaccacgagagcacccccgtgaacagcttccccccccccttcatcgagggcaaccacagcagcagatggctgtacgaggccatggccaaggcctgggagccctggctgcccgccgaggccctgagaaccctgagaatcggcggcttctacgccctgagcccctaccccggcctgagactgatcagcctgaacatgaacttctgcagcagagagaacttctggctgctgatcaacagcaccgaccccgccggccagctgcagtggctggtgggcgagctgcaggccgccgaggacagaggcgacaaggtgcacatcatcggccacatcccccccggccactgcctgaagagctggagctggaactactacagaatcgtggccagatacgagaacaccctggccgcccagttcttcggccacacccacgtggacgagttcgaggtgttctacgacgaggagaccctgagcagacccctggccgtggccttcctggcccccagcgccaccacctacatcggcctgaaccccggctacagagtgtaccagatcgacggcaactacagcggcagcagccacgtggtgctggaccacgagacctacatcctgaacctgacccaggccaacatccccggcgccatcccccactggcagctgctgtacagagccagagagacctacggcctgcccaacaccctgcccaccgcctggcacaacctggtgtacagaatgagaggcgacatgcagctgttccagaccttctggttcctgtaccacaagggccacccccccagcgagccctgcggcaccccctgcagactggccaccctgtgcgcccagctgagcgccagagccgacagccccgccctgtgcagacacctgatgcccgacggcagcctgcccgaggcccagagcctgtggcccagacccctgttctgctag

SEQ ID NO: 2209 - DNA, 1101 bp, synthetic construct
  misc_feature 1..1101: note = source = /note="Description of Artificial Sequence: Synthetic coding sequence"
  source 1..1101: mol_type = other DNA
atgcccagatacggcgccagcctgagacagagctgccccagaagcggcagagagcagggccaggacggcaccgccggcgcccccggcctgctgtggatgggcctggtgctggccctggccctggccctggccctggccctggccctgagcgacagcagagtgctgtgggcccccgccgaggcccaccccctgagcccccagggccaccccgccagactgcacagaatcgtgcccagactgagagacgtgttcggctggggcaacctgacctgccccatctgcaagggcctgttcaccgccatcaacctgggcctgaagaaggagcccaacgtggccagagtgggcagcgtggccatcaagctgtgcaacctgctgaagatcgccccccccgccgtgtgccagagcatcgtgcacctgttcgaggacgacatggtggaggtgtggagaagaagcgtgctgagccccagcgaggcctgcggcctgctgctgggcagcacctgcggccactgggacatcttcagcagctggaacatcagcctgcccaccgtgcccaagcccccccccaagccccccagcccccccgcccccggcgcccccgtgagcagaatcctgttcctgaccgacctgcactgggaccacgactacctggagggcaccgaccccgactgcgccgaccccctgtgctgcagaagaggcagcggcctgccccccgccagcagacccggcgccggctactggggcgagtacagcaagtgcgacctgcccctgagaaccctggagagcctgctgagcggcctgggccccgccggccccttcgacatggtgtactggaccggcgacatccccgcccacgacgtgtggcaccagaccagacaggaccagctgagagccctgaccaccgtgaccgccctggtgagaaagttcctgggccccgtgcccgtgtaccccgccgtgggcaaccacgagagcacccccgtgaacagcttccccccccccttcatcgagggcaaccacagcagcagatggctgtacgaggccatggccaaggcctgggagccctggctgcccgccgaggccctgagaaccctgagatgcatctag

SEQ ID NO: 2210 - DNA, 1209 bp, synthetic construct
  misc_feature 1..1209: note = source = /note="Description of Artificial Sequence: Synthetic coding sequence"
  source 1..1209: mol_type = other DNA
atgcccagatacggcgccagcctgagacagagctgccccagaagcggcagagagcagggccaggacggcaccgccggcgcccccggcctgctgtggatgggcctggtgctggccctggccctggccctggccctggccctggccctgagcgacagcagagtgctgtgggcccccgccgaggcccaccccctgagcccccagggccaccccgccagactgcacagaatcgtgcccagactgagagacgtgttcggctggggcaacctgacctgccccatctgcaagggcctgttcaccgccatcaacctgggcctgaagaaggagcccaacgtggccagagtgggcagcgtggccatcaagctgtgcaacctgctgaagatcgccccccccgccgtgtgccagagcatcgtgcacctgttcgaggacgacatggtggaggtgtggagaagaagcgtgctgagccccagcgaggcctgcggcctgctgctgggcagcacctgcggccactgggacatcttcagcagctggaacatcagcctgcccaccgtgcccaagcccccccccaagccccccagcccccccgcccccggcgcccccgtgagcagaatcctgttcctgaccgacctgcactgggaccacgactacctggagggcaccgaccccgactgcgccgaccccctgtgctgcagaagaggcagcggcctgccccccgccagcagacccggcgccggctactggggcgagtacagcaagtgcgacctgcccctgagaaccctggagagcctgctgagcggcctgggccccgccggccccttcgacatggtgtactggaccggcgacatccccgcccacgacgtgtggcaccagaccagacaggaccagctgagagccctgaccaccgtgaccgccctggtgagaaagttcctgggccccgtgcccgtgtaccccgccgtgggcaaccacgagagcacccccgtgaacagcttccccccccccttcatcgagggcaaccacagcagcagatggctgtacgaggccatggccaaggcctgggagccctggctgcccgccgaggccctgagaaccctgagatacctgagcagcgtggagacccaggagggcaagagaaagaactggggcgtgctgtgcagcttccccatccccagaagccccccccacctgagccagtacgagttcctgttcccctag

SEQ ID NO: 2211 - DNA, 954 bp, synthetic construct
  misc_feature 1..954: note = source = /note="Description of Artificial Sequence: Synthetic coding sequence"
  source 1..954: mol_type = other DNA
atgtacaacatgatggagaccgagctgaagccccccggcccccagcagaccagcggcggcggcggcggcaacagcaccgccgccgccgccggcggcaaccagaagaacagccccgacagagtgaagagacccatgaacgccttcatggtgtggagcagaggccagagaagaaagatggcccaggagaaccccaagatgcacaacagcgagatcagcaagagactgggcgccgagtggaagctgctgagcgagaccgagaagagacccttcatcgacgaggccaagagactgagagccctgcacatgaaggagcaccccgactacaagtacagacccagaagaaagaccaagaccctgatgaagaaggacaagtacaccctgcccggcggcctgctggcccccggcggcaacagcatggccagcggcgtgggcgtgggcgccggcctgggcgccggcgtgaaccagagaatggacagctacgcccacatgaacggctggagcaacggcagctacagcatgatgcaggaccagctgggctacccccagcaccccggcctgaacgcccacggcgccgcccagatgcagcccatgcacagatacgacgtgagcgccctgcagtacaacagcatgaccagcagccagacctacatgaacggcagccccacctacagcatgagctacagccagcagggcacccccggcatggccctgggcagcatgggcagcgtggtgaagagcgaggccagcagcagcccccccgtggtgaccagcagcagccacagcagagccccctgccaggccggcgacctgagagacatgatcagcatgtacctgcccggcgccgaggtgcccgagcccgccgcccccagcagactgcacatgagccagcactaccagagcggccccgtgcccggcaccgccatcaacggcaccctgcccctgagccacatgtag

SEQ ID NO: 2212 - DNA, 954 bp, synthetic construct; identical to SEQ ID NO: 2211
  misc_feature 1..954: note = source = /note="Description of Artificial Sequence: Synthetic coding sequence"
  source 1..954: mol_type = other DNA

SEQ ID NO: 2213 - DNA, 1182 bp, synthetic construct
  misc_feature 1..1182: note = source = /note="Description of Artificial Sequence: Synthetic coding sequence"
  source 1..1182: mol_type = other DNA
atgcaccaggccggctaccccggctgcagaggcgccatggccgagagccacctgctgcagtggctgctgctgctgctgcccaccctgtgcggccccggcaccgccgcctggaccaccagcagcctggcctgcgcccagggccccgagttctggtgccagagcctggagcaggccctgcagtgcagagccctgggccactgcctgcaggaggtgtggggccacgtgggcgccgacgacctgtgccaggagtgcgaggacatcgtgcacatcctgaacaagatggccaaggaggccatcttccaggacaccatgagaaagttcctggagcaggagtgcaacgtgctgcccctgaagctgctgatgccccagtgcaaccaggtgctggacgactacttccccctggtgatcgactacttccagaaccagaccgacagcaacggcatctgcatgcacctgggcctgtgcaagagcagacagcccgagcccgagcaggagcccggcatgagcgaccccctgcccaagcccctgagagaccccctgcccgaccccctgctggacaagctggtgctgcccgtgctgcccggcgccctgcaggccagacccggcccccacacccaggacctgagcgagcagcagttccccatccccctgccctactgctggctgtgcagagccctgatcaagagaatccaggccatgatccccaagggcgccctggccgtggccgtggcccaggtgtgcagagtggtgcccctggtggccggcggcatctgccagtgcctggccgagagatacagcgtgatcctgctggacaccctgctgggcagaatgctgccccagctggtgtgcagactggtgctgagatgcagcatggacgacagcgccggccccagaagccccaccggcgagtggctgcccagagacagcgagtgccacctgtgcatgagcgtgaccacccaggccggcaacagcagcgagcaggccatcccccaggccatgctgcaggcctgcgtgggcagctggctggacagagagaagtgcaagcagttcgtggagcagcacaccccccagctgctgaccctggtgcccagaggctgggacgcccacaccacctgccaggccctgggcgtgtgcggcaccatgagcagccccctgcagtgcatccacagccccgacctgtag

SEQ ID NO: 2214 - DNA, 1182 bp, synthetic construct; identical to SEQ ID NO: 2213
  misc_feature 1..1182: note = source = /note="Description of Artificial Sequence: Synthetic coding sequence"
  source 1..1182: mol_type = other DNA

SEQ ID NO: 2215 - DNA, 1050 bp, synthetic construct
  misc_feature 1..1050: note = source = /note="Description of Artificial Sequence: Synthetic coding sequence"
  source 1..1050: mol_type = other DNA
atggccgagagccacctgctgcagtggctgctgctgctgctgcccaccctgtgcggccccggcaccgccgcctggaccaccagcagcctggcctgcgcccagggccccgagttctggtgccagagcctggagcaggccctgcagtgcagagccctgggccactgcctgcaggacaccatgagaaagttcctggagcaggagtgcaacgtgctgcccctgaagctgctgatgccccagtgcaaccaggtgctggacgactacttccccctggtgatcgactacttccagaaccagaccgacagcaacggcatctgcatgcacctgggcctgtgcaagagcagacagcccgagcccgagcaggagcccggcatgagcgaccccctgcccaagcccctgagagaccccctgcccgaccccctgctggacaagctggtgctgcccgtgctgcccggcgccctgcaggccagacccggcccccacacccaggacctgagcgagcagcagttccccatccccctgccctactgctggctgtgcagagccctgatcaagagaatccaggccatgatccccaagggcgccctggccgtggccgtggcccaggtgtgcagagtggtgcccctggtggccggcggcatctgccagtgcctggccgagagatacagcgtgatcctgctggacaccctgctgggcagaatgctgccccagctggtgtgcagactggtgctgagatgcagcatggacgacagcgccggccccagaagccccaccggcgagtggctgcccagagacagcgagtgccacctgtgcatgagcgtgaccacccaggccggcaacagcagcgagcaggccatcccccaggccatgctgcaggcctgcgtgggcagctggctggacagagagaagtgcaagcagttcgtggagcagcacaccccccagctgctgaccctggtgcccagaggctgggacgcccacaccacctgccaggccctgggcgtgtgcggcaccatgagcagccccctgcagtgcatccacagccccgacctgtag

SEQ ID NO: 2216 - DNA, 1152 bp, synthetic construct
  misc_feature 1..1152: note = source = /note="Description of Artificial Sequence: Synthetic coding sequence"
  source 1..1152: mol_type = other DNA
ggcgccatggccgagagccacctgctgcagtggctgctgctgctgctgcccaccctgtgcggccccggcaccgccgcctggaccaccagcagcctggcctgcgcccagggccccgagttctggtgccagagcctggagcaggccctgcagtgcagagccctgggccactgcctgcaggaggtgtggggccacgtgggcgccgacgacctgtgccaggagtgcgaggacatcgtgcacatcctgaacaagatggccaaggaggccatcttccaggacaccatgagaaagttcctggagcaggagtgcaacgtgctgcccctgaagctgctgatgccccagtgcaaccaggtgctggacgactacttccccctggtgatcgactacttccagaaccagaccgacagcaacggcatctgcatgcacctgggcctgtgcaagagcagacagcccgagcccgagcaggagcccggcatgagcgaccccctgcccaagcccctgagagaccccctgcccgaccccctgctggacaagctggtgctgcccgtgctgcccggcgccctgcaggccagacccggcccccacacccaggacctgagcgagcagcagttccccatccccctgccctactgctggctgtgcagagccctgatcaagagaatccaggccatgatccccaagggcgccctggccgtggccgtggcccaggtgtgcagagtggtgcccctggtggccggcggcatctgccagtgcctggccgagagatacagcgtgatcctgctggacaccctgctgggcagaatgctgccccagctggtgtgcagactggtgctgagatgcagcatggacgacagcgccggccccagaagccccaccggcgagtggctgcccagagacagcgagtgccacctgtgcatgagcgtgaccacccaggccggcaacagcagcgagcaggccatcccccaggccatgctgcaggcctgcgtgggcagctggctggacagagagaagtgcaagcagttcgtggagcagcacaccccccagctgctgaccctggtgcccagaggctgggacgcccacaccacctgccaggccctgggcgtgtgcggcaccatgagcagccccctgcagtgcatccacagccccgacctgtag

SEQ ID NO: 2217 - DNA, 1728 bp, synthetic construct
  misc_feature 1..1728: note = source = /note="Description of Artificial Sequence: Synthetic coding sequence"
  source 1..1728: mol_type = other DNA
atgctgggcgtgctggtgctgggcgccctggccctggccggcctgggcttccccgcccccgccgagccccagcccggcggcagccagtgcgtggagcacgactgcttcgccctgtaccccggccccgccaccttcctgaacgccagccagatctgcgacggcctgagaggccacctgatgaccgtgagaagcagcgtggccgccgacgtgatcagcctgctgctgaacggcgacggcggcgtgggcagaagaagactgtggatcggcctgcagctgccccccggctgcggcgaccccaagagactgggccccctgagaggcttccagtgggtgaccggcgacaacaacaccagctacagcagatgggccagactggacctgaacggcgcccccctgtgcggccccctgtgcgtggccgtgagcgccgccgaggccaccgtgcccagcgagcccatctgggaggagcagcagtgcgaggtgaaggccgacggcttcctgtgcgagttccacttccccgccacctgcagacccctggccgtggagcccggcgccgccgccgccgccgtgagcatcacctacggcacccccttcgccgccagaggcgccgacttccaggccctgcccgtgggcagcagcgccgccgtggcccccctgggcctgcagctgatgtgcaccgccccccccggcgccgtgcagggccactgggccagagaggcccccggcgcctgggactgcagcgtggagaacggcggctgcgagcacgcctgcaacgccatccccggcgcccccagatgccagtgccccgccggcgccgccctgcaggccgacggcagaagctgcaccgccagcgccacccagagctgcaacgacctgtgcgagcacttctgcgtgcccaaccccgaccagcccggcagctacagctgcatgtgcgagaccggctacagactggccgccgaccagcacagatgcgaggacgtggacgactgcatcctggagcccagcccctgcccccagagatgcgtgaacacccagggcggcttcgagtgccactgctaccccaactacgacctggtggacggcgagtgcgtggagcccgtggacccctgcttcagagccaactgcgagtaccagtgccagcccctgaaccagaccagctacctgtgcgtgtgcgccgagggcttcgcccccatcccccacgagccccacagatgccagatgttctgcaaccagaccgcctgccccgccgactgcgaccccaacacccaggccagctgcgagtgccccgagggctacatcctggacgacggcttcatctgcaccgacatcgacgagtgcgagaacggcggcttctgcagcggcgtgtgccacaacctgcccggcaccttcgagtgcatctgcggccccgacagcgccctggccagacacatcggcaccgactgcgacagcggcaaggtggacggcggcgacagcggcagcggcgagcccccccccagccccacccccggcagcaccctgaccccccccgccgtgggcctggtgcacagcggcctgctgatcggcatcagcatcgccagcctgtgcctggtggtggccctgctggccctgctgtgccacctgagaaagaagcagggcgccgccagagccaagatggagtacaagtgcgccgcccccagcaaggaggtggtgctgcagcacgtgagaaccgagagaaccccccagagactgtag

SEQ ID NO: 2218 - DNA, 1674 bp, synthetic construct
  misc_feature 1..1674: note = source = /note="Description of Artificial Sequence: Synthetic coding sequence"
  source 1..1674: mol_type = other DNA
atgagcgaggccgccagccagggcctgagagccgccgccagaagcgtgtgggccggcaccgacagaagaggctgcagacacagaagacccgtgcccctgtgcagcggcaccgccctgagccagtgccccagattccccagaagactgcacgccgccagactgggcaacatgctgggcgtgctggtgctgggcgccctggccctggccggcctgggcttccccgcccccggctgcggcgaccccaagagactgggccccctgagaggcttccagtgggtgaccggcgacaacaacaccagctacagcagatgggccagactggacctgaacggcgcccccctgtgcggccccctgtgcgtggccgtgagcgccgccgaggccaccgtgcccagcgagcccatctgggaggagcagcagtgcgaggtgaaggccgacggcttcctgtgcgagttccacttccccgccacctgcagacccctggccgtggagcccggcgccgccgccgccgccgtgagcatcacctacggcacccccttcgccgccagaggcgccgacttccaggccctgcccgtgggcagcagcgccgccgtggcccccctgggcctgcagctgatgtgcaccgccccccccggcgccgtgcagggccactgggccagagaggcccccggcgcctgggactgcagcgtggagaacggcggctgcgagcacgcctgcaacgccatccccggcgcccccagatgccagtgccccgccggcgccgccctgcaggccgacggcagaagctgcaccgccagcgccacccagagctgcaacgacctgtgcgagcacttctgcgtgcccaaccccgaccagcccggcagctacagctgcatgtgcgagaccggctacagactggccgccgaccagcacagatgcgaggacgtggacgactgcatcctggagcccagcccctgcccccagagatgcgtgaacacccagggcggcttcgagtgccactgctaccccaactacgacctggtggacggcgagtgcgtggagcccgtggacccctgcttcagagccaactgcgagtaccagtgccagcccctgaaccagaccagctacctgtgcgtgtgcgccgagggcttcgcccccatcccccacgagccccacagatgccagatgttctgcaaccagaccgcctgccccgccgactgcgaccccaacacccaggccagctgcgagtgccccgagggctacatcctggacgacggcttcatctgcaccgacatcgacgagtgcgagaacggcggcttctgcagcggcgtgtgccacaacctgcccggcaccttcgagtgcatctgcggccccgacagcgccctggccagacacatcggcaccgactgcgacagcggcaaggtggacggcggcgacagcggcagcggcgagcccccccccagccccacccccggcagcaccctgaccccccccgccgtgggcctggtgcacagcggcctgctgatcggcatcagcatcgccagcctgtgcctggtggtggccctgctggccctgctgtgccacctgagaaagaagcagggcgccgccagagccaagatggagtacaagtgcgccgcccccagcaaggaggtggtgctgcagcacgtgagaaccgagagaaccccccagagactgtag

SEQ ID NO: 2219 - DNA, 1062 bp, synthetic construct
  misc_feature 1..1062: note = source = /note="Description of Artificial Sequence: Synthetic coding sequence"
  source 1..1062: mol_type = other DNA
atggagctgaccgagctgctgctggtggtgatgctgctgctgaccgccagactgaccctgagcagccccgccccccccgcctgcgacctgagagtgctgagcaagctgctgagagacagccacgtgctgcacagcagactgagccagtgccccgaggtgcaccccctgcccacccccgtgctgctgcccgccgtggacttcagcctgggcgagtggaagacccagatggaggagaccaaggcccaggacatcctgggcgccgtgaccctgctgctggagggcgtgatggccgccagaggccagctgggccccacctgcctgagcagcctgctgggccagctgagcggccaggtgagactgctgctgggcgccctgcagagcctgctgggcacccagctgcccccccagggcagaaccaccgcccacaaggaccccaacgccatcttcctgagcttccagcacctgctgagaggcaaggtgagattcctgatgctggtgggcggcagcaccctgtgcgtgagaagagccccccccaccaccgccgtgcccagcagaaccagcctggtgctgaccctgaacgagctgcccaacagaaccagcggcctgctggagaccaacttcaccgccagcgccagaaccaccggcagcggcctgctgaagtggcagcagggcttcagagccaagatccccggcctgctgaaccagaccagcagaagcctggaccagatccccggctacctgaacagaatccacgagctgctgaacggcaccagaggcctgttccccggccccagcagaagaaccctgggcgcccccgacatcagcagcggcaccagcgacaccggcagcctgccccccaacctgcagcccggctacagccccagccccacccacccccccaccggccagtacaccctgttccccctgccccccaccctgcccacccccgtggtgcagctgcaccccctgctgcccgaccccagcgcccccacccccacccccaccagccccctgctgaacaccagctacacccacagccagaacctgagccaggagggctag

SEQ ID NO: 2220 - DNA, 945 bp, synthetic construct
  misc_feature 1..945: note = source = /note="Description of Artificial Sequence: Synthetic coding sequence"
  source 1..945: mol_type = other DNA
atggagctgaccgagctgctgctggtggtgatgctgctgctgaccgccagactgaccctgagcagccccgccccccccgcctgcgacctgagagtgctgagcaagctgctgagagacagccacgtgctgcacagcagactgagccagtgccccgaggtgcaccccctgcccacccccgtgctgctgcccgccgtggacttcagcctgggcgagtggaagacccagatggaggagaccaaggcccaggacatcctgggcgccgtgaccctgctgctggagggcgtgatggccgccagaggccagctgggccccacctgcctgagcagcctgctgggccagctgagcggccaggtgagactgctgctgggcgccctgcagagcctgctgggcacccagctgcccccccagggcagaaccaccgcccacaaggaccccaacgccatcttcctgagcttccagcacctgctgagaggcaagaccagcggcctgctggagaccaacttcaccgccagcgccagaaccaccggcagcggcctgctgaagtggcagcagggcttcagagccaagatccccggcctgctgaaccagaccagcagaagcctggaccagatccccggctacctgaacagaatccacgagctgctgaacggcaccagaggcctgttccccggccccagcagaagaaccctgggcgcccccgacatcagcagcggcaccagcgacaccggcagcctgccccccaacctgcagcccggctacagccccagccccacccacccccccaccggccagtacaccctgttccccctgccccccaccctgcccacccccgtggtgcagctgcaccccctgctgcccgaccccagcgcccccacccccacccccaccagccccctgctgaacaccagctacacccacagccagaacctgagccaggagggctag

SEQ ID NO: 2221 - DNA, 861 bp, synthetic construct
  misc_feature 1..861: note = source = /note="Description of Artificial Sequence: Synthetic coding sequence"
  source 1..861: mol_type = other DNA
atggagctgaccgagctgctgctggtggtgatgctgctgctgaccgccagactgaccctgagcagccccgccccccccgcctgcgacctgagagtgctgagcaagctgctgagagacagccacgtgctgcacagcagactgagccagtgccccgaggtgcaccccctgcccacccccgtgctgctgcccgccgtggacttcagcctgggcgagtggaagacccagatggaggagaccaaggcccaggacatcctgggcgccgtgaccctgctgctggagggcgtgatggccgccagaggccagctgggccccacctgcctgagcagcctgctgggccagctgagcggccaggtgagactgctgctgggcgccctgcagagcctgctgggcacccagctgcccccccagggcagaaccaccgcccacaaggaccccaacgccatcttcctgagcttccagcacctgctgagaggcaaggacttctggatcgtgggcgacaagctgcactgcctgagccagaactactggctgtgggccagcgaggtggccgccggcatccagagccaggacagctggagcgccgagcccaacctgcaggtgcccggccccaaccccagaatccccgagcaggacaccagaaccctggagtggaacagctggaccctgagctggaccctgacccaggaccccagaagccccggccacttcctgagaaacatcagacacagactgcccgccacccagccccccgcctggatcttcagcttccccaaccccagcagctactggaccgtgtacgccctgcccagcagcacccacctggcccacccctgcggccccgcccccccccccgccagctag

SEQ ID NO: 2222 - DNA, 1050 bp, synthetic construct
  misc_feature 1..1050: note = source = /note="Description of Artificial Sequence: Synthetic coding sequence"
  source 1..1050: mol_type = other DNA
atggagctgaccgagctgctgctggtggtgatgctgctgctgaccgccagactgaccctgagcagccccgccccccccgcctgcgacctgagagtgctgagcaagctgctgagagacagccacgtgctgcacagcagactgagccagtgccccgaggtgcaccccctgcccacccccgtgctgctgcccgccgtggacttcagcctgggcgagtggaagacccagatggaggagaccaaggcccaggacatcctgggcgccgtgaccctgctgctggagggcgtgatggccgccagaggccagctgggccccacctgcctgagcagcctgctgggccagctgagcggccaggtgagactgctgctgggcgccctgcagagcctgctgggcacccagggcagaaccaccgcccacaaggaccccaacgccatcttcctgagcttccagcacctgctgagaggcaaggtgagattcctgatgctggtgggcggcagcaccctgtgcgtgagaagagccccccccaccaccgccgtgcccagcagaaccagcctggtgctgaccctgaacgagctgcccaacagaaccagcggcctgctggagaccaacttcaccgccagcgccagaaccaccggcagcggcctgctgaagtggcagcagggcttcagagccaagatccccggcctgctgaaccagaccagcagaagcctggaccagatccccggctacctgaacagaatccacgagctgctgaacggcaccagaggcctgttccccggccccagcagaagaaccctgggcgcccccgacatcagcagcggcaccagcgacaccggcagcctgccccccaacctgcagcccggctacagccccagccccacccacccccccaccggccagtacaccctgttccccctgccccccaccctgcccacccccgtggtgcagctgcaccccctgctgcccgaccccagcgcccccacccccacccccaccagccccctgctgaacaccagctacacccacagccagaacctgagccaggagggctag

SEQ ID NO: 2223 - DNA, 963 bp, synthetic construct
  misc_feature 1..963: note = source = /note="Description of Artificial Sequence: Synthetic coding sequence"
  source 1..963: mol_type = other DNA
atgcccatgtaccaggtgaagccctaccacggcggcggcgcccccctgagagtggagctgcccacctgcatgtacagactgcccaacgtgcacggcagaagctacggccccgcccccggcgccggccacgtgcaggaggagagcaacctgagcctgcaggccctggagagcagacaggacgacatcctgaagagactgtacgagctgaaggccgccgtggacggcctgagcaagatgatccagacccccgacgccgacctggacgtgaccaacatcatccaggccgacgagcccaccaccctgaccaccaacgccctggacctgaacagcgtgctgggcaaggactacggcgccctgaaggacatcgtgatcaacgccaaccccgccagcccccccctgagcctgctggtgctgcacagactgctgtgcgagcacttcagagtgctgagcaccgtgcacacccacagcagcgtgaagagcgtgcccgagaacctgctgaagtgcttcggcgagcagaacaagaagcagcccagacaggactaccagctgggcttcaccctgatctggaagaacgtgcccaagacccagatgaagttcagcatccagaccatgtgccccatcgagggcgagggcaacatcgccagattcctgttcagcctgttcggccagaagcacaacgccgtgaacgccaccctgatcgacagctgggtggacatcgccatcttccagctgaaggagggcagcagcaaggagaaggccgccgtgttcagaagcatgaacagcgccctgggcaagagcccctggctggccggcaacgagctgaccgtggccgacgtggtgctgtggagcgtgctgcagcagatcggcggctgcagcgtgaccgtgcccgccaacgtgcagagatggatgagaagctgcgagaacctggcccccttcaacaccgccctgaagctgctgaagtag

SEQ ID NO: 2224 - DNA, 1068 bp, synthetic construct
  misc_feature 1..1068: note = source = /note="Description of Artificial Sequence: Synthetic coding sequence"
  source 1..1068: mol_type = other DNA
atggagagactgtggggcctgttccagagagcccagcagctgagccccagaagcagccagaccgtgtaccagagagtggagggccccagaaagggccacctggaggaggaggaggaggacggcgaggagggcgccgagaccctggcccacttctgccccatggagctgagaggccccgagcccctgggcagcagacccagacagcccaacctgatcccctgggccgccgccggcagaagagccgccccctacctggtgctgaccgccctgctgatcttcaccggcgccttcctgctgggctacgtggccttcagaggcagctgccaggcctgcggcgacagcgtgctggtggtgagcgaggacgtgaactacgagcccgacctggacttccaccagggcagactgtactggagcgacctgcaggccatgttcctgcagttcctgggcgagggcagactggaggacaccatcagacagaccagcctgagagagagagtggccggcagcgccggcatggccgccctgacccaggacatcagagccgccctgagcagacagaagctggaccacgtgtggaccgacacccactacgtgggcctgcagttccccgaccccgcccaccccaacaccctgcactgggtggacgaggccggcaaggtgggcgagcagctgcccctggaggaccccgacgtgtactgcccctacagcgccatcggcaacgtgaccggcgagctggtgtacgcccactacggcagacccgaggacctgcaggacctgagagccagaggcgtggaccccgtgggcagactgctgctggtgagagtgggcgtgatcagcttcgcccagaaggaggcccagagaccctgcggcccccccagaatggccggcgagccccccagactgcccctgagccccggccccagagccaccaccgccgccagcggccagcagagccaggacctgcacccccaccagcagcacctgagactgcacagaagacccctgagagccagaagcctgagatgccacagaggccccgagggctgcatgggccccagaagcagctag

SEQ ID NO: 2225 - DNA, 2406 bp, synthetic construct
  misc_feature 1..2406: note = source = /note="Description of Artificial Sequence: Synthetic coding sequence"
  source 1..2406: mol_type = other DNA
atggagagactgtggggcctgttccagagagcccagcagctgagccccagaagcagccagaccgtgtaccagagagtggagggccccagaaagggccacctggaggaggaggaggaggacggcgaggagggcgccgagaccctggcccacttctgccccatggagctgagaggccccgagcccctgggcagcagacccagacagcccaacctgatcccctgggccgccgccggcagaagagccgccccctacctggtgctgaccgccctgctgatcttcaccggcgccttcctgctgggctacgtggccttcagaggcagctgccaggcctgcggcgacagcgtgctggtggtgagcgaggacgtgaactacgagcccgacctggacttccaccagggcagactgtactggagcgacctgcaggccatgttcctgcagttcctgggcgagggcagactggaggacaccatcagacagaccagcctgagagagagagtggccggcagcgccggcatggccgccctgacccaggacatcagagccgccctgagcagacagaagctggaccacgtgtggaccgacacccactacgtgggcctgcagttccccgaccccgcccaccccaacaccctgcactgggtggacgaggccggcaaggtgggcgagcagctgcccctggaggaccccgacgtgtactgcccctacagcgccatcggcaacgtgaccggcgagctggtgtacgcccactacggcagacccgaggacctgcaggacctgagagccagaggcgtggaccccgtgggcagactgctgctggtgagagtgggcgtgatcagcttcgcccagaaggtgaccaacgcccaggacttcggcgcccagggcgtgctgatctaccccgagcccgccgacttcagccaggacccccccaagcccagcctgagcagccagcaggccgtgtacggccacgtgcacctgggcaccggcgacccctacacccccggcttccccagcttcaaccagacccagttcccccccgtggccagcagcggcctgcccagcatccccgcccagcccatcagcgccgacatcgccagcagactgctgagaaagctgaagggccccgtggccccccaggagtggcagggcagcctgctgggcagcccctaccacctgggccccggccccagactgagactggtggtgaacaaccacagaaccagcacccccatcaacaacatcttcggctgcatcgagggcagaagcgagcccgaccactacgtggtgatcggcgcccagagagacgcctggggccccggcgccgccaagagcgccgtgggcaccgccatcctgctggagctggtgagaaccttcagcagcatggtgagcaacggcttcagacccagaagaagcctgctgttcatcagctgggacggcggcgacttcggcagcgtgggcagcaccgagtggctggagggctacctgagcgtgctgcacctgaaggccgtggtgtacgtgagcctggacaacgccgtgctgggcgacgacaagttccacgccaagaccagccccctgctgaccagcctgatcgagagcgtgctgaagcaggtggacagccccaaccacagcggccagaccctgtacgagcaggtggtgttcaccaaccccagctgggacgccgaggtgatcagacccctgcccatggacagcagcgcctacagcttcaccgccttcgtgggcgtgcccgccgtggagttcagcttcatggaggacgaccaggcctaccccttcctgcacaccaaggaggacacctacgagaacctgcacaaggtgctgcagggcagactgcccgccgtggcccaggccgtggcccagctggccggccagctgctgatcagactgagccacgacagactgctgcccctggacttcggcagatacggcgacgtggtgctgagacacatcggcaacctgaacgagttcagcggcgacctgaaggccagaggcctgaccctgcagtgggtgtacagcgccagaggcgactacatcagagccgccgagaagctgagacaggagatctacagcagcgaggagagagacgagagactgaccagaatgtacaacgtgagaatcatgagagtggagttctacttcctgagccagtacgtgagccccgccgacagccccttcagacacatcttcatgggcagaggcgaccacaccctgggcgccctgctggaccacctgagactgctgagaagcaacagcagcggcacccccggcgccaccagcagcaccggcttccaggagagcagattcagaagacagctggccctgctgacctggaccctgcagggcgccgccaacgccctgagcggcgacgtgtggaacatcgacaacaacttctag

SEQ ID NO: 2226 - DNA, 1029 bp, synthetic construct
  misc_feature 1..1029: note = source = /note="Description of Artificial Sequence: Synthetic coding sequence"
  source 1..1029: mol_type = other DNA
atggtgagcaacggcttcagacccagaagaagcctgctgttcatcagctgggacggcggcgacttcggcagcgtgggcagcaccgagtggctggagggctacctgagcgtgctgcacctgaaggccgtggtgtacgtgagcctggacaacgccgtgctgggcgacgacaagttccacgccaagaccagccccctgctgaccagcctgatcgagagcgtgctgaagcaggtggacagccccaaccacagcggccagaccctgtacgagcaggtggtgttcaccaaccccagctgggacgccgaggtgatcagacccctgcccatggacagcagcgcctacagcttcaccgccttcgtgggcgtgcccgccgtggagttcagcttcatggaggacgaccaggcctaccccttcctgcacaccaaggaggacacctacgagaacctgcacaaggtgctgcagggcagactgcccgccgtggcccaggccgtggcccagctggccggccagctgctgatcagactgagccacgacagactgctgcccctggacttcggcagatacggcgacgtggtgctgagacacatcggcaacctgaacgagttcagcggcgacctgaaggccagaggcctgaccctgcagtgggtgtacagcgccagaggcgactacatcagagccgccgagaagctgagacaggagatctacagcagcgaggagagagacgagagactgaccagaatgtacaacgtgagaatcatgagagtggagttctacttcctgagccagtacgtgagccccgccgacagccccttcagacacatcttcatgggcagaggcgaccacaccctgggcgccctgctggaccacctgagactgctgagaagcaacagcagcggcacccccggcgccaccagcagcaccggcttccaggagagcagattcagaagacagctggccctgctgacctggaccctgcagggcgccgccaacgccctgagcggcgacgtgtggaacatcgacaacaacttctag

SEQ ID NO: 2227 - DNA, 1596 bp, synthetic construct
  misc_feature 1..1596: note = source = /note="Description of Artificial Sequence: Synthetic coding sequence"
  source 1..1596: mol_type = other DNA
atggccgccaccctggacctgaagagcaaggaggagaaggacgccgagctggacaagagaatcgaggccctgagaagaaagaacgaggccctgatcagaagataccaggagatcgaggaggacagaaagaaggccgagctggagggcgtggccgtgaccgcccccagaaagggcagaagcgtggagaaggagaacgtggccgtggagagcgagaagaacctgggccccagcagaagaagccccggcacccccagaccccccggcgccagcaagggcggcagaacccccccccagcagggcggcagagccggcatgggcagagccagcagaagctgggagggcagccccggcgagcagcccagaggcggcggcgccggcggcagaggcagaagaggcagaggcagaggcagcccccacctgagcggcgccggcgacaccagcatcagcgacagaaagagcaaggagtgggaggagagaagaagacagaacatcgagaagatgaacgaggagatggagaagatcgccgagtacgagagaaaccagagagagggcgtgctggagcccaaccccgtgagaaacttcctggacgaccccagaagaagaagcggccccctggaggagagcgagagagacagaagagaggagagcagaagacacggcagaaactggggcggccccgacttcgagagagtgagatgcggcctggagcacgagagacagggcagaagagccggcctgggcagcgccggcgacatgaccctgagcatgaccggcagagagagaagcgagtacctgagatggaagcaggagagagagaagatcgaccaggagagactgcagagacacagaaagcccaccggccagtggagaagagagtgggacgccgagaagaccgacggcatgttcaaggacggccccgtgcccgcccacgagcccagccacagatacgacgaccaggcctgggccagaccccccaagccccccaccttcggcgagttcctgagccagcacaaggccgaggccagcagcagaagaagaagaaagagcagcagaccccaggccaaggccgcccccagagcctacagcgaccacgacgacagatgggagaccaaggagggcgccgccagccccgcccccgagaccccccagcccaccagccccgagaccagccccaaggagacccccatgcagccccccgagatccccgcccccgcccacagaccccccgaggacgagggcgaggagaacgagggcgaggaggacgaggagtgggaggacatcagcgaggacgaggaggaggaggagatcgaggtggaggagggcgacgaggaggagcccgcccaggaccaccaggcccccgaggccgcccccaccggcatcccctgcagcgagcaggcccacggcgtgcccttcagccccgaggagcccctgctggagccccaggcccccggcacccccagcagccccttcagcccccccagcggccaccagcccgtgagcgactggggcgaggaggtggagctgaacagccccagaaccacccacctggccggcgccctgagccccggcgaggcctggcccttcgagagcgtgtag

SEQ ID NO: 2228 - DNA, 1329 bp, synthetic construct
  misc_feature 1..1329: note = source = /note="Description of Artificial Sequence: Synthetic coding sequence"
  source 1..1329: mol_type = other DNA
atgcactactgcgtgctgagcgccttcctgatcctgcacctggtgaccgtggccctgagcctgagcacctgcagcaccctggacatggaccagttcatgagaaagagaatcgaggccatcagaggccagatcctgagcaagctgaagctgaccagcccccccgaggactaccccgagcccgaggaggtgccccccgaggtgatcagcatctacaacagcaccagagacctgctgcaggagaaggccagcagaagagccgccgcctgcgagagagagagaagcgacgaggagtactacgccaaggaggtgtacaagatcgacatgccccccttcttccccagcgagaccgtgtgccccgtggtgaccacccccagcggcagcgtgggcagcctgtgcagcagacagagccaggtgctgtgcggctacctggacgccatcccccccaccttctacagaccctacttcagaatcgtgagattcgacgtgagcgccatggagaagaacgccagcaacctggtgaaggccgagttcagagtgttcagactgcagaaccccaaggccagagtgcccgagcagagaatcgagctgtaccagatcctgaagagcaaggacctgaccagccccacccagagatacatcgacagcaaggtggtgaagaccagagccgagggcgagtggctgagcttcgacgtgaccgacgccgtgcacgagtggctgcaccacaaggacagaaacctgggcttcaagatcagcctgcactgcccctgctgcaccttcgtgcccagcaacaactacatcatccccaacaagagcgaggagctggaggccagattcgccggcatcgacggcaccagcacctacaccagcggcgaccagaagaccatcaagagcaccagaaagaagaacagcggcaagaccccccacctgctgctgatgctgctgcccagctacagactggagagccagcagaccaacagaagaaagaagagagccctggacgccgcctactgcttcagaaacgtgcaggacaactgctgcctgagacccctgtacatcgacttcaagagagacctgggctggaagtggatccacgagcccaagggctacaacgccaacttctgcgccggcgcctgcccctacctgtggagcagcgacacccagcacagcagagtgctgagcctgtacaacaccatcaaccccgaggccagcgccagcccctgctgcgtgagccaggacctggagcccctgaccatcctgtactacatcggcaagacccccaagatcgagcagctgagcaacatgatcgtgaagagctgcaagtgcagctag

SEQ ID NO: 2229 - DNA, 1245 bp, synthetic construct
  misc_feature 1..1245: note = source = /note="Description of Artificial Sequence: Synthetic coding sequence"
  source 1..1245: mol_type = other DNA
atgcactactgcgtgctgagcgccttcctgatcctgcacctggtgaccgtggccctgagcctgagcacctgcagcaccctggacatggaccagttcatgagaaagagaatcgaggccatcagaggccagatcctgagcaagctgaagctgaccagcccccccgaggactaccccgagcccgaggaggtgccccccgaggtgatcagcatctacaacagcaccagagacctgctgcaggagaaggccagcagaagagccgccgcctgcgagagagagagaagcgacgaggagtactacgccaaggaggtgtacaagatcgacatgccccccttcttccccagcgagaacgccatcccccccaccttctacagaccctacttcagaatcgtgagattcgacgtgagcgccatggagaagaacgccagcaacctggtgaaggccgagttcagagtgttcagactgcagaaccccaaggccagagtgcccgagcagagaatcgagctgtaccagatcctgaagagcaaggacctgaccagccccacccagagatacatcgacagcaaggtggtgaagaccagagccgagggcgagtggctgagcttcgacgtgaccgacgccgtgcacgagtggctgcaccacaaggacagaaacctgggcttcaagatcagcctgcactgcccctgctgcaccttcgtgcccagcaacaactacatcatccccaacaagagcgaggagctggaggccagattcgccggcatcgacggcaccagcacctacaccagcggcgaccagaagaccatcaagagcaccagaaagaagaacagcggcaagaccccccacctgctgctgatgctgctgcccagctacagactggagagccagcagaccaacagaagaaagaagagagccctggacgccgcctactgcttcagaaacgtgcaggacaactgctgcctgagacccctgtacatcgacttcaagagagacctgggctggaagtggatccacgagcccaagggctacaacgccaacttctgcgccggcgcctgcccctacctgtggagcagcgacacccagcacagcagagtgctgagcctgtacaacaccatcaaccccgaggccagcgccagcccctgctgcgtgagccaggacctggagcccctgaccatcctgtactacatcggcaagacccccaagatcgagcagctgagcaacatgatcgtgaagagctgcaagtgcagctag

SEQ ID NO: 2230 - DNA, 1239 bp, synthetic construct
  misc_feature 1..1239: note = source = /note="Description of Artificial Sequence: Synthetic coding sequence"
  source 1..1239: mol_type = other DNA
atgaagatgcacctgcagagagccctggtggtgctggccctgctgaacttcgccaccgtgagcctgagcctgagcacctgcaccaccctggacttcggccacatcaagaagaagagagtggaggccatcagaggccagatcctgagcaagctgagactgaccagcccccccgagcccaccgtgatgacccacgtgccctaccaggtgctggccctgtacaacagcaccagagagctgctggaggagatgcacggcgagagagaggagggctgcacccaggagaacaccgagagcgagtactacgccaaggagatccacaagttcgacatgatccagggcctggccgagcacaacgagctggccgtgtgccccaagggcatcaccagcaaggtgttcagattcaacgtgagcagcgtggagaagaacagaaccaacctgttcagagccgagttcagagtgctgagagtgcccaaccccagcagcaagagaaacgagcagagaatcgagctgttccagatcctgagacccgacgagcacatcgccaagcagagatacatcggcggcaagaacctgcccaccagaggcaccgccgagtggctgagcttcgacgtgaccgacaccgtgagagagtggctgctgagaagagagagcaacctgggcctggagatcagcatccactgcccctgccacaccttccagcccaacggcgacatcctggagaacatccacgaggtgatggagatcaagttcaagggcgtggacaacgaggacgaccacggcagaggcgacctgggcagactgaagaagcagaaggaccaccacaacccccacctgatcctgatgatgatccccccccacagactggacaaccccggccagggcggccagagaaagaagagagccctggacaccaactactgcttcagaaacctggaggagaactgctgcgtgagacccctgtacatcgacttcagacaggacctgggctggaagtgggtgcacgagcccaagggctactacgccaacttctgcagcggcccctgcccctacctgagaagcgccgacaccacccacagcaccgtgctgggcctgtacaacaccctgaaccccgaggccagcgccagcccctgctgcgtgccccaggacctggagcccctgaccatcctgtactacgtgggcagaacccccaaggtggagcagctgagcaacatggtggtgaagagctgcaagtgcagctag

SEQ ID NO: 2231 - DNA, 930 bp, synthetic construct
  misc_feature 1..930: note = source = /note="Description of Artificial Sequence: Synthetic coding sequence"
  source 1..930: mol_type = other DNA
atgaagatgcacctgcagagagccctggtggtgctggccctgctgaacttcgccaccgtgagcctgagcctgagcacctgcaccaccctggacttcggccacatcaagaagaagagagtggaggccatcagaggccagatcctgagcaagctgagactgaccagcccccccgagcccaccgtgatgacccacgtgccctaccaggtgctggccctgtacaacagcaccagagagctgctggaggagatgcacggcgagagagaggagggctgcacccaggagaacaccgagagcgagtactacgccaaggagatccacaagttcgacatgatccagggcctggccgagcacaacgagctggccgtgtgccccaagggcatcaccagcaaggtgttcagattcaacgtgagcagcgtggagaagaacagaaccaacctgttcagagccgagttcagagtgctgagagtgcccaaccccagcagcaagagaaacgagcagagaatcgagctgttccagatcctgagacccgacgagcacatcgccaagcagagatacatcggcggcaagaacctgcccaccagaggcaccgccgagtggctgagcttcgacgtgaccgacaccgtgagagagtggctgctgagaagagagagcaacctgggcctggagatcagcatccactgcccctgccacaccttccagcccaacggcgacatcctggagaacatccacgaggtgatggagatcaagttcaagggcgtggacaacgaggacgaccacggcagaggcgacctgggcagactgaagaagcagaaggaccaccacaacccccacctgatcctgatgatgatccccccccacagactggacaaccccggccagggcggccagagaaagaagagagccctggacaccaactactgcttcagatag

SEQ ID NO: 2232 - DNA, 444 bp, synthetic construct
  misc_feature 1..444: note = source = /note="Description of Artificial Sequence: Synthetic coding sequence"
  source 1..444: mol_type = other DNA
atggccagccacagactgctgctgctgtgcctggccggcctggtgttcgtgagcgaggccggccccaccggcaccggcgagagcaagtgccccctgatggtgaaggtgctggacgccgtgagaggcagccccgccatcaacgtggccgtgcacgtgttcagaaaggccgccgacgacacctgggagcccttcgccagcggcaagaccagcgagagcggcgagctgcacggcctgaccaccgaggaggagttcgtggagggcatctacaaggtggagatcgacaccaagagctactggaaggccctgggcatcagccccttccacgagcacgccgaggtggtgttcaccgccaacgacagcggccccagaagatacaccatcgccgccctgctgagcccctacagctacagcaccaccgccgtggtgaccaaccccaaggagtag

SEQ ID NO: 2233 - DNA, 555 bp, synthetic construct
  misc_feature 1..555: note = source = /note="Description of Artificial Sequence: Synthetic coding sequence"
  source 1..555: mol_type = other DNA
atggccagccacagactgctgctgctgtgcctggccggcctggtgttcgtgagcgaggccggccccaccggcaccggcgagagcaagtgccccctgatggtgaaggtgctggacgccgtgagaggcagccccgccatcaacgtggccgtgcacgtgttcagaaaggccgccgacgacacctgggagcccttcgccagcggcaagaccagcgagagcggcgagctgcacggcctgaccaccgaggaggagttcgtggagggcatctacaaggtggagatcgacaccaagagctactggaaggccctgggcatcagccccttccacgagcacgccgaggtgagcatccagaccttcgaggccttccaggagatcctgtacaagaagaagttcaccaccctgtggcactggaccagcggcggccagagcttcttcagagccctggtggaggtggtgttcaccgccaacgacagcggccccagaagatacaccatcgccgccctgctgagcccctacagctacagcaccaccgccgtggtgaccaaccccaaggagtag

SEQ ID NO: 2234 - DNA, 420 bp, synthetic construct
  misc_feature 1..420: note = source = /note="Description of Artificial Sequence: Synthetic coding sequence"
  source 1..420: mol_type = other DNA
atggccagccacagactgctgctgctgtgcctggccggcctggtgttcgtgagcgaggccggccccaccggcaccggcgagagcaagtgccccctgatggtgaaggtgctggacgccgtgagaggcagccccgccatcaacgtggccgtgcacgtgttcagaaaggccgccgacgacacctgggagcccttcgccagcggcaagaccagcgagagcggcgagctgcacggcctgaccaccgaggaggagttcgtggagggcatctacaaggtggagatcgacaccaagagctactggaaggccctgggcatcagccccttccacgagcacgccgaggtggtgttcaccgccaacgacagcggccccagaagatactacagctacagcaccaccgccgtggtgaccaaccccaaggagtag

SEQ ID NO: 2235 - DNA, 996 bp, synthetic construct
  misc_feature 1..996: note = source = /note="Description of Artificial Sequence: Synthetic coding sequence"
  source 1..996: mol_type = other DNA
atgaacggcaccagaaactggtgcaccctggtggacgtgcaccccgaggaccaggccgccgtgtacctgaagggcagaagcggcgacaagatgatccacgagaagaacatcaaccagctgaagagcgaggtgcagtacatccaggaggccagaaactgcctgcagaagctgagagaggacatcagcagcaagctggacagaaacctgggcgacagcctgcacagacaggagatccaggtggtgctggagaagcccaacggcttcagccagagccccaccgccctgtacagcagcccccccgaggtggacacctgcatcaacgaggacgtggagagcctgagaaagaccgtgcaggacctgctggccaagctgcaggaggccaagagacagcaccagagcgactgcgtggccttcgaggtgaccctgagcagataccagagagaggccgagcagagcaacgtggccctgcagagagaggaggacagagtggagcagaaggaggccgaggtgggcgagctgcagagaagactgctgggcatggagaccgagcaccaggccctgctggccaaggtgagagagggcgaggtggccctggaggagctgagaagcaacaacgccgactgccaggccgagagagagaaggccgccaccctggagaaggaggtggccggcctgagagagaagatccaccacctggacgacatgctgaagagccagcagagaaaggtgagacagatgatcgagcagctgcagaacagcaaggccgtgatccagagcaaggacgccaccatccaggagctgaaggagaagatcgcctacctggaggccgagaacctggagatgcacgacagaatggagcacctgatcgagaagcagatcagccacggcaacttcagcacccaggccagagccaagaccgagaaccccggcagcatcagaatcagcaagccccccagccccaagcccatgcccgtgatcagagtggtggagacctag

SEQ ID NO: 2236 - DNA, 1098 bp, synthetic construct
  misc_feature 1..1098: note = source = /note="Description of Artificial Sequence: Synthetic coding sequence"
  source 1..1098: mol_type = other DNA
atgaacggcaccagaaactggtgcaccctggtggacgtgcaccccgaggaccaggccgccgccggcagaaagacctacgccatggtgagcagccacagcgccggccacagcctggccagcgagctggtggagagccacgacggccacgaggagatcatcaaggtgtacctgaagggcagaagcggcgacaagatgatccacgagaagaacatcaaccagctgaagagcgaggtgcagtacatccaggaggccagaaactgcctgcagaagctgagagaggacatcagcagcaagctggacagaaacctgggcgacagcctgcacagacaggagatccaggtggtgctggagaagcccaacggcttcagccagagccccaccgccctgtacagcagcccccccgaggtggacacctgcatcaacgaggacgtggagagcctgagaaagaccgtgcaggacctgctggccaagctgcaggaggccaagagacagcaccagagcgactgcgtggccttcgaggtgaccctgagcagataccagagagaggccgagcagagcaacgtggccctgcagagagaggaggacagagtggagcagaaggaggccgaggtgggcgagctgcagagaagactgctgggcatggagaccgagcaccaggccctgctggccaaggtgagagagggcgaggtggccctggaggagctgagaagcaacaacgccgactgccaggccgagagagagaaggccgccaccctggagaaggaggtggccggcctgagagagaagatccaccacctggacgacatgctgaagagccagcagagaaaggtgagacagatgatcgagcagctgcagaacagcaaggccgtgatccagagcaaggacgccaccatccaggagctgaaggagaagatcgcctacctggaggccgagaacctggagatgcacgacagaatggagcacctgatcgagaagcagatcagccacggcaacttcagcacccaggccagagccaagaccgagaaccccggcagcatcagaatcagcaagccccccagccccaagcccatgcccgtgatcagagtggtggagacctag

SEQ ID NO: 2237 - DNA, 1173 bp, synthetic construct
  misc_feature 1..1173: note = source = /note="Description of Artificial Sequence: Synthetic coding sequence"
  source 1..1173: mol_type = other DNA
atgaacggcaccagaaactggtgcaccctggtggacgtgcaccccgaggaccaggccgccggcagcgtggacatcctgagactgaccctgcagggcgagctgaccggcgacgagctggagcacatcgcccagaaggccggcagaaagacctacgccatggtgagcagccacagcgccggccacagcctggccagcgagctggtggagagccacgacggccacgaggagatcatcaaggtgtacctgaagggcagaagcggcgacaagatgatccacgagaagaacatcaaccagctgaagagcgaggtgcagtacatccaggaggccagaaactgcctgcagaagctgagagaggacatcagcagcaagctggacagaaacctgggcgacagcctgcacagacaggagatccaggtggtgctggagaagcccaacggcttcagccagagccccaccgccctgtacagcagcccccccgaggtggacacctgcatcaacgaggacgtggagagcctgagaaagaccgtgcaggacctgctggccaagctgcaggaggccaagagacagcaccagagcgactgcgtggccttcgaggtgaccctgagcagataccagagagaggccgagcagagcaacgtggccctgcagagagaggaggacagagtggagcagaaggaggccgaggtgggcgagctgcagagaagactgctgggcatggagaccgagcaccaggccctgctggccaaggtgagagagggcgaggtggccctggaggagctgagaagcaacaacgccgactgccaggccgagagagagaaggccgccaccctggagaaggaggtggccggcctgagagagaagatccaccacctggacgacatgctgaagagccagcagagaaaggtgagacagatgatcgagcagctgcagaacagcaaggccgtgatccagagcaaggacgccaccatccaggagctgaaggagaagatcgcctacctggaggccgagaacctggagatgcacgacagaatggagcacctgatcgagaagcagatcagccacggcaacttcagcacccaggccagagccaagaccgagaaccccggcagcatcagaatcagcaagccccccagccccaagcccatgcccgtgatcagagtggtggagacctag

SEQ ID NO: 2238 - DNA, 600 bp, synthetic construct
  misc_feature 1..600: note = source = /note="Description of Artificial Sequence: Synthetic coding sequence"
  source 1..600: mol_type = other DNA
atgaacggcaccagaaactggtgcaccctggtggacgtgcaccccgaggaccaggccgccgccggcagaaagacctacgccatggtgagcagccacagcgccggccacagcctggccagcgagctggtggagagccacgacggccacgaggagatcatcaaggtgtacctgaagggcagaagcggcgacaagatgatccacgagaagaacatcaaccagctgaagagcgaggtgcagtacatccaggaggccagaaactgcctgcagaagctgagagaggacatcagcagcaagctggacagaaacctgggcgacagcctgcacagacaggagatccaggtggtgctggagaagcccaacggcttcagccagagccccaccgccctgtacagcagcccccccgaggtggacacctgcatcaacgaggacgtggagagcctgagaaagaccgtgcaggacctgctggccaagctgcaggaggccaagagacagcaccagagcgactgcgtggccttcgaggtgaccctgagcagataccagagagaggccgagcagagcaacgtggccctgcagagagaggaggacagatgccccgagtag

SEQ ID NO: 2239 - DNA, 1230 bp, synthetic construct
  misc_feature 1..1230: note = source = /note="Description of Artificial Sequence: Synthetic coding sequence"
  source 1..1230: mol_type = other DNA
atgagcagccccggcatgaccagcctgcagctggagaaggaggagtgcatgcagtgcgtgccctgcagccccagaaccagagtggccctgctggagctgtacagagccatgtgccagggcagcgtggacatcctgagactgaccctgcagggcgagctgaccggcgacgagctggagcacatcgcccagaaggccggcagaaagacctacgccatggtgagcagccacagcgccggccacagcctggccagcgagctggtggagagccacgacggccacgaggagatcatcaaggtgtacctgaagggcagaagcggcgacaagatgatccacgagaagaacatcaaccagctgaagagcgaggtgcagtacatccaggaggccagaaactgcctgcagaagctgagagaggacatcagcagcaagctggacagaaacctgggcgacagcctgcacagacaggagatccaggtggtgctggagaagcccaacggcttcagccagagccccaccgccctgtacagcagcccccccgaggtggacacctgcatcaacgaggacgtggagagcctgagaaagaccgtgcaggacctgctggccaagctgcaggaggccaagagacagcaccagagcgactgcgtggccttcgaggtgaccctgagcagataccagagagaggccgagcagagcaacgtggccctgcagagagaggaggacagagtggagcagaaggaggccgaggtgggcgagctgcagagaagactgctgggcatggagaccgagcaccaggccctgctggccaaggtgagagagggcgaggtggccctggaggagctgagaagcaacaacgccgactgccaggccgagagagagaaggccgccaccctggagaaggaggtggccggcctgagagagaagatccaccacctggacgacatgctgaagagccagcagagaaaggtgagacagatgatcgagcagctgcagaacagcaaggccgtgatccagagcaaggacgccaccatccaggagctgaaggagaagatcgcctacctggaggccgagaacctggagatgcacgacagaatggagcacctgatcgagaagcagatcagccacggcaacttcagcacccaggccagagccaagaccgagaaccccggcagcatcagaatcagcaagccccccagccccaagcccatgcccgtgatcagagtggtggagacctag

SEQ ID NO: 2240 - DNA, 543 bp, synthetic construct
  misc_feature 1..543: note = source = /note="Description of Artificial Sequence: Synthetic coding sequence"
  source 1..543: mol_type = other DNA
atgaacggcaccagaaactggtgcaccctggtggacgtgcaccccgaggaccaggccgccgccggcagaaagacctacgccatggtgagcagccacagcgccggccacagcctggccagcgagctggtggagagccacgacggccacgaggagatcatcaaggtgtacctgaagggcagaagcggcgacaagatgatccacgagaagaacatcaaccagctgaagagcgaggtgcagtacatccaggaggccagaaactgcctgcagaagctgagagaggacatcagcagcaagctggacagaaacctgggcgacagcctgcacagacaggagatccaggtggtgctggagaagcccaacggcttcagccagagccccaccgccctgaaggccggcgacaccgacgtgcagagcgactggagaatgagctggggcaacgaggtgcccagcaccaacaccgcccagttcctggccaccaactgcctgttcttctacctgctgcacctgcagcccaccctgccctggccccccgccgacagatag

SEQ ID NO: 2241 - DNA, 1182 bp, synthetic construct
  misc_feature 1..1182: note = source = /note="Description of Artificial Sequence: Synthetic coding sequence"
  source 1..1182: mol_type = other DNA
atggaggagccccagagcgaccccagcgtggagccccccctgagccaggagaccttcagcgacctgtggaagctgctgcccgagaacaacgtgctgagccccctgcccagccaggccatggacgacctgatgctgagccccgacgacatcgagcagtggttcaccgaggaccccggccccgacgaggcccccagaatgcccgaggccgccccccccgtggcccccgcccccgccgcccccacccccgccgcccccgcccccgcccccagctggcccctgagcagcagcgtgcccagccagaagacctaccagggcagctacggcttcagactgggcttcctgcacagcggcaccgccaagagcgtgacctgcacctacagccccgccctgaacaagatgttctgccagctggccaagacctgccccgtgcagctgtgggtggacagcacccccccccccggcaccagagtgagagccatggccatctacaagcagagccagcacatgaccgaggtggtgagaagatgcccccaccacgagagatgcagcgacagcgacggcctggcccccccccagcacctgatcagagtggagggcaacctgagagtggagtacctggacgacagaaacaccttcagacacagcgtggtggtgccctacgagccccccgaggtgggcagcgactgcaccaccatccactacaactacatgtgcaacagcagctgcatgggcggcatgaacagaagacccatcctgaccatcatcaccctggaggacagcagcggcaacctgctgggcagaaacagcttcgaggtgagagtgtgcgcctgccccggcagagacagaagaaccgaggaggagaacctgagaaagaagggcgagccccaccacgagctgccccccggcagcaccaagagagccctgcccaacaacaccagcagcagcccccagcccaagaagaagcccctggacggcgagtacttcaccctgcagatcagaggcagagagagattcgagatgttcagagagctgaacgaggccctggagctgaaggacgcccaggccggcaaggagcccggcggcagcagagcccacagcagccacctgaagagcaagaagggccagagcaccagcagacacaagaagctgatgttcaagaccgagggccccgacagcgactag

SEQ ID NO: 2242 - DNA, 1032 bp, synthetic construct
  misc_feature 1..1032: note = source = /note="Description of Artificial Sequence: Synthetic coding sequence"
  source 1..1032: mol_type = other DNA
atggaggagccccagagcgaccccagcgtggagccccccctgagccaggagaccttcagcgacctgtggaagctgctgcccgagaacaacgtgctgagccccctgcccagccaggccatggacgacctgatgctgagccccgacgacatcgagcagtggttcaccgaggaccccggccccgacgaggcccccagaatgcccgaggccgccccccccgtggcccccgcccccgccgcccccacccccgccgcccccgcccccgcccccagctggcccctgagcagcagcgtgcccagccagaagacctaccagggcagctacggcttcagactgggcttcctgcacagcggcaccgccaagagcgtgacctgcacctacagccccgccctgaacaagatgttctgccagctggccaagacctgccccgtgcagctgtgggtggacagcacccccccccccggcaccagagtgagagccatggccatctacaagcagagccagcacatgaccgaggtggtgagaagatgcccccaccacgagagatgcagcgacagcgacggcctggcccccccccagcacctgatcagagtggagggcaacctgagagtggagtacctggacgacagaaacaccttcagacacagcgtggtggtgccctacgagccccccgaggtgggcagcgactgcaccaccatccactacaactacatgtgcaacagcagctgcatgggcggcatgaacagaagacccatcctgaccatcatcaccctggaggacagcagcggcaacctgctgggcagaaacagcttcgaggtgagagtgtgcgcctgccccggcagagacagaagaaccgaggaggagaacctgagaaagaagggcgagccccaccacgagctgccccccggcagcaccaagagagccctgcccaacaacaccagcagcagcccccagcccaagaagaagcccctggacggcgagtacttcaccctgcagaagaccttccccgccagacacggcggcagccacctgtag

SEQ ID NO: 2243 - DNA, 1149 bp, synthetic construct
  misc_feature 1..1149: note = source = /note="Description of Artificial Sequence: Synthetic coding sequence"
  source 1..1149: mol_type = other DNA
atggaggagccccagagcgaccccagcgtggagccccccctgagccaggagaccttcagcgacctgtggaagctgctgcccgagaacaacgtgctgagccccctgcccagccaggccatggacgacctgatgctgagccccgacgacatcgagcagtggttcaccgaggaccccggccccgacgaggcccccagaatgcccgaggccgccccccccgtggcccccgcccccgccgcccccacccccgccgcccccgcccccgcccccagctggcccctgagcagcagcgtgcccagccagaagacctaccagggcagctacggcttcagactgacctgcacctacagccccgccctgaacaagatgttctgccagctggccaagacctgccccgtgcagctgtgggtggacagcacccccccccccggcaccagagtgagagccatggccatctacaagcagagccagcacatgaccgaggtggtgagaagatgcccccaccacgagagatgcagcgacagcgacggcctggcccccccccagcacctgatcagagtggagggcaacctgagagtggagtacctggacgacagaaacaccttcagacacagcgtggtggtgccctacgagccccccgaggtgggcagcgactgcaccaccatccactacaactacatgtgcaacagcagctgcatgggcggcatgaacagaagacccatcctgaccatcatcaccctggaggacagcagcggcaacctgctgggcagaaacagcttcgaggtgagagtgtgcgcctgccccggcagagacagaagaaccgaggaggagaacctgagaaagaagggcgagccccaccacgagctgccccccggcagcaccaagagagccctgcccaacaacaccagcagcagcccccagcccaagaagaagcccctggacggcgagtacttcaccctgcagatcagaggcagagagagattcgagatgttcagagagctgaacgaggccctggagctgaaggacgcccaggccggcaaggagcccggcggcagcagagcccacagcagccacctgaagagcaagaagggccagagcaccagcagacacaagaagctgatgttcaagaccgagggccccgacagcgactag

SEQ ID NO: 2244 - DNA, 858 bp, synthetic construct
  misc_feature 1..858: note = source = /note="Description of Artificial Sequence: Synthetic coding sequence"
  source 1..858: mol_type = other DNA
atggaggagccccagagcgaccccagcgtggagccccccctgagccaggagaccttcagcgacctgtggaagctgctgcccgagaacaacgtgctgagccccctgcccagccaggccatggacgacctgatgctgagccccgacgacatcgagcagtggttcaccgaggaccccggccccgacgaggcccccagaatgcccgaggccgccccccccgtggcccccgcccccgccgcccccacccccgccgcccccgcccccgcccccagctggcccctgagcagcagcgtgcccagccagaagacctaccagggcagctacggcttcagactgggcttcctgcacagcggcaccgccaagagcgtgacctgcacctacagccccgccctgaacaagatgttctgccagctggccaagacctgccccgtgcagctgtgggtggacagcacccccccccccggcaccagagtgagagccatggccatctacaagcagagccagcacatgaccgaggtggtgagaagatgcccccaccacgagagatgcagcgacagcgacggcctggcccccccccagcacctgatcagagtggagggcaacctgagagtggagtacctggacgacagaaacaccttcagacacagcgtggtggtgccctacgagccccccgaggtgggcagcgactgcaccaccatccactacaactacatgtgcaacagcagctgcatgggcggcatgaacagaagacccatcctgaccatcatcaccctggaggacagcagacccagacaggtggaccacctgagaagcggcgtgcaggacagcctggccaacatcgccaagagccacctgtactag

SEQ ID NO: 2245 - DNA, 273 bp, synthetic construct
  misc_feature 1..273: note = source = /note="Description of Artificial Sequence: Synthetic coding sequence"
  source 1..273: mol_type = other DNA
atgttctgccagctggccaagacctgccccgtgcagctgtgggtggacagcacccccccccccggcaccagagtgagagccatggccatctacaagcagagccagcacatgaccgaggtggtgagaagatgcccccaccacgagagatgcagcgacagcgacggcctggcccccccccagcacctgatcagagtggagggcaacctgagagtggagtacctggacgacagaaacaccttcagacacagcgtggtgagcggcagaagaggctag

SEQ ID NO: 2246 - DNA, 135 bp, synthetic construct
  misc_feature 1..135: note = source = /note="Description of Artificial Sequence: Synthetic coding sequence"
  source 1..135: mol_type = other DNA
cccctgcccagccagagaagaaaccactggatggagaacatcagccccttcagccacctgaagagcaagaagggccagagcaccagcagacacaagaagctgatgttcaagaccgagggccccgacagcgactag

SEQ ID NO: 2247 - DNA, 1026 bp, synthetic construct
  misc_feature 1..1026: note = source = /note="Description of Artificial Sequence: Synthetic coding sequence"
  source 1..1026: mol_type = other DNA
atggaggagccccagagcgaccccagcgtggagccccccctgagccaggagaccttcagcgacctgtggaagctgctgcccgagaacaacgtgctgagccccctgcccagccaggccatggacgacctgatgctgagccccgacgacatcgagcagtggttcaccgaggaccccggccccgacgaggcccccagaatgcccgaggccgccccccccgtggcccccgcccccgccgcccccacccccgccgcccccgcccccgcccccagctggcccctgagcagcagcgtgcccagccagaagacctaccagggcagctacggcttcagactgggcttcctgcacagcggcaccgccaagagcgtgacctgcacctacagccccgccctgaacaagatgttctgccagctggccaagacctgccccgtgcagctgtgggtggacagcacccccccccccggcaccagagtgagagccatggccatctacaagcagagccagcacatgaccgaggtggtgagaagatgcccccaccacgagagatgcagcgacagcgacggcctggcccccccccagcacctgatcagagtggagggcaacctgagagtggagtacctggacgacagaaacaccttcagacacagcgtggtggtgccctacgagccccccgaggtgggcagcgactgcaccaccatccactacaactacatgtgcaacagcagctgcatgggcggcatgaacagaagacccatcctgaccatcatcaccctggaggacagcagcggcaacctgctgggcagaaacagcttcgaggtgagagtgtgcgcctgccccggcagagacagaagaaccgaggaggagaacctgagaaagaagggcgagccccaccacgagctgccccccggcagcaccaagagagccctgcccaacaacaccagcagcagcccccagcccaagaagaagcccctggacggcgagtacttcaccctgcaggaccagaccagcttccagaaggagaactgctag

SEQ ID NO: 2248 - DNA, 1182 bp, synthetic construct; identical to SEQ ID NO: 2241
  misc_feature 1..1182: note = source = /note="Description of Artificial Sequence: Synthetic coding sequence"
  source 1..1182: mol_type = other DNA

SEQ ID NO: 2249 - DNA, 1041 bp, synthetic construct
  misc_feature 1..1041: note = source = /note="Description of Artificial Sequence: Synthetic coding sequence"
  source 1..1041: mol_type = other DNA
atggaggagccccagagcgaccccagcgtggagccccccctgagccaggagaccttcagcgacctgtggaagctgctgcccgagaacaacgtgctgagccccctgcccagccaggccatggacgacctgatgctgagccccgacgacatcgagcagtggttcaccgaggaccccggccccgacgaggcccccagaatgcccgaggccgccccccccgtggcccccgcccccgccgcccccacccccgccgcccccgcccccgcccccagctggcccctgagcagcagcgtgcccagccagaagacctaccagggcagctacggcttcagactgggcttcctgcacagcggcaccgccaagagcgtgacctgcacctacagccccgccctgaacaagatgttctgccagctggccaagacctgccccgtgcagctgtgggtggacagcacccccccccccggcaccagagtgagagccatggccatctacaagcagagccagcacatgaccgaggtggtgagaagatgcccccaccacgagagatgcagcgacagcgacggcctggcccccccccagcacctgatcagagtggagggcaacctgagagtggagtacctggacgacagaaacaccttcagacacagcgtggtggtgccctacgagccccccgaggtgggcagcgactgcaccaccatccactacaactacatgtgcaacagcagctgcatgggcggcatgaacagaagacccatcctgaccatcatcaccctggaggacagcagcggcaacctgctgggcagaaacagcttcgaggtgagagtgtgcgcctgccccggcagagacagaagaaccgaggaggagaacctgagaaagaagggcgagccccaccacgagctgccccccggcagcaccaagagagccctgcccaacaacaccagcagcagcccccagcccaagaagaagcccctggacggcgagtacttcaccctgcagatgctgctggacctgagatggtgctacttcctgatcaacagcagctag

SEQ ID NO: 2250 - DNA, 387 bp, synthetic construct
  misc_feature 1..387: note = source = /note="Description of Artificial Sequence: Synthetic coding sequence"
  source 1..387: mol_type = other DNA
atggaggagccccagagcgaccccagcgtggagccccccctgagccaggagaccttcagcgacctgtggaagctgctgcccgagaacaacgtgctgagccccctgcccagccaggccatggacgacctgatgctgagccccgacgacatcgagcagtggttcaccgaggaccccggccccgacgaggcccccagaatgcccgaggccgccccccccgtggcccccgcccccgccgcccccacccccgccgcccccgcccccgcccccagctggcccctgagcagcagcgtgcccagccagaagacctaccagggcagctacggcttcagactgggcttcctgcacagcggcaccgccaagagcgtgacctgcacctacagcccctag

SEQ ID NO: 2251 - DNA, 498 bp, synthetic construct
  misc_feature 1..498: note = source = /note="Description of Artificial Sequence: Synthetic coding sequence"
  source 1..498: mol_type = other DNA
atggaggagccccagagcgaccccagcgtggagccccccctgagccaggagaccttcagcgacctgtggaagctgctgcccgagaacaacgtgctgagccccctgcccagccaggccatggacgacctgatgctgagccccgacgacatcgagcagtggttcaccgaggaccccggccccgacgaggcccccagaatgcccgaggccgccccccccgtggcccccgcccccgccgcccccacccccgccgcccccgcccccgcccccagctggcccctgagcagcagcgtgcccagccagaagacctaccagggcagctacggcttcagactgggcttcctgcacagcggcaccgccaagagcgtgacctgcacctacagccccgccctgaacaagatgttctgccagctggccaagacctgccccgtgcagctgtgggtggacagcacccccccccccggcaccagagtgagagccatggccatctacaagcagtag

SEQ ID NO: 2252 - DNA, 600 bp, synthetic construct
  misc_feature 1..600: note = source = /note="Description of Artificial Sequence: Synthetic coding sequence"
  source 1..600: mol_type = other DNA
atgttctgccagctggccaagacctgccccgtgcagctgtgggtggacagcacccccccccccggcaccagagtgagagccatggccatctacaagcagagccagcacatgaccgaggtggtgagaagatgcccccaccacgagagatgcagcgacagcgacggcctggcccccccccagcacctgatcagagtggagggcaacctgagagtggagtacctggacgacagaaacaccttcagacacagcgtggtggtgccctacgagccccccgaggtgggcagcgactgcaccaccatccactacaactacatgtgcaacagcagctgcatgggcggcatgaacagaagacccatcctgaccatcatcaccctggaggacagcagcggcaacctgctgggcagaaacagcttcgaggtgagagtgtgcgcctgccccggcagagacagaagaaccgaggaggagaacctgagaaagaagggcgagccccaccacgagctgccccccggcagcaccaagagagccctgcccaacaacaccagcagcagcccccagcccaagaagaagcccctggacggcgagtacttcaccctgcagtag

SEQ ID NO: 2253 - DNA, 468 bp, synthetic construct
  misc_feature 1..468: note = source = /note="Description of Artificial Sequence: Synthetic coding sequence"
  source 1..468: mol_type = other DNA
atggaggagccccagagcgaccccagcgtggagccccccctgagccaggagaccttcagcgacctgtggaagctgctgcccgagaacaacgtgctgtacagccccgccctgaacaagatgttctgccagctggccaagacctgccccgtgcagctgtgggtggacagcacccccccccccggcaccagagtgagagccatggccatctacaagcagagccagcacatgaccgaggtggtgagaagatgcccccaccacgagagatgcagcgacagcgacggcctggcccccccccagcacctgatcagagtggagggcaacctgagagtggagtacctggacgacagaaacaccttcagacacagcgtggtggtgccctacgagccccccgaggtgggcagcgactgcaccaccatccactacaactacatgtgcaacagcagctgcatgggcggcatgaacagatag

SEQ ID NO: 2254 - DNA, 468 bp, synthetic construct; identical to SEQ ID NO: 2253
  misc_feature 1..468: note = source = /note="Description of Artificial Sequence: Synthetic coding sequence"
  source 1..468: mol_type = other DNA

SEQ ID NO: 2255 - DNA, 1590 bp, synthetic construct
  misc_feature 1..1590: note = source = /note="Description of Artificial Sequence: Synthetic coding sequence"
  source 1..1590: mol_type = other DNA
atgctgctggccgtgctgtactgcctgctgtggagcttccagaccagcgccggccacttccccagagcctgcgtgagcagcaagaacctgatggagaaggagtgctgccccccctggagcggcgacagaagcccctgcggccagctgagcggcagaggcagctgccagaacatcctgctgagcaacgcccccctgggcccccagttccccttcaccggcgtggacgacagagagagctggcccagcgtgttctacaacagaacctgccagtgcagcggcaacttcatgggcttcaactgcggcaactgcaagttcggcttctggggccccaactgcaccgagagaagactgctggtgagaagaaacatcttcgacctgagcgcccccgagaaggacaagttcttcgcctacctgaccctggccaagcacaccatcagcagcgactacgtgatccccatcggcacctacggccagatgaagaacggcagcacccccatgttcaacgacatcaacatctacgacctgttcgtgtggatgcactactacgtgagcatggacgccctgctgggcggcagcgagatctggagagacatcgacttcgcccacgaggcccccgccttcctgccctggcacagactgttcctgctgagatgggagcaggagatccagaagctgaccggcgacgagaacttcaccatcccctactgggactggagagacgccgagaagtgcgacatctgcaccgacgagtacatgggcggccagcaccccaccaaccccaacctgctgagccccgccagcttcttcagcagctggcagatcgtgtgcagcagactggaggagtacaacagccaccagagcctgtgcaacggcacccccgagggccccctgagaagaaaccccggcaaccacgacaagagcagaacccccagactgcccagcagcgccgacgtggagttctgcctgagcctgacccagtacgagagcggcagcatggacaaggccgccaacttcagcttcagaaacaccctggagggcttcgccagccccctgaccggcatcgccgacgccagccagagcagcatgcacaacgccctgcacatctacatgaacggcaccatgagccaggtgcagggcagcgccaacgaccccatcttcctgctgcaccacgccttcgtggacagcatcttcgagcagtggctgagaagacacagacccctgcaggaggtgtaccccgaggccaacgcccccatcggccacaacagagagagctacatggtgcccttcatccccctgtacagaaacggcgacttcttcatcagcagcaaggacctgggctacgactacagctacctgcaggacagcgaccccgacagcttccaggactacatcaagagctacctggagcaggccagcagaatctggagctggctgctgggcgccgccatggtgggcgccgtgctgaccgccctgctggccggcctggtgagcctgctgtgcagacacaagagaaagcagctgcccgaggagaagcagcccctgctgatggagaaggaggactaccacagcctgtaccagagccacctgtag

SEQ ID NO: 2256 - DNA, 1365 bp, synthetic construct
  misc_feature 1..1365: note = source = /note="Description of Artificial Sequence: Synthetic coding sequence"
  source 1..1365: mol_type = other DNA
atggacccctacatgatccagatgagcagcaagggcaacctgcccagcatcctggacgtgcacgtgaacgtgggcggcagaagcagcgtgcccggcaagatgaagggcagaaaggccagatggagcgtgagacccagcgacatggccaagaagaccttcaaccccatcagagccatcgtggacaacatgaaggtgaagcccaaccccaacaagaccatgatcagcctgagcatcggcgaccccaccgtgttcggcaacctgcccaccgaccccgaggtgacccaggccatgaaggacgccctggacagcggcaagtacaacggctacgcccccagcatcggcttcctgagcagcagagaggagatcgccagctactaccactgccccgaggcccccctggaggccaaggacgtgatcctgaccagcggctgcagccaggccatcgacctgtgcctggccgtgctggccaaccccggccagaacatcctggtgcccagacccggcttcagcctgtacaagaccctggccgagagcatgggcatcgaggtgaagctgtacaacctgctgcccgagaagagctgggagatcgacctgaagcagctggagtacctgatcgacgagaagaccgcctgcctgatcgtgaacaaccccagcaacccctgcggcagcgtgttcagcaagagacacctgcagaagatcctggccgtggccgccagacagtgcgtgcccatcctggccgacgagatctacggcgacatggtgttcagcgactgcaagtacgagcccctggccaccctgagcaccgacgtgcccatcctgagctgcggcggcctggccaagagatggctggtgcccggctggagactgggctggatcctgatccacgacagaagagacatcttcggcaacgagatcagagacggcctggtgaagctgagccagagaatcctgggcccctgcaccatcgtgcagggcgccctgaagagcatcctgtgcagaacccccggcgagttctaccacaacaccctgagcttcctgaagagcaacgccgacctgtgctacggcgccctggccgccatccccggcctgagacccgtgagacccagcggcgccatgtacctgatggtgggcatcgagatggagcacttccccgagttcgagaacgacgtggagttcaccgagagactggtggccgagcagagcgtgcactgcctgcccgccacctgcttcgagtaccccaacttcatcagagtggtgatcaccgtgcccgaggtgatgatgctggaggcctgcagcagaatccaggagttctgcgagcagcactaccactgcgccgagggcagccaggaggagtgcgacaagtag

SEQ ID NO: 2257 - DNA, 1602 bp, synthetic construct
  misc_feature 1..1602: note = source = /note="Description of Artificial Sequence: Synthetic coding sequence"
  source 1..1602: mol_type = other DNA
atggccgtggagagccagggcggcagacccctggtgctgggcctgctgctgtgcgtgctgggccccgtggtgagccacgccggcaagatcctgctgatccccgtggacggcagccactggctgagcatgctgggcgccatccagcagctgcagcagagaggccacgagatcgtggtgctggcccccgacgccagcctgtacatcagagacggcgccttctacaccctgaagacctaccccgtgcccttccagagagaggacgtgaaggagagcttcgtgagcctgggccacaacgtgttcgagaacgacagcttcctgcagagagtgatcaagacctacaagaagatcaagaaggacagcgccatgctgctgagcggctgcagccacctgctgcacaacaaggagctgatggccagcctggccgagagcagcttcgacgtgatgctgaccgaccccttcctgccctgcagccccatcgtggcccagtacctgagcctgcccaccgtgttcttcctgcacgccctgccctgcagcctggagttcgaggccacccagtgccccaaccccttcagctacgtgcccagacccctgagcagccacagcgaccacatgaccttcctgcagagagtgaagaacatgctgatcgccttcagccagaacttcctgtgcgacgtggtgtacagcccctacgccaccctggccagcgagttcctgcagagagaggtgaccgtgcaggacctgctgagcagcgccagcgtgtggctgttcagaagcgacttcgtgaaggactaccccagacccatcatgcccaacatggtgttcgtgggcggcatcaactgcctgcaccagaaccccctgagccaggagttcgaggcctacatcaacgccagcggcgagcacggcatcgtggtgttcagcctgggcagcatggtgagcgagatccccgagaagaaggccatggccatcgccgacgccctgggcaagatcccccagaccgtgctgtggagatacaccggcaccagacccagcaacctggccaacaacaccatcctggtgaagtggctgccccagaacgacctgctgggccaccccatgaccagagccttcatcacccacgccggcagccacggcgtgtacgagagcatctgcaacggcgtgcccatggtgatgatgcccctgttcggcgaccagatggacaacgccaagagaatggagaccaagggcgccggcgtgaccctgaacgtgctggagatgaccagcgaggacctggagaacgccctgaaggccgtgatcaacgacaagagctacaaggagaacatcatgagactgagcagcctgcacaaggacagacccgtggagcccctggacctggccgtgttctgggtggagttcgtgatgagacacaagggcgccccccacctgagacccgccgcccacgacctgacctggtaccagtaccacagcctggacgtgatcggcttcctgctggccgtggtgctgaccgtggccttcatcaccttcaagtgctgcgcctacggctacagaaagtgcctgggcaagaagggcagagtgaagaaggcccacaagagcaagacccactag

SEQ ID NO: 2258 - DNA, 1335 bp, synthetic construct
  misc_feature 1..1335: note = source = /note="Description of Artificial Sequence: Synthetic coding sequence"
  source 1..1335: mol_type = other DNA
atggccgtggagagccagggcggcagacccctggtgctgggcctgctgctgtgcgtgctgggccccgtggtgagccacgccggcaagatcctgctgatccccgtggacggcagccactggctgagcatgctgggcgccatccagcagctgcagcagagaggccacgagatcgtggtgctggcccccgacgccagcctgtacatcagagacggcgccttctacaccctgaagacctaccccgtgcccttccagagagaggacgtgaaggagagcttcgtgagcctgggccacaacgtgttcgagaacgacagcttcctgcagagagtgatcaagacctacaagaagatcaagaaggacagcgccatgctgctgagcggctgcagccacctgctgcacaacaaggagctgatggccagcctggccgagagcagcttcgacgtgatgctgaccgaccccttcctgccctgcagccccatcgtggcccagtacctgagcctgcccaccgtgttcttcctgcacgccctgccctgcagcctggagttcgaggccacccagtgccccaaccccttcagctacgtgcccagacccctgagcagccacagcgaccacatgaccttcctgcagagagtgaagaacatgctgatcgccttcagccagaacttcctgtgcgacgtggtgtacagcccctacgccaccctggccagcgagttcctgcagagagaggtgaccgtgcaggacctgctgagcagcgccagcgtgtggctgttcagaagcgacttcgtgaaggactaccccagacccatcatgcccaacatggtgttcgtgggcggcatcaactgcctgcaccagaaccccctgagccaggagttcgaggcctacatcaacgccagcggcgagcacggcatcgtggtgttcagcctgggcagcatggtgagcgagatccccgagaagaaggccatggccatcgccgacgccctgggcaagatcccccagaccgtgctgtggagatacaccggcaccagacccagcaacctggccaacaacaccatcctggtgaagtggctgccccagaacgacctgctgggccaccccatgaccagagccttcatcacccacgccggcagccacggcgtgtacgagagcatctgcaacggcgtgcccatggtgatgatgcccctgttcggcgaccagatggacaacgccaagagaatggagaccaagggcgccggcgtgaccctgaacgtgctggagatgaccagcgaggacctggagaacgccctgaaggccgtgatcaacgacaagagaaagaagcagcagagcggcagacagatgtag

SEQ ID NO: 2259 - DNA, 1593 bp, synthetic construct
  misc_feature 1..1593: note = source = /note="Description of Artificial Sequence: Synthetic coding sequence"
  source 1..1593: mol_type = other DNA
atggccagagccggctggaccagccccgtgcccctgtgcgtgtgcctgctgctgacctgcggcttcgccgaggccggcaagctgctggtggtgcccatggacggcagccactggttcaccatgcagagcgtggtggagaagctgatcctgagaggccacgaggtggtggtggtgatgcccgaggtgagctggcagctggagagaagcctgaactgcaccgtgaagacctacagcaccagctacaccctggaggaccagaacagagagttcatggtgttcgcccacgcccagtggaaggcccaggcccagagcatcttcagcctgctgatgagcagcagcagcggcttcctggacctgttcttcagccactgcagaagcctgttcaacgacagaaagctggtggagtacctgaaggagagcagcttcgacgccgtgttcctggaccccttcgacacctgcggcctgatcgtggccaagtacttcagcctgcccagcgtggtgttcaccagaggcatcttctgccaccacctggaggagggcgcccagtgccccgcccccctgagctacgtgcccaacgacctgctgggcttcagcgacgccatgaccttcaaggagagagtgtggaaccacatcgtgcacctggaggaccacctgttctgccagtacctgttcagaaacgccctggagatcgccagcgagatcctgcagacccccgtgaccgcctacgacctgtacagccacaccagcatctggctgctgagaaccgacttcgtgctggactaccccaagcccgtgatgcccaacatgatcttcatcggcggcatcaactgccaccagggcaagcccctgcccatggagttcgaggcctacatcaacgccagcggcgagcacggcatcgtggtgttcagcctgggcagcatggtgagcgagatccccgagaagaaggccatggccatcgccgacgccctgggcaagatcccccagaccgtgctgtggagatacaccggcaccagacccagcaacctggccaacaacaccatcctggtgaagtggctgccccagaacgacctgctgggccaccccatgaccagagccttcatcacccacgccggcagccacggcgtgtacgagagcatctgcaacggcgtgcccatggtgatgatgcccctgttcggcgaccagatggacaacgccaagagaatggagaccaagggcgccggcgtgaccctgaacgtgctggagatgaccagcgaggacctggagaacgccctgaaggccgtgatcaacgacaagagctacaaggagaacatcatgagactgagcagcctgcacaaggacagacccgtggagcccctggacctggccgtgttctgggtggagttcgtgatgagacacaagggcgccccccacctgagacccgccgcccacgacctgacctggtaccagtaccacagcctggacgtgatcggcttcctgctggccgtggtgctgaccgtggccttcatcaccttcaagtgctgcgcctacggctacagaaagtgcctgggcaagaagggcagagtgaagaaggcccacaagagcaagacccactag

SEQ ID NO: 2260 - DNA, 1605 bp, synthetic construct
  misc_feature 1..1605: note = source = /note="Description of Artificial Sequence: Synthetic coding sequence"
  source 1..1605: mol_type = other DNA
atggccaccggcctgcaggtgcccctgccctggctggccaccggcctgctgctgctgctgagcgtgcagccctgggccgagagcggcaaggtgctggtggtgcccatcgacggcagccactggctgagcatgagagaggtgctgagagagctgcacgccagaggccaccaggccgtggtgctgacccccgaggtgaacatgcacatcaaggaggagaacttcttcaccctgaccacctacgccatcagctggacccaggacgagttcgacagacacgtgctgggccacacccagctgtacttcgagaccgagcacttcctgaagaagttcttcagaagcatggccatgctgaacaacatgagcctggtgtaccacagaagctgcgtggagctgctgcacaacgaggccctgatcagacacctgaacgccaccagcttcgacgtggtgctgaccgaccccgtgaacctgtgcgccgccgtgctggccaagtacctgagcatccccaccgtgttcttcctgagaaacatcccctgcgacctggacttcaagggcacccagtgccccaaccccagcagctacatccccagactgctgaccaccaacagcgaccacatgaccttcatgcagagagtgaagaacatgctgtaccccctggccctgagctacatctgccacgccttcagcgccccctacgccagcctggccagcgagctgttccagagagaggtgagcgtggtggacatcctgagccacgccagcgtgtggctgttcagaggcgacttcgtgatggactaccccagacccatcatgcccaacatggtgttcatcggcggcatcaactgcgccaacagaaagcccctgagccaggagttcgaggcctacatcaacgccagcggcgagcacggcatcgtggtgttcagcctgggcagcatggtgagcgagatccccgagaagaaggccatggccatcgccgacgccctgggcaagatcccccagaccgtgctgtggagatacaccggcaccagacccagcaacctggccaacaacaccatcctggtgaagtggctgccccagaacgacctgctgggccaccccatgaccagagccttcatcacccacgccggcagccacggcgtgtacgagagcatctgcaacggcgtgcccatggtgatgatgcccctgttcggcgaccagatggacaacgccaagagaatggagaccaagggcgccggcgtgaccctgaacgtgctggagatgaccagcgaggacctggagaacgccctgaaggccgtgatcaacgacaagagctacaaggagaacatcatgagactgagcagcctgcacaaggacagacccgtggagcccctggacctggccgtgttctgggtggagttcgtgatgagacacaagggcgccccccacctgagacccgccgcccacgacctgacctggtaccagtaccacagcctggacgtgatcggcttcctgctggccgtggtgctgaccgtggccttcatcaccttcaagtgctgcgcctacggctacagaaagtgcctgggcaagaagggcagagtgaagaaggcccacaagagcaagacccactag

SEQ ID NO: 2261 - DNA, 1470 bp, synthetic construct
  misc_feature 1..1470: note = source = /note="Description of Artificial Sequence: Synthetic coding sequence"
  source 1..1470: mol_type = other DNA
atggccggccagagagtgctgctgctggtgggcttcctgctgcccggcgtgctgctgagcgaggccgccaagatcctgaccatcagcaccgtggacttcaagaaggaggagaagagctaccaggtgatcagctggctggcccccgaggaccaccagagagagttcaagaagagcttcgacttcttcctggaggagaccctgggcggcagaggcaagttcgagaacctgctgaacgtgctggagtacctggccctgcagtgcagccacttcctgaacagaaaggacatcatggacagcctgaagaacgagaacttcgacatggtgatcgtggagaccttcgactactgccccttcctgatcgccgagaagctgggcaagcccttcgtggccatcctgagcaccagcttcggcagcctggagttcggcctgcccatccccctgagctacgtgcccgtgttcagaagcctgctgaccgaccacatggacttctggggcagagtgaagaacttcctgatgttcttcagcttctgcagaagacagcagcacatgcagagcaccttcgacaacaccatcaaggagcacttcaccgagggcagcagacccgtgctgagccacctgctgctgaaggccgagctgtggttcatcaacagcgacttcgccttcgacttcgccagacccctgctgcccaacaccgtgtacgtgggcggcctgatggagaagcccatcaagcccgtgccccaggacctggagaacttcatcgccaagttcggcgacagcggcttcgtgctggtgaccctgggcagcatggtgaacacctgccagaaccccgagatcttcaaggagatgaacaacgccttcgcccacctgccccagggcgtgatctggaagtgccagtgcagccactggcccaaggacgtgcacctggccgccaacgtgaagatcgtggactggctgccccagagcgacctgctggcccaccccagcatcagactgttcgtgacccacggcggccagaacagcatcatggaggccatccagcacggcgtgcccatggtgggcatccccctgttcggcgaccagcccgagaacatggtgagagtggaggccaagaagttcggcgtgagcatccagctgaagaagctgaaggccgagaccctggccctgaagatgaagcagatcatggaggacaagagatacaagagcgccgccgtggccgccagcgtgatcctgagaagccaccccctgagccccacccagagactggtgggctggatcgaccacgtgctgcagaccggcggcgccacccacctgaagccctacgtgttccagcagccctggcacgagcagtacctgctggacgtgttcgtgttcctgctgggcctgaccctgggcaccctgtggctgtgcggcaagctgctgggcatggccgtgtggtggctgagaggcgccagaaaggtgaaggagacctag

SEQ ID NO: 2262 - DNA, 1572 bp, synthetic construct
  misc_feature 1..1572: note = source = /note="Description of Artificial Sequence: Synthetic coding sequence"
  source 1..1572: mol_type = other DNA
atggccggccagagagtgctgctgctggtgggcttcctgctgcccggcgtgctgctgagcgaggccgccaagatcctgaccatcagcaccgtgggcggcagccactacctgctgatggacagagtgagccagatcctgcaggaccacggccacaacgtgaccatgctgaaccacaagagaggccccttcatgcccgacttcaagaaggaggagaagagctaccaggtgatcagctggctggcccccgaggaccaccagagagagttcaagaagagcttcgacttcttcctggaggagaccctgggcggcagaggcaagttcgagaacctgctgaacgtgctggagtacctggccctgcagtgcagccacttcctgaacagaaaggacatcatggacagcctgaagaacgagaacttcgacatggtgatcgtggagaccttcgactactgccccttcctgatcgccgagaagctgggcaagcccttcgtggccatcctgagcaccagcttcggcagcctggagttcggcctgcccatccccctgagctacgtgcccgtgttcagaagcctgctgaccgaccacatggacttctggggcagagtgaagaacttcctgatgttcttcagcttctgcagaagacagcagcacatgcagagcaccttcgacaacaccatcaaggagcacttcaccgagggcagcagacccgtgctgagccacctgctgctgaaggccgagctgtggttcatcaacagcgacttcgccttcgacttcgccagacccctgctgcccaacaccgtgtacgtgggcggcctgatggagaagcccatcaagcccgtgccccaggacctggagaacttcatcgccaagttcggcgacagcggcttcgtgctggtgaccctgggcagcatggtgaacacctgccagaaccccgagatcttcaaggagatgaacaacgccttcgcccacctgccccagggcgtgatctggaagtgccagtgcagccactggcccaaggacgtgcacctggccgccaacgtgaagatcgtggactggctgccccagagcgacctgctggcccaccccagcatcagactgttcgtgacccacggcggccagaacagcatcatggaggccatccagcacggcgtgcccatggtgggcatccccctgttcggcgaccagcccgagaacatggtgagagtggaggccaagaagttcggcgtgagcatccagctgaagaagctgaaggccgagaccctggccctgaagatgaagcagatcatggaggacaagagatacaagagcgccgccgtggccgccagcgtgatcctgagaagccaccccctgagccccacccagagactggtgggctggatcgaccacgtgctgcagaccggcggcgccacccacctgaagccctacgtgttccagcagccctggcacgagcagtacctgctggacgtgttcgtgttcctgctgggcctgaccctgggcaccctgtggctgtgcggcaagctgctgggcatggccgtgtggtggctgagaggcgccagaaaggtgaaggagacctag

SEQ ID NO: 2263 - DNA, 417 bp, synthetic construct
  misc_feature 1..417: note = source = /note="Description of Artificial Sequence: Synthetic coding sequence"
  source 1..417: mol_type = other DNA
atggccggccagagagtgctgctgctggtgggcttcctgctgcccggcgtgctgctgagcgaggccgccaagatcctgaccatcagcaccgtgggcggcagccactacctgctgatggacagagtgagccagatcctgcaggaccacggccacaacgtgaccatgctgaaccacaagagaggccccttcatgcccgacttcaagaaggaggagaagagctaccaggtgatcagctggctggcccccgaggaccaccagagagagttcaagaagagcttcgacttcttcctggaggagaccctgggcggcagaggcaagttcgagaacctgctgaacgtgctggagtacctggccctgcagtgcagccacttcctgaacagaaaggacatcatggacagcctgaagaacgagaactag

SEQ ID NO: 2264 - DNA, 666 bp, synthetic construct
  misc_feature 1..666: note = source = /note="Description of Artificial Sequence: Synthetic coding sequence"
  source 1..666: mol_type = other DNA
atggtgaacacctgccagaaccccgagatcttcaaggagatgaacaacgccttcgcccacctgccccagggcgtgatctggaagtgccagtgcagccactggcccaaggacgtgcacctggccgccaacgtgaagatcgtggactggctgccccagagcgacctgctggcccaccccagcatcagactgttcgtgacccacggcggccagaacagcatcatggaggccatccagcacggcgtgcccatggtgggcatccccctgttcggcgaccagcccgagaacatggtgagagtggaggccaagaagttcggcgtgagcatccagctgaagaagctgaaggccgagaccctggccctgaagatgaagcagatcatggaggacaagagatacaagagcgccgccgtggccgccagcgtgatcctgagaagccaccccctgagccccacccagagactggtgggctggatcgaccacgtgctgcagaccggcggcgccacccacctgaagccctacgtgttccagcagccctggcacgagcagtacctgctggacgtgttcgtgttcctgctgggcctgaccctgggcaccctgtggctgtgcggcaagctgctgggcatggccgtgtggtggctgagaggcgccagaaaggtgaaggagacctag

SEQ ID NO: 2265 - DNA, 1086 bp, synthetic construct
  misc_feature 1..1086: note = source = /note="Description of Artificial Sequence: Synthetic coding sequence"
  source 1..1086: mol_type = other DNA
atggccatgaactacaacgccaaggacgaggtggacggcggccccccctgcgcccccggcggcaccgccaagaccagaagacccgacaacaccgccttcaagcagcagagactgcccgcctggcagcccatcctgaccgccggcaccgtgctgcccatcttcttcatcatcggcctgatcttcatccccatcggcatcggcatcttcgtgaccagcaacaacatcagagagatcgagatcgactacaccggcaccgagcccagcagcccctgcaacaagtgcctgagccccgacgtgaccccctgcttctgcaccatcaacttcaccctggagaagagcttcgagggcaacgtgttcatgtactacggcctgagcaacttctaccagaaccacagaagatacgtgaagagcagagacgacagccagctgaacggcgacagcagcgccctgctgaaccccagcaaggagtgcgagccctacagaagaaacgaggacaagcccatcgccccctgcggcgccatcgccaacagcatgttcaacgacaccctggagctgttcctgatcggcaacgacagctaccccatccccatcgccctgaagaagaagggcatcgcctggtggaccgacaagaacgtgaagttcagaaacccccccggcggcgacaacctggaggagagattcaagggcaccaccaagcccgtgaactggctgaagcccgtgtacatgctggacagcgaccccgacaacaacggcttcatcaacgaggacttcatcgtgtggatgagaaccgccgccctgcccaccttcagaaagctgtacagactgatcgagagaaagagcgacctgcaccccaccctgcccgccggcagatacagcctgaacgtgacctacaactaccccgtgcactacttcgacggcagaaagagaatgatcctgagcaccatcagctggatgggcggcaagaaccccttcctgggcatcgcctacatcgccgtgggcagcatcagcttcctgctgggcgtggtgctgctggtgatcaaccacaagtacagaaacagcagcaacaccgccgacatcaccatctag

SEQ ID NO: 2266 - DNA, 954 bp, synthetic construct
  misc_feature 1..954: note = source = /note="Description of Artificial Sequence: Synthetic coding sequence"
  source 1..954: mol_type = other DNA
ctgaccgacagacagaccgacaccgcccccagccccagctaccacctgctgcccggcagaagaagaaccgtggacgccgccgccagcagaggccagggccccgagcccgcccccggcggcggcgtggagggcgtgggcgccagaggcgtggccctgaagctgttcgtgcagctgctgggctgcagcagattcggcggcgccgtggtgagagccggcgaggccgagcccagcggcgccgccagaagcgccagcagcggcagagaggagccccagcccgaggagggcgaggaggaggaggagaaggaggaggagagaggcccccagtggagactgggcgccagaaagcccggcagctggaccggcgaggccgccgtgtgcgccgacagcgcccccgccgccagagccccccaggccctggccagagccagcggcagaggcggcagagtggccagaagaggcgccgaggagagcggccccccccacagccccagcagaagaggcagcgccagcagagccggccccggcagagccagcgagaccatgaacttcctgctgagctgggtgcactggagcctggccctgctgctgtacctgcaccacgccaagtggagccaggccgcccccatggccgagggcggcggccagaaccaccacgaggtggtgaagttcatggacgtgtaccagagaagctactgccaccccatcgagaccctggtggacatcttccaggagtaccccgacgagatcgagtacatcttcaagcccagctgcgtgcccctgatgagatgcggcggctgctgcaacgacgagggcctggagtgcgtgcccaccgaggagagcaacatcaccatgcagatcatgagaatcaagccccaccagggccagcacatcggcgagatgagcttcctgcagcacaacaagtgcgagtgcagatgcgacaagcccagaagatag

SEQ ID NO: 2267 - DNA, 1239 bp, synthetic construct
  misc_feature 1..1239: note = source = /note="Description of Artificial Sequence: Synthetic coding sequence"
  source 1..1239: mol_type = other DNA
ctgaccgacagacagaccgacaccgcccccagccccagctaccacctgctgcccggcagaagaagaaccgtggacgccgccgccagcagaggccagggccccgagcccgcccccggcggcggcgtggagggcgtgggcgccagaggcgtggccctgaagctgttcgtgcagctgctgggctgcagcagattcggcggcgccgtggtgagagccggcgaggccgagcccagcggcgccgccagaagcgccagcagcggcagagaggagccccagcccgaggagggcgaggaggaggaggagaaggaggaggagagaggcccccagtggagactgggcgccagaaagcccggcagctggaccggcgaggccgccgtgtgcgccgacagcgcccccgccgccagagccccccaggccctggccagagccagcggcagaggcggcagagtggccagaagaggcgccgaggagagcggccccccccacagccccagcagaagaggcagcgccagcagagccggccccggcagagccagcgagaccatgaacttcctgctgagctgggtgcactggagcctggccctgctgctgtacctgcaccacgccaagtggagccaggccgcccccatggccgagggcggcggccagaaccaccacgaggtggtgaagttcatggacgtgtaccagagaagctactgccaccccatcgagaccctggtggacatcttccaggagtaccccgacgagatcgagtacatcttcaagcccagctgcgtgcccctgatgagatgcggcggctgctgcaacgacgagggcctggagtgcgtgcccaccgaggagagcaacatcaccatgcagatcatgagaatcaagccccaccagggccagcacatcggcgagatgagcttcctgcagcacaacaagtgcgagtgcagacccaagaaggacagagccagacaggagaagaagagcgtgagaggcaagggcaagggccagaagagaaagagaaagaagagcagatacaagagctggagcgtgtacgtgggcgccagatgctgcctgatgccctggagcctgcccggcccccacccctgcggcccctgcagcgagagaagaaagcacctgttcgtgcaggacccccagacctgcaagtgcagctgcaagaacaccgacagcagatgcaaggccagacagctggagctgaacgagagaacctgcagatgcgacaagcccagaagatag

SEQ ID NO: 2268 - DNA, 984 bp, synthetic construct
  misc_feature 1..984: note = source = /note="Description of Artificial Sequence: Synthetic coding sequence"
  source 1..984: mol_type = other DNA
ctgaccgacagacagaccgacaccgcccccagccccagctaccacctgctgcccggcagaagaagaaccgtggacgccgccgccagcagaggccagggccccgagcccgcccccggcggcggcgtggagggcgtgggcgccagaggcgtggccctgaagctgttcgtgcagctgctgggctgcagcagattcggcggcgccgtggtgagagccggcgaggccgagcccagcggcgccgccagaagcgccagcagcggcagagaggagccccagcccgaggagggcgaggaggaggaggagaaggaggaggagagaggcccccagtggagactgggcgccagaaagcccggcagctggaccggcgaggccgccgtgtgcgccgacagcgcccccgccgccagagccccccaggccctggccagagccagcggcagaggcggcagagtggccagaagaggcgccgaggagagcggccccccccacagccccagcagaagaggcagcgccagcagagccggccccggcagagccagcgagaccatgaacttcctgctgagctgggtgcactggagcctggccctgctgctgtacctgcaccacgccaagtggagccaggccgcccccatggccgagggcggcggccagaaccaccacgaggtggtgaagttcatggacgtgtaccagagaagctactgccaccccatcgagaccctggtggacatcttccaggagtaccccgacgagatcgagtacatcttcaagcccagctgcgtgcccctgatgagatgcggcggctgctgcaacgacgagggcctggagtgcgtgcccaccgaggagagcaacatcaccatgcagatcatgagaatcaagccccaccagggccagcacatcggcgagatgagcttcctgcagcacaacaagtgcgagtgcagacccaagaaggacagagccagacaggagaagtgcgacaagcccagaagatag

SEQ ID NO: 2269 - DNA, 1116 bp, synthetic construct
  misc_feature 1..1116: note = source = /note="Description of Artificial Sequence: Synthetic coding sequence"
  source 1..1116: mol_type = other DNA
ctgaccgacagacagaccgacaccgcccccagccccagctaccacctgctgcccggcagaagaagaaccgtggacgccgccgccagcagaggccagggccccgagcccgcccccggcggcggcgtggagggcgtgggcgccagaggcgtggccctgaagctgttcgtgcagctgctgggctgcagcagattcggcggcgccgtggtgagagccggcgaggccgagcccagcggcgccgccagaagcgccagcagcggcagagaggagccccagcccgaggagggcgaggaggaggaggagaaggaggaggagagaggcccccagtggagactgggcgccagaaagcccggcagctggaccggcgaggccgccgtgtgcgccgacagcgcccccgccgccagagccccccaggccctggccagagccagcggcagaggcggcagagtggccagaagaggcgccgaggagagcggccccccccacagccccagcagaagaggcagcgccagcagagccggccccggcagagccagcgagaccatgaacttcctgctgagctgggtgcactggagcctggccctgctgctgtacctgcaccacgccaagtggagccaggccgcccccatggccgagggcggcggccagaaccaccacgaggtggtgaagttcatggacgtgtaccagagaagctactgccaccccatcgagaccctggtggacatcttccaggagtaccccgacgagatcgagtacatcttcaagcccagctgcgtgcccctgatgagatgcggcggctgctgcaacgacgagggcctggagtgcgtgcccaccgaggagagcaacatcaccatgcagatcatgagaatcaagccccaccagggccagcacatcggcgagatgagcttcctgcagcacaacaagtgcgagtgcagacccaagaaggacagagccagacaggagaacccctgcggcccctgcagcgagagaagaaagcacctgttcgtgcaggacccccagacctgcaagtgcagctgcaagaacaccgacagcagatgcaaggccagacagctggagctgaacgagagaacctgcagatgcgacaagcccagaagatag

SEQ ID NO: 2270 - DNA, 444 bp, synthetic construct
  misc_feature 1..444: note = source = /note="Description of Artificial Sequence: Synthetic coding sequence"
  source 1..444: mol_type = other DNA
atgaacttcctgctgagctgggtgcactggagcctggccctgctgctgtacctgcaccacgccaagtggagccaggccgcccccatggccgagggcggcggccagaaccaccacgaggtggtgaagttcatggacgtgtaccagagaagctactgccaccccatcgagaccctggtggacatcttccaggagtaccccgacgagatcgagtacatcttcaagcccagctgcgtgcccctgatgagatgcggcggctgctgcaacgacgagggcctggagtgcgtgcccaccgaggagagcaacatcaccatgcagatcatgagaatcaagccccaccagggccagcacatcggcgagatgagcttcctgcagcacaacaagtgcgagtgcagacccaagaaggacagagccagacaggagaagtgcgacaagcccagaagatag

SEQ ID NO: 2271 - DNA, 1170 bp, synthetic construct
  misc_feature 1..1170: note = source = /note="Description of Artificial Sequence: Synthetic coding sequence"
  source 1..1170: mol_type = other DNA
ctgaccgacagacagaccgacaccgcccccagccccagctaccacctgctgcccggcagaagaagaaccgtggacgccgccgccagcagaggccagggccccgagcccgcccccggcggcggcgtggagggcgtgggcgccagaggcgtggccctgaagctgttcgtgcagctgctgggctgcagcagattcggcggcgccgtggtgagagccggcgaggccgagcccagcggcgccgccagaagcgccagcagcggcagagaggagccccagcccgaggagggcgaggaggaggaggagaaggaggaggagagaggcccccagtggagactgggcgccagaaagcccggcagctggaccggcgaggccgccgtgtgcgccgacagcgcccccgccgccagagccccccaggccctggccagagccagcggcagaggcggcagagtggccagaagaggcgccgaggagagcggccccccccacagccccagcagaagaggcagcgccagcagagccggccccggcagagccagcgagaccatgaacttcctgctgagctgggtgcactggagcctggccctgctgctgtacctgcaccacgccaagtggagccaggccgcccccatggccgagggcggcggccagaaccaccacgaggtggtgaagttcatggacgtgtaccagagaagctactgccaccccatcgagaccctggtggacatcttccaggagtaccccgacgagatcgagtacatcttcaagcccagctgcgtgcccctgatgagatgcggcggctgctgcaacgacgagggcctggagtgcgtgcccaccgaggagagcaacatcaccatgcagatcatgagaatcaagccccaccagggccagcacatcggcgagatgagcttcctgcagcacaacaagtgcgagtgcagacccaagaaggacagagccagacaggagaagaagagcgtgagaggcaagggcaagggccagaagagaaagagaaagaagagcagaccctgcggcccctgcagcgagagaagaaagcacctgttcgtgcaggacccccagacctgcaagtgcagctgcaagaacaccgacagcagatgcaaggccagacagctggagctgaacgagagaacctgcagatgcgacaagcccagaagatag

SEQ ID NO: 2272 - DNA, 1065 bp, synthetic construct
  misc_feature 1..1065: note = source = /note="Description of Artificial Sequence: Synthetic coding sequence"
  source 1..1065: mol_type = other DNA
ctgaccgacagacagaccgacaccgcccccagccccagctaccacctgctgcccggcagaagaagaaccgtggacgccgccgccagcagaggccagggccccgagcccgcccccggcggcggcgtggagggcgtgggcgccagaggcgtggccctgaagctgttcgtgcagctgctgggctgcagcagattcggcggcgccgtggtgagagccggcgaggccgagcccagcggcgccgccagaagcgccagcagcggcagagaggagccccagcccgaggagggcgaggaggaggaggagaaggaggaggagagaggcccccagtggagactgggcgccagaaagcccggcagctggaccggcgaggccgccgtgtgcgccgacagcgcccccgccgccagagccccccaggccctggccagagccagcggcagaggcggcagagtggccagaagaggcgccgaggagagcggccccccccacagccccagcagaagaggcagcgccagcagagccggccccggcagagccagcgagaccatgaacttcctgctgagctgggtgcactggagcctggccctgctgctgtacctgcaccacgccaagtggagccaggccgcccccatggccgagggcggcggccagaaccaccacgaggtggtgaagttcatggacgtgtaccagagaagctactgccaccccatcgagaccctggtggacatcttccaggagtaccccgacgagatcgagtacatcttcaagcccagctgcgtgcccctgatgagatgcggcggctgctgcaacgacgagggcctggagtgcgtgcccaccgaggagagcaacatcaccatgcagatcatgagaatcaagccccaccagggccagcacatcggcgagatgagcttcctgcagcacaacaagtgcgagtgcagacccaagaaggacagagccagacaggagaacccctgcggcccctgcagcgagagaagaaagcacctgttcgtgcaggacccccagacctgcaagtgcagctgcaagaacaccgacagcagatgcaagatgtag

SEQ ID NO: 2273 - DNA, 1188 bp, synthetic construct
  misc_feature 1..1188: note = source = /note="Description of Artificial Sequence: Synthetic coding sequence"
  source 1..1188: mol_type = other DNA
ctgaccgacagacagaccgacaccgcccccagccccagctaccacctgctgcccggcagaagaagaaccgtggacgccgccgccagcagaggccagggccccgagcccgcccccggcggcggcgtggagggcgtgggcgccagaggcgtggccctgaagctgttcgtgcagctgctgggctgcagcagattcggcggcgccgtggtgagagccggcgaggccgagcccagcggcgccgccagaagcgccagcagcggcagagaggagccccagcccgaggagggcgaggaggaggaggagaaggaggaggagagaggcccccagtggagactgggcgccagaaagcccggcagctggaccggcgaggccgccgtgtgcgccgacagcgcccccgccgccagagccccccaggccctggccagagccagcggcagaggcggcagagtggccagaagaggcgccgaggagagcggccccccccacagccccagcagaagaggcagcgccagcagagccggccccggcagagccagcgagaccatgaacttcctgctgagctgggtgcactggagcctggccctgctgctgtacctgcaccacgccaagtggagccaggccgcccccatggccgagggcggcggccagaaccaccacgaggtggtgaagttcatggacgtgtaccagagaagctactgccaccccatcgagaccctggtggacatcttccaggagtaccccgacgagatcgagtacatcttcaagcccagctgcgtgcccctgatgagatgcggcggctgctgcaacgacgagggcctggagtgcgtgcccaccgaggagagcaacatcaccatgcagatcatgagaatcaagccccaccagggccagcacatcggcgagatgagcttcctgcagcacaacaagtgcgagtgcagacccaagaaggacagagccagacaggagaagaagagcgtgagaggcaagggcaagggccagaagagaaagagaaagaagagcagatacaagagctggagcgtgccctgcggcccctgcagcgagagaagaaagcacctgttcgtgcaggacccccagacctgcaagtgcagctgcaagaacaccgacagcagatgcaaggccagacagctggagctgaacgagagaacctgcagatgcgacaagcccagaagatag

SEQ ID NO: 2274 - DNA, 414 bp, synthetic construct
  misc_feature 1..414: note = source = /note="Description of Artificial Sequence: Synthetic coding sequence"
  source 1..414: mol_type = other DNA
atgaacttcctgctgagctgggtgcactggagcctggccctgctgctgtacctgcaccacgccaagtggagccaggccgcccccatggccgagggcggcggccagaaccaccacgaggtggtgaagttcatggacgtgtaccagagaagctactgccaccccatcgagaccctggtggacatcttccaggagtaccccgacgagatcgagtacatcttcaagcccagctgcgtgcccctgatgagatgcggcggctgctgcaacgacgagggcctggagtgcgtgcccaccgaggagagcaacatcaccatgcagatcatgagaatcaagccccaccagggccagcacatcggcgagatgagcttcctgcagcacaacaagtgcgagtgcagatgcgacaagcccagaagatag

SEQ ID NO: 2275 - DNA, 1116 bp, synthetic construct
  misc_feature 1..1116: note = source = /note="Description of Artificial Sequence: Synthetic coding sequence"
  source 1..1116: mol_type = other DNA
ctgaccgacagacagaccgacaccgcccccagccccagctaccacctgctgcccggcagaagaagaaccgtggacgccgccgccagcagaggccagggccccgagcccgcccccggcggcggcgtggagggcgtgggcgccagaggcgtggccctgaagctgttcgtgcagctgctgggctgcagcagattcggcggcgccgtggtgagagccggcgaggccgagcccagcggcgccgccagaagcgccagcagcggcagagaggagccccagcccgaggagggcgaggaggaggaggagaaggaggaggagagaggcccccagtggagactgggcgccagaaagcccggcagctggaccggcgaggccgccgtgtgcgccgacagcgcccccgccgccagagccccccaggccctggccagagccagcggcagaggcggcagagtggccagaagaggcgccgaggagagcggccccccccacagccccagcagaagaggcagcgccagcagagccggccccggcagagccagcgagaccatgaacttcctgctgagctgggtgcactggagcctggccctgctgctgtacctgcaccacgccaagtggagccaggccgcccccatggccgagggcggcggccagaaccaccacgaggtggtgaagttcatggacgtgtaccagagaagctactgccaccccatcgagaccctggtggacatcttccaggagtaccccgacgagatcgagtacatcttcaagcccagctgcgtgcccctgatgagatgcggcggctgctgcaacgacgagggcctggagtgcgtgcccaccgaggagagcaacatcaccatgcagatcatgagaatcaagccccaccagggccagcacatcggcgagatgagcttcctgcagcacaacaagtgcgagtgcagacccaagaaggacagagccagacaggagaacccctgcggcccctgcagcgagagaagaaagcacctgttcgtgcaggacccccagacctgcaagtgcagctgcaagaacaccgacagcagatgcaaggccagacagctggagctgaacgagagaacctgcagaagcctgaccagaaaggactag

SEQ ID NO: 2276 - DNA, 630 bp, synthetic construct
  misc_feature 1..630: note = source = /note="Description of Artificial Sequence: Synthetic coding sequence"
  source 1..630: mol_type = other DNA
atgaacttcctgctgagctgggtgcactggagcctggccctgctgctgtacctgcaccacgccaagtggagccaggccgcccccatggccgagggcggcggccagaaccaccacgaggtggtgaagttcatggacgtgtaccagagaagctactgccaccccatcgagaccctggtggacatcttccaggagtaccccgacgagatcgagtacatcttcaagcccagctgcgtgcccctgatgagatgcggcggctgctgcaacgacgagggcctggagtgcgtgcccaccgaggagagcaacatcaccatgcagatcatgagaatcaagccccaccagggccagcacatcggcgagatgagcttcctgcagcacaacaagtgcgagtgcagacccaagaaggacagagccagacaggagaagaagagcgtgagaggcaagggcaagggccagaagagaaagagaaagaagagcagaccctgcggcccctgcagcgagagaagaaagcacctgttcgtgcaggacccccagacctgcaagtgcagctgcaagaacaccgacagcagatgcaaggccagacagctggagctgaacgagagaacctgcagatgcgacaagcccagaagatag

SEQ ID NO: 2277 - DNA, 576 bp, synthetic construct
  misc_feature 1..576: note = source = /note="Description of Artificial Sequence: Synthetic coding sequence"
  source 1..576: mol_type = other DNA
atgaacttcctgctgagctgggtgcactggagcctggccctgctgctgtacctgcaccacgccaagtggagccaggccgcccccatggccgagggcggcggccagaaccaccacgaggtggtgaagttcatggacgtgtaccagagaagctactgccaccccatcgagaccctggtggacatcttccaggagtaccccgacgagatcgagtacatcttcaagcccagctgcgtgcccctgatgagatgcggcggctgctgcaacgacgagggcctggagtgcgtgcccaccgaggagagcaacatcaccatgcagatcatgagaatcaagccccaccagggccagcacatcggcgagatgagcttcctgcagcacaacaagtgcgagtgcagacccaagaaggacagagccagacaggagaacccctgcggcccctgcagcgagagaagaaagcacctgttcgtgcaggacccccagacctgcaagtgcagctgcaagaacaccgacagcagatgcaaggccagacagctggagctgaacgagagaacctgcagaagcctgaccagaaaggactag

SEQ ID NO: 2278 - DNA, 972 bp, synthetic construct
  misc_feature 1..972: note = source = /note="Description of Artificial Sequence: Synthetic coding sequence"
  source 1..972: mol_type = other DNA
tgaagaggccagggccccgagcccgcccccggcggcggcgtggagggcgtgggcgccagaggcgtggccctgaagctgttcgtgcagctgctgggctgcagcagattcggcggcgccgtggtgagagccggcgaggccgagcccagcggcgccgccagaagcgccagcagcggcagagaggagccccagcccgaggagggcgaggaggaggaggagaaggaggaggagagaggcccccagtggagactgggcgccagaaagcccggcagctggaccggcgaggccgccgtgtgcgccgacagcgcccccgccgccagagccccccaggccctggccagagccagcggcagaggcggcagagtggccagaagaggcgccgaggagagcggccccccccacagccccagcagaagaggcagcgccagcagagccggccccggcagagccagcgagaccatgaacttcctgctgagctgggtgcactggagcctggccctgctgctgtacctgcaccacgccaagtggagccaggccgcccccatggccgagggcggcggccagaaccaccacgaggtggtgaagttcatggacgtgtaccagagaagctactgccaccccatcgagaccctggtggacatcttccaggagtaccccgacgagatcgagtacatcttcaagcccagctgcgtgcccctgatgagatgcggcggctgctgcaacgacgagggcctggagtgcgtgcccaccgaggagagcaacatcaccatgcagatcatgagaatcaagccccaccagggccagcacatcggcgagatgagcttcctgcagcacaacaagtgcgagtgcagacccaagaaggacagagccagacaggagaagaagagcgtgagaggcaagggcaagggccagaagagaaagagaaagaagagcagatacaagagctggagcgtgtgcgacaagcccagaagatag

SEQ ID NO: 2279 - DNA, 648 bp, synthetic construct
  misc_feature 1..648: note = source = /note="Description of Artificial Sequence: Synthetic coding sequence"
  source 1..648: mol_type = other DNA
atgaacttcctgctgagctgggtgcactggagcctggccctgctgctgtacctgcaccacgccaagtggagccaggccgcccccatggccgagggcggcggccagaaccaccacgaggtggtgaagttcatggacgtgtaccagagaagctactgccaccccatcgagaccctggtggacatcttccaggagtaccccgacgagatcgagtacatcttcaagcccagctgcgtgcccctgatgagatgcggcggctgctgcaacgacgagggcctggagtgcgtgcccaccgaggagagcaacatcaccatgcagatcatgagaatcaagccccaccagggccagcacatcggcgagatgagcttcctgcagcacaacaagtgcgagtgcagacccaagaaggacagagccagacaggagaagaagagcgtgagaggcaagggcaagggccagaagagaaagagaaagaagagcagatacaagagctggagcgtgccctgcggcccctgcagcgagagaagaaagcacctgttcgtgcaggacccccagacctgcaagtgcagctgcaagaacaccgacagcagatgcaaggccagacagctggagctgaacgagagaacctgcagatgcgacaagcccagaagatag

SEQ ID NO: 2280 - DNA, 525 bp, synthetic construct
  misc_feature 1..525: note = source = /note="Description of Artificial Sequence: Synthetic coding sequence"
  source 1..525: mol_type = other DNA
atgaacttcctgctgagctgggtgcactggagcctggccctgctgctgtacctgcaccacgccaagtggagccaggccgcccccatggccgagggcggcggccagaaccaccacgaggtggtgaagttcatggacgtgtaccagagaagctactgccaccccatcgagaccctggtggacatcttccaggagtaccccgacgagatcgagtacatcttcaagcccagctgcgtgcccctgatgagatgcggcggctgctgcaacgacgagggcctggagtgcgtgcccaccgaggagagcaacatcaccatgcagatcatgagaatcaagccccaccagggccagcacatcggcgagatgagcttcctgcagcacaacaagtgcgagtgcagacccaagaaggacagagccagacaggagaacccctgcggcccctgcagcgagagaagaaagcacctgttcgtgcaggacccccagacctgcaagtgcagctgcaagaacaccgacagcagatgcaagatgtag

SEQ ID NO: 2281 - DNA, 699 bp, synthetic construct
  misc_feature 1..699: note = source = /note="Description of Artificial Sequence: Synthetic coding sequence"
  source 1..699: mol_type = other DNA
atgaacttcctgctgagctgggtgcactggagcctggccctgctgctgtacctgcaccacgccaagtggagccaggccgcccccatggccgagggcggcggccagaaccaccacgaggtggtgaagttcatggacgtgtaccagagaagctactgccaccccatcgagaccctggtggacatcttccaggagtaccccgacgagatcgagtacatcttcaagcccagctgcgtgcccctgatgagatgcggcggctgctgcaacgacgagggcctggagtgcgtgcccaccgaggagagcaacatcaccatgcagatcatgagaatcaagccccaccagggccagcacatcggcgagatgagcttcctgcagcacaacaagtgcgagtgcagacccaagaaggacagagccagacaggagaagaagagcgtgagaggcaagggcaagggccagaagagaaagagaaagaagagcagatacaagagctggagcgtgtacgtgggcgccagatgctgcctgatgccctggagcctgcccggcccccacccctgcggcccctgcagcgagagaagaaagcacctgttcgtgcaggacccccagacctgcaagtgcagctgcaagaacaccgacagcagatgcaaggccagacagctggagctgaacgagagaacctgcagatgcgacaagcccagaagatag

SEQ ID NO: 2282 - DNA, 576 bp, synthetic construct
  misc_feature 1..576: note = source = /note="Description of Artificial Sequence: Synthetic coding sequence"
  source 1..576: mol_type = other DNA
atgaacttcctgctgagctgggtgcactggagcctggccctgctgctgtacctgcaccacgccaagtggagccaggccgcccccatggccgagggcggcggccagaaccaccacgaggtggtgaagttcatggacgtgtaccagagaagctactgccaccccatcgagaccctggtggacatcttccaggagtaccccgacgagatcgagtacatcttcaagcccagctgcgtgcccctgatgagatgcggcggctgctgcaacgacgagggcctggagtgcgtgcccaccgaggagagcaacatcaccatgcagatcatgagaatcaagccccaccagggccagcacatcggcgagatgagcttcctgcagcacaacaagtgcgagtgcagacccaagaaggacagagccagacaggagaacccctgcggcccctgcagcgagagaagaaagcacctgttcgtgcaggacccccagacctgcaagtgcagctgcaagaacaccgacagcagatgcaaggccagacagctggagctgaacgagagaacctgcagatgcgacaagcccagaagatag

SEQ ID NO: 2283 - DNA, 1263 bp, synthetic construct
  misc_feature 1..1263: note = source = /note="Description of Artificial Sequence: Synthetic coding sequence"
  source 1..1263: mol_type = other DNA
atgcacctgctgggcttcttcagcgtggcctgcagcctgctggccgccgccctgctgcccggccccagagaggcccccgccgccgccgccgccttcgagagcggcctggacctgagcgacgccgagcccgacgccggcgaggccaccgcctacgccagcaaggacctggaggagcagctgagaagcgtgagcagcgtggacgagctgatgaccgtgctgtaccccgagtactggaagatgtacaagtgccagctgagaaagggcggctggcagcacaacagagagcaggccaacctgaacagcagaaccgaggagaccatcaagttcgccgccgcccactacaacaccgagatcctgaagagcatcgacaacgagtggagaaagacccagtgcatgcccagagaggtgtgcatcgacgtgggcaaggagttcggcgtggccaccaacaccttcttcaagcccccctgcgtgagcgtgtacagatgcggcggctgctgcaacagcgagggcctgcagtgcatgaacaccagcaccagctacctgagcaagaccctgttcgagatcaccgtgcccctgagccagggccccaagcccgtgaccatcagcttcgccaaccacaccagctgcagatgcatgagcaagctggacgtgtacagacaggtgcacagcatcatcagaagaagcctgcccgccaccctgccccagtgccaggccgccaacaagacctgccccaccaactacatgtggaacaaccacatctgcagatgcctggcccaggaggacttcatgttcagcagcgacgccggcgacgacagcaccgacggcttccacgacatctgcggccccaacaaggagctggacgaggagacctgccagtgcgtgtgcagagccggcctgagacccgccagctgcggcccccacaaggagctggacagaaacagctgccagtgcgtgtgcaagaacaagctgttccccagccagtgcggcgccaacagagagttcgacgagaacacctgccagtgcgtgtgcaagagaacctgccccagaaaccagcccctgaaccccggcaagtgcgcctgcgagtgcaccgagagcccccagaagtgcctgctgaagggcaagaagttccaccaccagacctgcagctgctacagaagaccctgcaccaacagacagaaggcctgcgagcccggcttcagctacagcgaggaggtgtgcagatgcgtgcccagctactggaagagaccccagatgatgagctag

SEQ ID NO: 2284 - DNA, 510 bp, synthetic construct
  misc_feature 1..510: note = source = /note="Description of Artificial Sequence: Synthetic coding sequence"
  source 1..510: mol_type = other DNA
atggacaccagaaacaaggcccagctgctggtgctgctgaccctgctgagcgtgctgttcagccagaccagcgcctggcccctgtacagagcccccagcgccctgagactgggcgacagaatccccttcgagggcgccaacgagcccgaccaggtgagcctgaaggaggacatcgacatgctgcagaacgccctggccgagaacgacaccccctactacgacgtgagcagaaacgccagacacgccgacggcgtgttcaccagcgacttcagcaagctgctgggccagctgagcgccaagaagtacctggagagcctgatgggcaagagagtgagcaacatcagcgaggaccccgtgcccgtgaagagacacagcgacgccgtgttcaccgacaactacaccagactgagaaagcagatggccgtgaagaagtacctgaacagcatcctgaacggcaagagaagcagcgagggcgagagccccgacttccccgaggagctggagaagtag

SEQ ID NO: 2285 - DNA, 513 bp, synthetic construct
  misc_feature 1..513: note = source = /note="Description of Artificial Sequence: Synthetic coding sequence"
  source 1..513: mol_type = other DNA
atggacaccagaaacaaggcccagctgctggtgctgctgaccctgctgagcgtgctgttcagccagaccagcgcctggcccctgtacagagcccccagcgccctgagactgggcgacagaatccccttcgagggcgccaacgagcccgaccaggtgagcctgaaggaggacatcgacatgctgcagaacgccctggccgagaacgacaccccctactacgacgtgagcagaaacgccagacacgccgacggcgtgttcaccagcgacttcagcaagctgctgggccagctgagcgccaagaagtacctggagagcctgatgggcaagagagtgagcagcaacatcagcgaggaccccgtgcccgtgaagagacacagcgacgccgtgttcaccgacaactacaccagactgagaaagcagatggccgtgaagaagtacctgaacagcatcctgaacggcaagagaagcagcgagggcgagagccccgacttccccgaggagctggagaagtag

SEQ ID NO: 2286 - DNA, 360 bp, synthetic construct
  misc_feature 1..360: note = source = /note="Description of Artificial Sequence: Synthetic coding sequence"
  source 1..360: mol_type = other DNA
tgagtgagcctgaaggaggacatcgacatgctgcagaacgccctggccgagaacgacaccccctactacgacgtgagcagaaacgccagacacgccgacggcgtgttcaccagcgacttcagcaagctgctgggccagctgagcgccaagaagtacctggagagcctgatgggcaagagagtgagcagcaacatcagcgaggaccccgtgcccgtgaagagacacagcgacgccgtgttcaccgacaactacaccagactgagaaagcagatggccgtgaagaagtacctgaacagcatcctgaacggcaagagaagcgagggcgagagccccgacttccccgaggagctggagaagtag

SEQ ID NO: 2287 - DNA, 774 bp, synthetic construct
  misc_feature 1..774: note = source = /note="Description of Artificial Sequence: Synthetic coding sequence"
  source 1..774: mol_type = other DNA
atgcccctgaacgtgagcttcaccaacagaaactacgacctggactacgacagcgtgcagccctacttctactgcgacgaggaggagaacttctaccagcagcagcagcagagcgagctgcagccccccgcccccagcgaggacatctggaagaagttcgagctgctgcccaccccccccctgagccccagcagaagaagcggcctgtgcagccccagctacgtggccgtgacccccttcagcctgagaggcgacaacgacggcggcggcggcagcttcagcaccgccgaccagctggagatggtgaccgagctgctgggcggcgacatggtgaaccagagcttcatctgcgaccccgacgacgagaccttcatcaagaacatcatcatccaggactgcatgtggagcggcttcagcgccgccgccaagctggtgagcgagaagctggccagctaccaggccgccagaaaggacagcggcagccccaaccccgccagaggccacagcgtgtgcagcaccagcagcctgtacctgcaggacctgagcgccgccgccagcgagtgcatcgaccccagcgtggtgttcccctaccccctgaacgacagcagcagccccaagagctgcgccagccaggacagcagcgccttcagccccagcagcgacagcctgctgagcagcaccgagagcagcccccagggcagccccgagcccctggtgctgcacgaggagaccccccccaccaccagcagcgacagcggcggcaccagaagatag

SEQ ID NO: 2288 - DNA, 1365 bp, synthetic construct
  misc_feature 1..1365: note = source = /note="Description of Artificial Sequence: Synthetic coding sequence"
  source 1..1365: mol_type = other DNA
ctggacttcttcagagtggtggagaaccagcagccccccgccaccatgcccctgaacgtgagcttcaccaacagaaactacgacctggactacgacagcgtgcagccctacttctactgcgacgaggaggagaacttctaccagcagcagcagcagagcgagctgcagccccccgcccccagcgaggacatctggaagaagttcgagctgctgcccaccccccccctgagccccagcagaagaagcggcctgtgcagccccagctacgtggccgtgacccccttcagcctgagaggcgacaacgacggcggcggcggcagcttcagcaccgccgaccagctggagatggtgaccgagctgctgggcggcgacatggtgaaccagagcttcatctgcgaccccgacgacgagaccttcatcaagaacatcatcatccaggactgcatgtggagcggcttcagcgccgccgccaagctggtgagcgagaagctggccagctaccaggccgccagaaaggacagcggcagccccaaccccgccagaggccacagcgtgtgcagcaccagcagcctgtacctgcaggacctgagcgccgccgccagcgagtgcatcgaccccagcgtggtgttcccctaccccctgaacgacagcagcagccccaagagctgcgccagccaggacagcagcgccttcagccccagcagcgacagcctgctgagcagcaccgagagcagcccccagggcagccccgagcccctggtgctgcacgaggagaccccccccaccaccagcagcgacagcgaggaggagcaggaggacgaggaggagatcgacgtggtgagcgtggagaagagacaggcccccggcaagagaagcgagagcggcagccccagcgccggcggccacagcaagcccccccacagccccctggtgctgaagagatgccacgtgagcacccaccagcacaactacgccgccccccccagcaccagaaaggactaccccgccgccaagagagtgaagctggacagcgtgagagtgctgagacagatcagcaacaacagaaagtgcaccagccccagaagcagcgacaccgaggagaacgtgaagagaagaacccacaacgtgctggagagacagagaagaaacgagctgaagagaagcttcttcgccctgagagaccagatccccgagctggagaacaacgagaaggcccccaaggtggtgatcctgaagaaggccaccgcctacatcctgagcgtgcaggccgaggagcagaagctgatcagcgaggaggacctgctgagaaagagaagagagcagctgaagcacaagctggagcagctgagaaacagctgcgcctag

SEQ ID NO: 2289 - DNA, 1263 bp, synthetic construct
  misc_feature 1..1263: note = source = /note="Description of Artificial Sequence: Synthetic coding sequence"
  source 1..1263: mol_type = other DNA
atgcccctgaacgtgagcttcaccaacagaaactacgacctggactacgacagcgtgcagccctacttctactgcgacgaggaggacatctggaagaagttcgagctgctgcccaccccccccctgagccccagcagaagaagcggcctgtgcagccccagctacgtggccgtgacccccttcagcctgagaggcgacaacgacggcggcggcggcagcttcagcaccgccgaccagctggagatggtgaccgagctgctgggcggcgacatggtgaaccagagcttcatctgcgaccccgacgacgagaccttcatcaagaacatcatcatccaggactgcatgtggagcggcttcagcgccgccgccaagctggtgagcgagaagctggccagctaccaggccgccagaaaggacagcggcagccccaaccccgccagaggccacagcgtgtgcagcaccagcagcctgtacctgcaggacctgagcgccgccgccagcgagtgcatcgaccccagcgtggtgttcccctaccccctgaacgacagcagcagccccaagagctgcgccagccaggacagcagcgccttcagccccagcagcgacagcctgctgagcagcaccgagagcagcccccagggcagccccgagcccctggtgctgcacgaggagaccccccccaccaccagcagcgacagcgaggaggagcaggaggacgaggaggagatcgacgtggtgagcgtggagaagagacaggcccccggcaagagaagcgagagcggcagccccagcgccggcggccacagcaagcccccccacagccccctggtgctgaagagatgccacgtgagcacccaccagcacaactacgccgccccccccagcaccagaaaggactaccccgccgccaagagagtgaagctggacagcgtgagagtgctgagacagatcagcaacaacagaaagtgcaccagccccagaagcagcgacaccgaggagaacgtgaagagaagaacccacaacgtgctggagagacagagaagaaacgagctgaagagaagcttcttcgccctgagagaccagatccccgagctggagaacaacgagaaggcccccaaggtggtgatcctgaagaaggccaccgcctacatcctgagcgtgcaggccgaggagcagaagctgatcagcgaggaggacctgctgagaaagagaagagagcagctgaagcacaagctggagcagctgagaaacagctgcgcctag

SEQ ID NO: 2290 - DNA, 1362 bp, synthetic construct
  misc_feature 1..1362: note = source = /note="Description of Artificial Sequence: Synthetic coding sequence"
  source 1..1362: mol_type = other DNA
ctggacttcttcagagtggtggagaaccagccccccgccaccatgcccctgaacgtgagcttcaccaacagaaactacgacctggactacgacagcgtgcagccctacttctactgcgacgaggaggagaacttctaccagcagcagcagcagagcgagctgcagccccccgcccccagcgaggacatctggaagaagttcgagctgctgcccaccccccccctgagccccagcagaagaagcggcctgtgcagccccagctacgtggccgtgacccccttcagcctgagaggcgacaacgacggcggcggcggcagcttcagcaccgccgaccagctggagatggtgaccgagctgctgggcggcgacatggtgaaccagagcttcatctgcgaccccgacgacgagaccttcatcaagaacatcatcatccaggactgcatgtggagcggcttcagcgccgccgccaagctggtgagcgagaagctggccagctaccaggccgccagaaaggacagcggcagccccaaccccgccagaggccacagcgtgtgcagcaccagcagcctgtacctgcaggacctgagcgccgccgccagcgagtgcatcgaccccagcgtggtgttcccctaccccctgaacgacagcagcagccccaagagctgcgccagccaggacagcagcgccttcagccccagcagcgacagcctgctgagcagcaccgagagcagcccccagggcagccccgagcccctggtgctgcacgaggagaccccccccaccaccagcagcgacagcgaggaggagcaggaggacgaggaggagatcgacgtggtgagcgtggagaagagacaggcccccggcaagagaagcgagagcggcagccccagcgccggcggccacagcaagcccccccacagccccctggtgctgaagagatgccacgtgagcacccaccagcacaactacgccgccccccccagcaccagaaaggactaccccgccgccaagagagtgaagctggacagcgtgagagtgctgagacagatcagcaacaacagaaagtgcaccagccccagaagcagcgacaccgaggagaacgtgaagagaagaacccacaacgtgctggagagacagagaagaaacgagctgaagagaagcttcttcgccctgagagaccagatccccgagctggagaacaacgagaaggcccccaaggtggtgatcctgaagaaggccaccgcctacatcctgagcgtgcaggccgaggagcagaagctgatcagcgaggaggacctgctgagaaagagaagagagcagctgaagcacaagctggagcagctgagaaacagctgcgcctag

SEQ ID NO: 2291 - DNA, 8442 bp, synthetic construct
  misc_feature 1..8442: note = source = /note="Description of Artificial Sequence: Synthetic coding sequence"
  source 1..8442: mol_type = other DNA
atgatccccgccagattcgccggcgtgctgctggccctggccctgatcctgcccggcaccctgtgcgccgagggcaccagaggcagaagcagcaccgccagatgcagcctgttcggcagcgacttcgtgaacaccttcgacggcagcatgtacagcttcgccggctactgcagctacctgctggccggcggctgccagaagagaagcttcagcatcatcggcgacttccagaacggcaagagagtgagcctgagcgtgtacctgggcgagttcttcgacatccacctgttcgtgaacggcaccgtgacccagggcgaccagagagtgagcatgccctacgccagcaagggcctgtacctggagaccgaggccggctactacaagctgagcggcgaggcctacggcttcgtggccagaatcgacggcagcggcaacttccaggtgctgctgagcgacagatacttcaacaagacctgcggcctgtgcggcaacttcaacatcttcgccgaggacgacttcatgacccaggagggcaccctgaccagcgacccctacgacttcgccaacagctgggccctgagcagcggcgagcagtggtgcgagagagccagcccccccagcagcagctgcaacatcagcagcggcgagatgcagaagggcctgtgggagcagtgccagctgctgaagagcaccagcgtgttcgccagatgccaccccctggtggaccccgagcccttcgtggccctgtgcgagaagaccctgtgcgagtgcgccggcggcctggagtgcgcctgccccgccctgctggagtacgccagaacctgcgcccaggagggcatggtgctgtacggctggaccgaccacagcgcctgcagccccgtgtgccccgccggcatggagtacagacagtgcgtgagcccctgcgccagaacctgccagagcctgcacatcaacgagatgtgccaggagagatgcgtggacggctgcagctgccccgagggccagctgctggacgagggcctgtgcgtggagagcaccgagtgcccctgcgtgcacagcggcaagagatacccccccggcaccagcctgagcagagactgcaacacctgcatctgcagaaacagccagtggatctgcagcaacgaggagtgccccggcgagtgcctggtgaccggccagagccacttcaagagcttcgacaacagatacttcaccttcagcggcatctgccagtacctgctggccagagactgccaggaccacagcttcagcatcgtgatcgagaccgtgcagtgcgccgacgacagagacgccgtgtgcaccagaagcgtgaccgtgagactgcccggcctgcacaacagcctggtgaagctgaagcacggcgccggcgtggccatggacggccaggacgtgcagctgcccctgctgaagggcgacctgagaatccagcacaccgtgaccgccagcgtgagactgagctacggcgaggacctgcagatggactgggacggcagaggcagactgctggtgaagctgagccccgtgtacgccggcaagacctgcggcctgtgcggcaactacaacggcaaccagggcgacgacttcctgacccccagcggcctggccgagcccagagtggaggacttcggcaacgcctggaagctgcacggcgactgccaggacctgcagaagcagcacagcgacccctgcgccctgaaccccagaatgaccagattcagcgaggaggcctgcgccgtgctgaccagccccaccttcgaggcctgccacagagccgtgagccccctgccctacctgagaaactgcagatacgacgtgtgcagctgcagcgacggcagagagtgcctgtgcggcgccctggccagctacgccgccgcctgcgccggcagaggcgtgagagtggcctggagagagcccggcagatgcgagctgaactgccccaagggccaggtgtacctgcagtgcggcaccccctgcaacctgacctgcagaagcctgagctaccccgacgaggagtgcaacgaggcctgcctggagggctgcttctgcccccccggcctgtacatggacgagagaggcgactgcgtgcccaaggcccagtgcccctgctactacgacggcgagatcttccagcccgaggacatcttcagcgaccaccacaccatgtgctactgcgaggacggcttcatgcactgcaccatgagcggcgtgcccggcagcctgctgcccgacgccgtgctgagcagccccctgagccacagaagcaagagaagcctgagctgcagaccccccatggtgaagctggtgtgccccgccgacaacctgagagccgagggcctggagtgcaccaagacctgccagaactacgacctggagtgcatgagcatgggctgcgtgagcggctgcctgtgcccccccggcatggtgagacacgagaacagatgcgtggccctggagagatgcccctgcttccaccagggcaaggagtacgcccccggcgagaccgtgaagatcggctgcaacacctgcgtgtgccaggacagaaagtggaactgcaccgaccacgtgtgcgacgccacctgcagcaccatcggcatggcccactacctgaccttcgacggcctgaagtacctgttccccggcgagtgccagtacgtgctggtgcaggactactgcggcagcaaccccggcaccttcagaatcctggtgggcaacaagggctgcagccaccccagcgtgaagtgcaagaagagagtgaccatcctggtggagggcggcgagatcgagctgttcgacggcgaggtgaacgtgaagagacccatgaaggacgagacccacttcgaggtggtggagagcggcagatacatcatcctgctgctgggcaaggccctgagcgtggtgtgggacagacacctgagcatcagcgtggtgctgaagcagacctaccaggagaaggtgtgcggcctgtgcggcaacttcgacggcatccagaacaacgacctgaccagcagcaacctgcaggtggaggaggaccccgtggacttcggcaacagctggaaggtgagcagccagtgcgccgacaccagaaaggtgcccctggacagcagccccgccacctgccacaacaacatcatgaagcagaccatggtggacagcagctgcagaatcctgaccagcgacgtgttccaggactgcaacaagctggtggaccccgagccctacctggacgtgtgcatctacgacacctgcagctgcgagagcatcggcgactgcgcctgcttctgcgacaccatcgccgcctacgcccacgtgtgcgcccagcacggcaaggtggtgacctggagaaccgccaccctgtgcccccagagctgcgaggagagaaacctgagagagaacggctacgagtgcgagtggagatacaacagctgcgcccccgcctgccaggtgacctgccagcaccccgagcccctggcctgccccgtgcagtgcgtggagggctgccacgcccactgcccccccggcaagatcctggacgagctgctgcagacctgcgtggaccccgaggactgccccgtgtgcgaggtggccggcagaagattcgccagcggcaagaaggtgaccctgaaccccagcgaccccgagcactgccagatctgccactgcgacgtggtgaacctgacctgcgaggcctgccaggagcccggcggcctggtggtgccccccaccgacgcccccgtgagccccaccaccctgtacgtggaggacatcagcgagccccccctgcacgacttctactgcagcagactgctggacctggtgttcctgctggacggcagcagcagactgagcgaggccgagttcgaggtgctgaaggccttcgtggtggacatgatggagagactgagaatcagccagaagtgggtgagagtggccgtggtggagtaccacgacggcagccacgcctacatcggcctgaaggacagaaagagacccagcgagctgagaagaatcgccagccaggtgaagtacgccggcagccaggtggccagcaccagcgaggtgctgaagtacaccctgttccagatcttcagcaagatcgacagacccgaggccagcagaatcaccctgctgctgatggccagccaggagccccagagaatgagcagaaacttcgtgagatacgtgcagggcctgaagaagaagaaggtgatcgtgatccccgtgggcatcggcccccacgccaacctgaagcagatcagactgatcgagaagcaggcccccgagaacaaggccttcgtgctgagcagcgtggacgagctggagcagcagagagacgagatcgtgagctacctgtgcgacctggcccccgaggcccccccccccaccctgccccccgacatggcccaggtgaccgtgggccccggcctgctgggcgtgagcaccctgggccccaagagaaacagcatggtgctggacgtggccttcgtgctggagggcagcgacaagatcggcgaggccgacttcaacagaagcaaggagttcatggaggaggtgatccagagaatggacgtgggccaggacagcatccacgtgaccgtgctgcagtacagctacatggtgaccgtggagtaccccttcagcgaggcccagagcaagggcgacatcctgcagagagtgagagagatcagataccagggcggcaacagaaccaacaccggcctggccctgagatacctgagcgaccacagcttcctggtgagccagggcgacagagagcaggcccccaacctggtgtacatggtgaccggcaaccccgccagcgacgagatcaagagactgcccggcgacatccaggtggtgcccatcggcgtgggccccaacgccaacgtgcaggagctggagagaatcggctggcccaacgcccccatcctgatccaggacttcgagaccctgcccagagaggcccccgacctggtgctgcagagatgctgcagcggcgagggcctgcagatccccaccctgagccccgcccccgactgcagccagcccctggacgtgatcctgctgctggacggcagcagcagcttccccgccagctacttcgacgagatgaagagcttcgccaaggccttcatcagcaaggccaacatcggccccagactgacccaggtgagcgtgctgcagtacggcagcatcaccaccatcgacgtgccctggaacgtggtgcccgagaaggcccacctgctgagcctggtggacgtgatgcagagagagggcggccccagccagatcggcgacgccctgggcttcgccgtgagatacctgaccagcgagatgcacggcgccagacccggcgccagcaaggccgtggtgatcctggtgaccgacgtgagcgtggacagcgtggacgccgccgccgacgccgccagaagcaacagagtgaccgtgttccccatcggcatcggcgacagatacgacgccgcccagctgagaatcctggccggccccgccggcgacagcaacgtggtgaagctgcagagaatcgaggacctgcccaccatggtgaccctgggcaacagcttcctgcacaagctgtgcagcggcttcgtgagaatctgcatggacgaggacggcaacgagaagagacccggcgacgtgtggaccctgcccgaccagtgccacaccgtgacctgccagcccgacggccagaccctgctgaagagccacagagtgaactgcgacagaggcctgagacccagctgccccaacagccagagccccgtgaaggtggaggagacctgcggctgcagatggacctgcccctgcgtgtgcaccggcagcagcaccagacacatcgtgaccttcgacggccagaacttcaagctgaccggcagctgcagctacgtgctgttccagaacaaggagcaggacctggaggtgatcctgcacaacggcgcctgcagccccggcgccagacagggctgcatgaagagcatcgaggtgaagcacagcgccctgagcgtggagctgcacagcgacatggaggtgaccgtgaacggcagactggtgagcgtgccctacgtgggcggcaacatggaggtgaacgtgtacggcgccatcatgcacgaggtgagattcaaccacctgggccacatcttcaccttcaccccccagaacaacgagttccagctgcagctgagccccaagaccttcgccagcaagacctacggcctgtgcggcatctgcgacgagaacggcgccaacgacttcatgctgagagacggcaccgtgaccaccgactggaagaccctggtgcaggagtggaccgtgcagagacccggccagacctgccagcccatcctggaggagcagtgcctggtgcccgacagcagccactgccaggtgctgctgctgcccctgttcgccgagtgccacaaggtgctggcccccgccaccttctacgccatctgccagcaggacagctgccaccaggagcaggtgtgcgaggtgatcgccagctacgcccacctgtgcagaaccaacggcgtgtgcgtggactggagaacccccgacttctgcgccatgagctgcccccccagcctggtgtacaaccactgcgagcacggctgccccagacactgcgacggcaacgtgagcagctgcggcgaccaccccagcgagggctgcttctgcccccccgacaaggtgatgctggagggcagctgcgtgcccgaggaggcctgcacccagtgcatcggcgaggacggcgtgcagcaccagttcctggaggcctgggtgcccgaccaccagccctgccagatctgcacctgcctgagcggcagaaaggtgaactgcaccacccagccctgccccaccgccaaggcccccacctgcggcctgtgcgaggtggccagactgagacagaacgccgaccagtgctgccccgagtacgagtgcgtgtgcgaccccgtgagctgcgacctgccccccgtgccccactgcgagagaggcctgcagcccaccctgaccaaccccggcgagtgcagacccaacttcacctgcgcctgcagaaaggaggagtgcaagagagtgagcccccccagctgccccccccacagactgcccaccctgagaaagacccagtgctgcgacgagtacgagtgcgcctgcaactgcgtgaacagcaccgtgagctgccccctgggctacctggccagcaccgccaccaacgactgcggctgcaccaccaccacctgcctgcccgacaaggtgtgcgtgcacagaagcaccatctaccccgtgggccagttctgggaggagggctgcgacgtgtgcacctgcaccgacatggaggacgccgtgatgggcctgagagtggcccagtgcagccagaagccctgcgaggacagctgcagaagcggcttcacctacgtgctgcacgagggcgagtgctgcggcagatgcctgcccagcgcctgcgaggtggtgaccggcagccccagaggcgacagccagagcagctggaagagcgtgggcagccagtgggccagccccgagaacccctgcctgatcaacgagtgcgtgagagtgaaggaggaggtgttcatccagcagagaaacgtgagctgcccccagctggaggtgcccgtgtgccccagcggcttccagctgagctgcaagaccagcgcctgctgccccagctgcagatgcgagagaatggaggcctgcatgctgaacggcaccgtgatcggccccggcaagaccgtgatgatcgacgtgtgcaccacctgcagatgcatggtgcaggtgggcgtgatcagcggcttcaagctggagtgcagaaagaccacctgcaacccctgccccctgggctacaaggaggagaacaacaccggcgagtgctgcggcagatgcctgcccaccgcctgcaccatccagctgagaggcggccagatcatgaccctgaagagagacgagaccctgcaggacggctgcgacacccacttctgcaaggtgaacgagagaggcgagtacttctgggagaagagagtgaccggctgcccccccttcgacgagcacaagtgcctggccgagggcggcaagatcatgaagatccccggcacctgctgcgacacctgcgaggagcccgagtgcaacgacatcaccgccagactgcagtacgtgaaggtgggcagctgcaagagcgaggtggaggtggacatccactactgccagggcaagtgcgccagcaaggccatgtacagcatcgacatcaacgacgtgcaggaccagtgcagctgctgcagccccaccagaaccgagcccatgcaggtggccctgcactgcaccaacggcagcgtggtgtaccacgaggtgctgaacgccatggagtgcaagtgcagccccagaaagtgcagcaagtag

SEQ ID NO: 2292 - DNA, 816 bp, synthetic construct
  misc_feature 1..816: note = source = /note="Description of Artificial Sequence: Synthetic coding sequence"
  source 1..816: mol_type = other DNA
atgaccgagccccaggtgggctgcgtggcctgccccagagtgcacaaggagcccgcccaggtgggcaccccctggcccgccaagcccagaagccaccccagaaagagagaccccaccgccctgctgcccagaagcctgtggcccgcctgccaggagagcgtgaccgccctgtgcttcctgcaggagaccgtggagagactgggccagagccccgcccaggacacccccgtgctgggcccctgctgggaccccatggccctgggcacccagggcagactgctgctggacagagacagcaaggacacccagaccagaatcagccagaagggcagaagactgcagccccccggcacccccagcgcccccccccagagaagacccagaaagcagctgaacccctgcagaggcaccgagagagtggaccccggcttcgagggcgtgaccctgaagttccagatcaagcccgacagcagcctgcagatcatccccacctacagcctgccctgcagcagcagaagccaggagagccccgccgacgccgtgggcggccccgccgcccaccccggcggcaccgaggcccacagcgccggcagcgaggccctggagcccagaagatgcgccagctgcagaacccagagaacccccctgtggagagacgccgaggacggcacccccctgtgcaacgcctgcggcatcagatacaagaagtacggcaccagatgcagcagctgctggctggtgcccagaaagaacgtgcagcccaagagactgtgcggcagatgcggcgtgagcctggaccccatccaggagggctag

SEQ ID NO: 2293 - DNA, 1182 bp, synthetic construct
  misc_feature 1..1182: note = source = /note="Description of Artificial Sequence: Synthetic coding sequence"
  source 1..1182: mol_type = other DNA
atgacgacctacagcgacaaaggagctaagccggagcggggcagatttctccacttccattcagtgacattttgggtgggcaatgccaaacaggcaacatccttctactgctcaaagatgggtttcgagcccttggcatacagagggctggagacagggtcgcgggaggtggtgtcccacgtcatcaagcagggcaagatcgtgttcgtgctttcatcggctttaaatccatggaacaaggagatgggtgaccacctagtcaagcatggtgacggtgtcaaggacatcgccttcgaggtggaagattgtgactacattgtccaaaaagcccgcgagagaggcgctaagattatgagagagccttgggtcgagcaggacaagttcggcaaagtgaagttcgcagtccttcagacctacggcgataccactcacaccctagtggaaaaaatgaattatattggtcagtttttgccaggatacgaagccccagctttcatggatccactcctccccaaactgcccaaatgcagcctcgagatgatcgatcacattgtgggcaaccaaccagatcaggaaatggtgagcgcctccgaatggtacctcaaaaacttgcagttccatcgtttttggtcggttgatgatacccaggttcacaccgaatattcctccctgcgatcgatcgtggtagccaactatgaagaatccattaagatgccaatcaacgagcctgctcctgggaagaaaaaaagccaaattcaggagtacgtggactacaatgggggtgcgggcgtacagcacatcgccctgaaaaccgaagacattatcacagctataaggcacctccgggaaaggggcctcgaatttctctcagtgccaagcacctactacaaacagctccgcgaaaagctcaagacagccaagattaaagtgaaagagaatatcgatgctctggaagagctgaagattctcgtggattatgatgagaaggggtatctcttgcagatttttacgaagcccgtccaggaccgacccactctgttcttggaggttattcaacggcataaccaccagggttttggcgcaggcaacttcaactccctgttcaaagccttcgaagaggaacagaatcttcgagggaatctaacgaatatggagacaaatggagttgttcctggcatgtag

SEQ ID NO: 2294 - DNA, 1065 bp, synthetic construct
  misc_feature 1..1065: note = source = /note="Description of Artificial Sequence: Synthetic coding sequence"
  source 1..1065: mol_type = other DNA
atgggcttcgaaccactggcttatcgggggctggagactggctccagagaggtcgtctcacacgtgatcaaacagggtaagatcgtatttgtgctttctagcgcactcaacccgtggaataaggagatgggtgatcatttggtcaagcacggagatggagtgaaggatattgccttcgaggttgaggattgcgactacatcgtacagaaagccagagaaaggggcgcaaagattatgcgcgagccttgggtggagcaagacaaatttggtaaggttaaattcgccgtgctgcagacttacggagatacaacgcacaccttggtggagaagatgaattacattggtcagtttctccctggatatgaagctccagcattcatggatcctcttctcccaaaactccccaaatgttctttggagatgattgatcacatagtgggcaatcagcccgaccaggagatggtgtccgcgtccgaatggtacctgaagaatctgcagtttcatcggttttggagtgtggacgacacccaggtgcataccgagtactcttctctgagatctattgttgtagctaactacgaggaatccattaagatgcccatcaacgagccagcccccggaaagaaaaagtctcaaatccaagaatacgttgactacaatgggggggcaggcgtgcaacacatcgcccttaaaactgaggatatcattacggcgatccggcatcttagggagagagggctagaatttctcagcgtgccaagcacatactataagcagctcagggaaaaactgaaaactgccaagatcaaagtcaaagaaaacatcgatgctttggaggagctcaaaatactggtcgactacgatgaaaaagggtatctgctccagatatttactaaacctgtgcaggatcggcctaccctctttttggaggttattcaacgtcacaaccatcaaggctttggagccgggaattttaactccctgtttaaagcctttgaggaagagcaaaacctcagaggcaacttaaccaacatggaaacaaatggcgtggtgcccggaatgtag

SEQ ID NO: 2295 - DNA, 1173 bp, synthetic construct
  misc_feature 1..1173: note = source = /note="Description of Artificial Sequence: Synthetic coding sequence"
  source 1..1173: mol_type = other DNA
tacagtgacaaaggcgcaaaacctgaacgtggccgcttcctgcattttcattctgttaccttctgggtcggaaacgccaagcaggcaacaagcttttattgtagtaagatggggtttgagcccttagcctaccgggggctggagacagggtctagggaggtagtgtcccatgtgatcaaacaaggaaaaatcgtcttcgtgctgagttcggcactcaacccatggaacaaggagatgggtgaccaccttgtaaaacatggcgacggagtaaaggacatcgcctttgaggtcgaggactgtgactatatagtacagaaggcccgagagagaggggctaagataatgcgagaaccctgggtcgagcaggataaattcggtaaggtgaaatttgccgtcctgcagacatatggagacactactcacaccttagttgaaaaaatgaattatattggccagttcctgcccggttacgaagcccccgcctttatggatccacttttacctaaactgcccaaatgttctctggaaatgattgatcatatcgtgggcaatcagccagaccaagaaatggtgagcgcctcagaatggtacttgaagaatttgcaattccatcgcttctggtcagtggacgacacccaagtacatacagagtatagtagtctgcggtccatagtggttgccaattacgaggaatcaatcaagatgccaatcaacgagcctgccccaggcaagaagaaatcacaaatccaggagtatgtggattacaatggtggggcaggcgtgcaacacatcgccttaaagaccgaagatatcataacagccattcgccacctgcgggagaggggcctagaatttctttctgttccatctacttactataaacagttgagggaaaagctgaaaaccgcaaaaattaaagttaaagagaatatcgacgcccttgaagaactcaagatcctcgtggactatgatgagaaggggtacttactgcagatttttacgaaacccgtccaagacaggccaactctgttccttgaggtgattcagcgccacaaccaccagggatttggcgctggtaacttcaatagtctgtttaaggctttcgaggaggagcagaatttgcgcggaaatctcaccaatatggagaccaatggagtagtgccgggaatgtag

SEQ ID NO: 2296 - DNA, 438 bp, synthetic construct
  misc_feature 1..438: note = source = /note="Description of Artificial Sequence: Synthetic coding sequence"
  source 1..438: mol_type = other DNA
atgtctactgaggggggcggtaggagatgtcaggcacaggtgtcccggaggatttctttcagcgcctcacacagactttacagcaaattcctgtcagacgaagagaatctcaagctgtttggaaagtgtaacaacccaaatggccatgggcacaactacaaggtggtagtcacggtccacggcgaaatcgatcccgccactgggatggtcatgaatttagccgatcttaagaaatacatggaggaggctattatgcaacccctggaccacaagaacttggacatggacgtgccatacttcgcagacgtggtctctaccacagaaaacgtcgcggtgtacatttgggacaacctccagaaggtcctgccggtgggcgttctgtacaaggtaaaggtgtatgagacagacaacaacatagtggtgtataaaggagagtag

SEQ ID NO: 2297 - DNA, 4284 bp, synthetic construct
  misc_feature 1..4284: note = source = /note="Description of Artificial Sequence: Synthetic coding sequence"
  source 1..4284: mol_type = other DNA
atgcaccagcggcacccacgggcccgctgtccaccactgtgcgtcgcaggtatcctcgcatgcggattcctgttgggctgctgggggccctcacacttccagcaaagctgcctgcaggccctggagccacaggccgtaagctcatacctatctcccggagctccactcaaggggcgcccacccagcccaggctttcagcgacagagacaacggcagcggcgggccgctggagggatactccatctcgaactgctcgtggcggtgggacccgacgtcttccaggcccatcaagaggacaccgaacgctatgtcttaactaacttgaacataggagccgagctattgagagatccctccctgggagcacagtttcgcgttcatcttgtgaagatggtgattcttaccgagccagaaggcgcccccaatatcaccgccaatctgacatcctccctccttagtgtttgcggctggtcccaaacaatcaatcctgaagatgatacggaccctggccacgctgatttggtcctgtatattacgaggtttgatttggagctgcctgacgggaatcggcaggtcaggggcgtcacccaactcggtggcgcttgctctcctacctggagttgtttgattacagaggatacaggtttcgatctgggcgtcaccattgcacacgaaattgggcactcattcgggttagaacacgacggagcccccggcagcggctgcgggccctccggccatgttatggcctccgatggcgccgcaccccgcgctgggttagcttggagcccttgctctcgtaggcagttgctgtcactgctgtccgctggcagagcacgttgcgtgtgggaccctcctcggccccagccggggtcagcaggacaccctcccgacgcccagccaggactatactattccgccaacgagcaatgtagagtagcattcggccccaaagccgtcgcctgcacatttgccagggaacaccttgacatgtgccaggccctttcgtgccacaccgaccctctggaccagtcttcatgctccaggctgcttgtgccccttctggacggaaccgagtgcggagtcgagaaatggtgtagtaaaggtcggtgtagaagcctggtggaactaacacctatcgctgctgtacacgggagatggagctcttggggcccaagaagcccttgttcgagatcgtgtggcggtggagttgtgacccgtagacggcagtgtaacaaccctaggcccgcattcggagggagagcatgcgtgggggccgatttacaagcagaaatgtgtaatacccaggcatgcgaaaagacacagcttgaatttatgtctcagcagtgtgcaagaaccgatgggcagccgctgcggagtagcccaggaggagcgtcattttaccattggggagccgcagtcccccactcccagggtgatgccctgtgtcggcacatgtgtcgagctatcggcgaatcttttattatgaaacgtggtgactcatttctggacggcaccaggtgcatgccttcagggcctagagaggatgggactttatcgctatgcgtgtccgggtcctgccggaccttcggatgcgatgggagaatggactcgcagcaggtctgggatagatgccaggtgtgcggaggtgataacagcacttgttcaccgaggaagggttccttcaccgcaggccgtgcccgcgaatacgtgacatttctcaccgttacacccaacctgacatctgtgtacattgcaaaccacaggcccttgtttacacatctggcggtgagaattggaggtcgttacgtggtggcaggcaaaatgtctatatctcccaacacaacctacccttctctgctggaggatggtcgcgtcgagtatcgggtcgctctcactgaggacaggctgccacggctcgaggaaatccggatttgggggcctcttcaggaggatgccgatatccaagtctatagaagatacggcgaggagtacggcaatttaactaggccagatatcacattcacttactttcagccaaagccaaggcaggcttgggtgtgggcggccgtcagaggtccatgtagcgtgtcctgtggcgctggcctgaggtgggttaattactcatgtttggatcaggcccgaaaagagctggtggaaaccgtgcaatgtcagggatcacagcagccccccgcatggcccgaagcgtgtgtgctagagccctgccccccgtactgggccgtgggtgatttcggcccatgctctgcctcttgcgggggcggcctcagagagagacctgtacggtgcgtcgaggctcagggctccctgctgaagactttaccccccgctcgctgtagggccggggcacaacagcccgcagtggccctggaaacctgcaacccacaaccatgtcctgcccggtgggaggtgagtgagccaagcagctgcacttcagccggcggggcaggactggcgttggaaaatgagacctgtgtgcctggcgccgatgggttggaggcccctgtgacagagggccctgggtctgtggacgagaagctgcctgcccctgagccttgcgtcggaatgagctgtcctccaggctgggggcatctcgacgccacatccgctggagaaaaagctccctcaccatggggctcaattaggactggggcccaggccgcacacgtttggacccctgccgccggcagctgctccgtcagctgcggccgaggtctgatggagctacgctttctttgtatggattctgcacttcgcgtgccggtgcaggaggaactttgcggactggcttccaagcctggctcaaggcgcgaggtatgccaggcagtgccttgtcccgcaaggtggcagtataagctggctgcctgttctgtgtcttgtgggagaggagtggtcagaagaatcctgtattgcgcgagagcccatggggaagatgacggcgaggaaatactgctagacacacagtgccagggactgccccgacctgagcctcaagaagcctgctcgttagagccttgccccccgaggtggaaggtaatgagtctcggtccctgttcagcctcttgtggtctcgggactgcccggcgcagcgtggcctgtgtgcaactagatcagggccaagacgtggaagttgacgaagccgcttgtgctgcccttgttaggcccgaagcttcggttccatgtttaattgcagattgtacctacagatggcatgtaggcacctggatggagtgcagcgtgtcttgcggcgatggaattcagagacgccgggatacttgtctgggcccacaggcccaagcccctgtgcccgctgacttttgccagcacctgccgaaaccggtaaccgtgcgtgggtgctgggccggcccctgcgtcggacagggaacaccttccttagttccgcacgaggaagccgccgcccctggcagaactacagcaacccccgctggcgcctctctcgagtggtctcaggcacgcggcctgctgttctctcccgcgccacaaccccgcagattgctcccaggcccccaagagaattcagttcagagctccgcctgtgggaggcagcatcttgagcctaccggcacaattgatatgcggggcccagggcaagccgactgtgctgtagcgattgggcggcctttgggggaggtggtgaccctcagggtgctggagtctagcctgaactgttctgcaggcgacatgctcctgctctggggccggctgacctggcgcaagatgtgcagaaagcttctcgacatgaccttttcgtctaagacaaacacgttggtggtgagacaacgatgcggtcgaccaggcgggggtgtgctgttgagatatggaagccaacttgcacccgagactttttatagagagtgtgacatgcagttattcggcccatggggagagatcgtgtctccatctctgtcccccgcaacgtcaaacgctggcggttgccgtctgttcatcaatgtggcaccgcacgcaagaatagccatccacgcccttgcaaccaacatgggcgccggcactgagggcgcgaacgcatcatacatcctgatccgcgacactcacagcctgagaaccaccgctttccacggtcaacaggtgctctactgggaatcagagagttctcaggccgagatggaatttagcgaggggttccttaaagctcaggcttcactccgcggacagtattggacactgcagtcctgggtgcctgagatgcaggatccccagtcgtggaagggcaaagagggcacttag

SEQ ID NO: 2298 - DNA, 3309 bp, synthetic construct
  misc_feature 1..3309: note = source = /note="Description of Artificial Sequence: Synthetic coding sequence"
  source 1..3309: mol_type = other DNA
atgtttcaactgcccgtcaataatctcggctcccttagaaaggccagaaaaaccgtcaagaagatcctttccgacatcggattggagtattgtaaggagcatattgaggacttcaaacagttcgaaccaaacgacttttatctgaagaacaccacatgggaggacgtcgggttgtgggacccctccttgacgaaaaaccaggactatcgcaccaagcctttctgctgctcagcttgcccattcagctccaagtttttctctgcctacaaatcgcattttcgcaatgtgcattctgaggactttgagaatcggatcctactcaattgtccctattgtacctttaatgctgacaaaaagactctggagactcacattaagatatttcacgctcccaacgctagtgccccgtcttctagtttgagcaccttcaaagataaaaacaaaaacgacggattaaagcccaagcaggcagactcggtagaacaggcagtgtattactgtaagaagtgtacgtatcgcgatcctctctatgaaatcgtccgtaaacatatttatagggaacattttcagcacgttgccgccccttacatcgccaaggctggggagaaaagcctgaatggggccgtccccctgggcagcaacgcaagagaggagagcagcatccactgcaagaggtgtctttttatgcccaagagctacgaggctcttgtgcagcacgtgatcgaagatcatgagaggatagggtatcaggtcactgcgatgatcggccatacgaacgtggtcgtgcccagaagcaagcctcttatgttgattgcacccaaacctcaagataaaaagagcatgggtttgcctcctaggataggatccctagcttcgggcaatgttcggagtctcccatcgcagcagatggtgaaccggctatctattcctaagccaaacctgaattccaccggggttaacatgatgtcctccgtgcatcttcagcagaacaactatggcgtaaaatccgtgggccagggatactctgtaggtcagtctatgcgactgggactgggagggaatgccccagtgtctatccctcaacagtcacaatcagtgaaacagctcctgccctcaggtaacggcagatcttacgggcttgggagcgaacagagatcacaggctccagcgaggtacagtctgcagtctgcaaatgcctcatcactctctagcggacagctcaagtccccgagcctgagccaatctcaggcttccagagtgctgggccagagttcctccaagcctgccgccgccgccactggcccccctccaggcaatacctcatcaacgcagaagtggaagatctgtactatttgtaatgagctgttcccagaaaacgtgtactcagtgcacttcgaaaaagagcacaaggccgaaaaggtccctgccgtggccaattacatcatgaagatacacaatttcacttctaaatgcctgtactgtaataggtatcttccaaccgataccctattgaaccacatgcttatccatgggttaagctgtccttactgccggagcacattcaacgatgttgagaagatggccgcgcatatgcgcatggttcacattgacgaggaaatgggacccaaaaccgatagtacattgtcttttgaccttactttgcagcagggctctcacaccaacatccacctactcgtgaccacttacaacctgagggatgccccagccgagtctgtcgcttaccatgctcaaaacaatcctcccgtgcctccaaagccacagcctaaggtacaggagaaagccgacattccggttaagtcaagccctcaagccgccgtaccctacaagaaagatgtaggaaaaaccctgtgccctctgtgcttcagcattctgaaagggccaatttccgatgctcttgcccatcacttgagagaacggcatcaggtgatccagactgttcaccctgtcgaaaagaagcttacctacaagtgcatccattgtctcggagtctacacgtcgaacatgacagcttctacaattactctccaccttgtccattgcaggggagtcggaaaaacccagaacggccaagacaaaaccaacgccccatctagactcaatcaatcgcctagcctggcgcccgttaagagaacttacgagcagatggagttccccctgttgaagaaaaggaaattagacgatgatagtgactctccgtcattctttgaggaaaaacctgaagagccggttgtgctcgctttagatcctaagggacatgaggatgacagctatgaggcccggaagagttttctgacaaagtattttaacaaacagccctatcctactcgtagggagattgagaaactcgcagcctccttgtggctctggaagtccgacatagcttcacatttctctaataagaggaagaaatgcgtgagggactgcgaaaaatacaagcccggtgttctgcttggattcaacatgaaagagctcaataaagtgaaacacgagatggactttgatgccgagtggctctttgaaaaccacgacgagaaggatagccgggtcaacgcttccaagaccgccgataaaaagctgaacctcgggaaggaggatgactcgtcttcagacagctttgaaaatctagaagaagaatctaatgagtctggcagccccttcgaccctgtgttcgaggtggagccaaagatttccaatgataacccagaggaacatgtgttaaaggtgatcccagaagacgcgagtgagtcagaggaaaagctggaccaaaaagaggacggctccaaatacgaaaccatccatctcaccgaagagccgaccaaactgatgcacaatgcatcagactctgaagtggatcaggatgatgttgtggagtggaaggatggcgcgagtccctcggagtctggccctgggtctcagcaggtctccgacttcgaagacaatacctgtgagatgaaacctggcacttggagcgacgagtcatctcaaagcgaggacgcacggtctagcaaacctgccgccaaaaaaaaggccacaatgcagggcgacagagagcagctgaaatggaagaactccagttacggcaaagtggagggcttctggtccaaggaccagtcacagtggaagaacgctagcgaaaacgatgaaagactgtccaacccgcagatagaatggcaaaattccacgatcgatagtgaggacggtgagcagtttgataatatgaccgatggcgtggctgagcccatgcatggctcactggctggtgtcaagctcagttcccagcaggcctag

SEQ ID NO: 2299 - DNA, 3309 bp, synthetic construct
  misc_feature 1..3309: note = source = /note="Description of Artificial Sequence: Synthetic coding sequence"
  source 1..3309: mol_type = other DNA
atgtttcaactgcctgtgaataacctgggcagcctcaggaaggcccgcaaaaccgtgaaaaaaatcttaagtgatattggcctggagtattgtaaagaacacattgaagacttcaaacaattcgaacctaacgatttctacctgaagaacactacgtgggaagacgtcggcctttgggatccaagcctcacaaaaaaccaggattataggactaagcctttttgctgttccgcatgccctttctctagcaagttttttagcgcttacaagtcgcacttcaggaatgtgcactcggaagactttgaaaaccgtatcctgctgaattgtccatattgcacctttaacgccgacaaaaagaccctcgagactcacatcaagattttccatgcccccaacgccagcgcaccaagcagtagcctgtctactttcaaggacaagaataagaacgacgggctcaaacctaagcaagcagatagtgtcgaacaagctgtctactactgcaaaaaatgtacatatagggatcctctctatgagatcgtgaggaagcatatctaccgggagcattttcagcatgtcgcggctccgtatattgccaaagctggcgaaaagagcctgaacggtgccgtccctcttggatcaaatgcacgtgaagagagttcaattcactgtaagcggtgtctgtttatgcccaagtcctatgaagccttagtgcaacacgtcattgaggaccacgagcgcattggataccaggtcaccgctatgattgggcataccaatgtggtagtgccaaggagtaaacctctcatgctaatagcgcccaaaccacaggataaaaagtcaatgggcctaccccctcgcatcggaagtctggcttcaggcaatgtgcgttccctcccgtcccagcagatggtgaaccggctgagtatacctaagccaaatcttaattcgacaggggtgaacatgatgtctagcgtgcacctccaacaaaacaactacggggtgaagagcgtggggcagggatactctgtgggccaatccatgagactgggcttaggaggcaacgcccccgtgtctataccacagcagtcccagtccgtcaagcaacttctgccaagcggcaatggtcggtcctacggtttggggtccgagcaacggagccaggcccctgcacgctactcactgcagtcggcaaatgcttcctccctcagcagcggccagctaaagtcaccctcactgtcacagtcgcaggccagcagagttttaggccagtcctcttccaagcccgcagcagccgccacgggtccacctcctggaaatacttcatccacacagaagtggaagatatgcactatttgtaatgagctgttcccggagaacgtgtactccgtgcattttgagaaggagcataaggccgagaaagtgcccgccgtggccaattatatcatgaagattcacaatttcacctcgaagtgcttgtactgtaaccggtatctgcccaccgacacccttcttaatcacatgttgatccatggcctgagctgtccgtactgtcggagcacctttaatgacgttgagaagatggcggctcacatgcgtatggtgcatattgatgaggaaatgggacctaagaccgacagcaccctcagtttcgatctgacattgcaacaggggtctcacacaaatatccacttgcttgttaccacttataatttgagggatgcaccagcagagtcagttgcatatcacgctcagaacaaccctcccgtgccccctaagcctcagcctaaggttcaggaaaaagcggacattcccgtgaagagcagccctcaggcagcggttccttataaaaaggacgtggggaagaccctgtgtccgttgtgcttttccatcctgaaggggcccattagcgatgcccttgcccaccatttgagagaacgccatcaggtgatccagactgtacatccggtggaaaagaagctcacgtataaatgcattcattgcttgggggtttatacctctaatatgacagcctccacgatcacccttcacctggtacattgccgaggtgtaggcaagacacagaatgggcaggacaagactaacgctccttctcggcttaaccaaagccctagcctggcccccgtcaagcgtacctacgaacagatggagttcccattgcttaagaaacgtaagttagacgatgactctgacagtccgtctttctttgaggaaaagcccgaggaacccgtggtgttggcccttgaccctaaaggccacgaagacgatagctatgaggcccgaaagagcttcttaacaaagtacttcaacaaacaaccgtacccgacccggcgcgaaattgagaagttggctgcctccctatggctgtggaagtcagatattgcaagccactttagcaacaagcgtaaaaagtgcgttagggactgcgagaagtacaaaccaggggttcttttgggcttcaatatgaaggaacttaataaggtgaaacatgaaatggactttgacgctgagtggttattcgagaaccacgacgaaaaggacagtagggtcaatgcaagcaaaactgctgataagaaactgaacctgggaaaagaagatgactcctcttccgactcatttgagaacctcgaagaggagagtaatgagagcggctcaccattcgatcccgtgttcgaggtcgagccaaaaataagtaacgataatccagaagagcatgtcctgaaggtgatccccgaggacgccagtgagagcgaagaaaagctggatcagaaggaggatggttcaaagtatgagactattcatttgacggaggaaccaactaagcttatgcacaacgccagcgattccgaagtggaccaggacgacgtggtggaatggaaagatggcgccagcccatcggagtcaggacctggatctcagcaggtgagcgattttgaggacaacacgtgcgaaatgaaacctggtacatggtcagacgagagttcacaatcagaggacgcaagaagtagcaagcccgcagccaagaagaaagctaccatgcagggtgatcgggaacaactgaaatggaagaacagtagttatggcaaagtggagggcttctggtcaaaggaccagtcacaatggaaaaacgctagcgagaacgatgaacgtctgtctaacccacagatagaatggcagaatagtacgatagactctgaggatggagaacaatttgataatatgacagatggcgtggccgagcccatgcatgggtcccttgcaggcgtaaagctatccagccagcaggcctag

SEQ ID NO: 2300 - DNA, 3309 bp, synthetic construct
  misc_feature 1..3309: note = source = /note="Description of Artificial Sequence: Synthetic coding sequence"
  source 1..3309: mol_type = other DNA
atgttccagctgcccgttaataatctggggtcactgaggaaagctcgtaagactgtcaagaaaattctgtcagacatcgggttggagtactgtaaagagcacatcgaagacttcaagcaattcgaaccaaacgatttttatctgaaaaacacaacttgggaggacgttggtctctgggaccccagtcttacaaagaaccaggattatcgaacgaagccgttctgttgttctgcttgtccgttttcaagcaaatttttctccgcttacaaaagtcacttccgaaatgtgcactcagaagacttcgaaaacagaattctgcttaattgcccctactgcacctttaacgccgacaagaaaacccttgaaacccacattaaaatcttccacgccccgaacgctagcgcgccaagtagcagtctcagtacatttaaggacaaaaacaagaacgatggcctcaagcctaaacaggccgactccgtggaacaggccgtgtattactgcaagaaatgcacatatagagatccactgtatgaaatcgtcaggaagcacatataccgggagcactttcaacacgtagcagccccttacatcgccaaggcaggcgaaaagtccttgaacggagccgttccgctcggatccaatgcaagagaagaatcatcaatccattgtaagagatgtctgttcatgccgaagtcctatgaggccctggtccaacacgttattgaggaccatgagcgcatcggataccaggtgaccgctatgataggccacacaaatgtggtggtgccacgtagtaagcctttaatgttgattgctcccaagccacaagacaaaaagagtatgggtctcccgccacgaatcggctcgctggcctcaggcaacgtgagatcactgccctcgcagcagatggtgaaccgcctttctatacccaagcctaatttaaactcgacaggagttaacatgatgagttccgttcatctgcagcaaaacaactatggcgtcaaatctgtgggccagggctattctgtcggtcagagtatgaggcttggtctaggcgggaacgctcctgtgtccatacctcagcaaagtcagtcagtgaagcagctcctgccaagtggaaatggtcgatcttacggtctgggcagcgaacagcggagccaggcacctgcccgctactctctgcaaagcgccaacgcatccagcctgagctcaggccagttgaagtcgccgtcgctgtcgcaatcccaggcttcccgggttctaggccagtcttcctccaagccggctgccgccgcgaccggcccgcctcctggaaacaccagttcaactcagaagtggaagatttgcaccatttgcaatgagctgtttcccgagaatgtctactccgtgcattttgaaaaggaacacaaagccgagaaagtgccagctgtggccaattacattatgaagattcataacttcactagtaagtgcctgtactgtaacagatacctgcccacagacacacttttaaatcacatgctcattcacggactgtcctgcccctactgtagaagtacctttaatgacgtcgaaaagatggcagcacacatgaggatggtccacatcgacgaggagatggggcctaaaaccgattcaaccctatcgttcgacttaaccctgcagcagggttctcacaccaatatacacttgctagtcacaacttataatcttagggacgccccggctgaatctgttgcctaccacgcacagaacaacccccccgtcccccccaagccacagccgaaagtgcaggaaaaggcagatatccctgtgaaatcgagcccacaagctgcagtaccttataaaaaagatgtggggaagaccttgtgcccactctgctttagcatactcaagggtcccatttccgacgctctagcacatcatctcagggaacggcaccaggttatccagacagttcatcctgtggaaaaaaagctgacctataaatgcatccattgtctgggagtgtatacaagcaatatgacagcatccaccatcacactgcacttggtgcattgcaggggagttggcaaaactcagaacggccaggacaagacaaatgctccgtccagactcaatcagagcccatcactagcccccgtgaaaagaacctatgaacagatggagtttccattgctcaagaagcggaagctggacgatgactcagatagtccctcctttttcgaggagaaacctgaagagccagtggtcctggcgttggatcctaagggtcacgaggacgatagctacgaagcaagaaaaagctttctgacaaaatattttaataaacaaccctatcccacacgacgtgagatcgaaaagctggctgcttccttgtggctgtggaagtcagacatcgcctctcacttctcgaataagagaaagaagtgtgtgcgggattgcgagaagtataagccgggcgtgctgttgggtttcaacatgaaagagcttaataaggtgaagcatgagatggattttgacgccgagtggctgttcgagaaccacgacgaaaaagactctagagtgaacgcctcaaagacggccgacaagaaattgaacctagggaaagaggatgattcatctagcgacagtttcgaaaacctggaagaagagtccaatgagagcggaagccctttcgaccccgtctttgaggtggagccgaaaattagcaatgacaatccagaagaacatgtactcaaggtgattcccgaggatgcctccgaatccgaagagaagctagatcaaaaggaagacggatctaagtacgagactatccacctgacagaagaacctactaaactcatgcataacgcctctgacagcgaggtggaccaggatgatgtagtagaatggaaagacggcgcctcaccctccgagagcgggccaggaagccagcaagtgagtgattttgaagataatacctgcgaaatgaaacccggaacatggagtgacgagtccagtcagtccgaagacgccaggtctagcaaaccggctgccaagaaaaaggccaccatgcagggggatagggagcagctgaaatggaagaacagcagctacggaaaggtggaaggcttttggtcaaaggatcagtcccagtggaagaacgcctctgagaatgacgaaagactctctaacccgcaaattgagtggcagaatagcaccattgattccgaagacggagagcaattcgataatatgaccgatggcgtggccgagcctatgcacggatccctcgctggagtgaagcttagttcacaacaagcatag

SEQ ID NO: 2301 - DNA, 3309 bp, synthetic construct
  misc_feature 1..3309: note = source = /note="Description of Artificial Sequence: Synthetic coding sequence"
  source 1..3309: mol_type = other DNA
atgtttcagctccccgtgaacaatctgggttctcttcgcaaagcgcgcaaaacagtcaaaaagatcttatccgatatcgggttggaatattgcaaggagcacattgaagattttaagcagttcgaaccgaacgatttttacctgaagaacaccacatgggaggacgtcggtctgtgggacccaagtctcaccaagaatcaggattatcgaacaaaacccttctgttgctctgcgtgtccattctcatctaaattcttttccgcctacaagtcccacttcagaaacgtccatagcgaagacttcgaaaatcgcatcctactgaactgtccctactgcacatttaacgccgacaagaaaacccttgagacgcacattaagatattccacgcccctaacgcctctgctccgagttcaagcctgagtacattcaaggataaaaacaagaatgacggcctgaagcccaagcaggcagattccgtggagcaggctgtttactactgcaagaagtgcacttatagagatcctttatatgaaatcgtgcgcaagcacatctatagggagcatttccagcatgtggctgctccatatattgctaaggccggtgaaaagtctttaaatggtgctgtgccactgggaagcaatgcccgcgaggagagcagtattcattgcaaacgatgtcttttcatgccaaaaagttacgaggcgctggtgcagcacgtaatcgaggaccacgaaagaataggataccaggtaaccgccatgatcgggcatacaaacgtcgttgtgccgcggtctaagcccctcatgctgatcgccccaaagccccaagataagaaatcaatgggcctgccccctcgcattggcagcctcgctagtggaaatgttcgctccctgccctctcagcagatggtcaacaggctgagcatccccaagccaaacctgaattccaccggagtaaacatgatgtcctctgtgcacctgcagcagaataattacggtgtgaaatctgtggggcaagggtacagcgtcggccagagcatgcgtttaggcttaggaggcaacgctcccgtgtccattccgcagcaatcccagtcagtgaaacagttgctcccctctggtaatggtaggagctacggtctgggtagcgagcagcggtcccaagcccctgcccggtatagccttcagagcgctaatgcatcttcactgtccagcggtcaactcaaatcaccgagtctaagccagagccaggcttctcgggttctaggccagagtagtagcaagcctgccgctgctgcaacaggaccacctccgggtaatacatcttcaacacagaagtggaagatatgtacaatttgcaatgagctttttcccgaaaatgtgtacagtgtgcacttcgaaaaggaacataaagcagaaaaagttcctgccgtggccaattatatcatgaagattcataacttcactagcaagtgtctgtactgtaaccggtatctgcctacggacactctgttgaatcacatgctgatccacgggctttcctgtccgtactgtcgatcaacgtttaatgatgtggagaaaatggccgctcacatgcggatggtccatattgatgaggaaatggggcctaagacagatagtactttgtctttcgatcttactttacaacagggctcccacaccaatattcacttgttggtgactacctataatctgcgggacgctcctgccgaatcagtggcctaccatgcacagaacaacccccccgtgccccccaagccgcagccaaaagtgcaggagaaagcggacataccggtcaagtcttcaccacaggcagccgtgccctataaaaaggacgtggggaagaccctctgcccgttgtgcttttcgatcctgaagggtccaatctcggatgccttagcccaccatctcagggaaagacaccaggtcattcagaccgtccatccagttgagaaaaagttgacttacaaatgcatccattgcctgggcgtctatacttctaatatgactgcgagtaccattactttgcacctggttcactgccgcggggtgggaaagacccagaatggccaggacaaaacaaacgcaccttctcgcctaaaccagagcccttccctggctcccgtgaagaggacatatgaacagatggaatttccactactcaagaagagaaagttagatgatgactccgacagcccctctttctttgaagagaaacctgaggagccggtggtgttggccttggacccgaagggccatgaagacgacagttatgaagcccggaaatcatttctcacaaaatatttcaataaacaaccctatcccaccaggcgcgagatcgaaaagctggccgcatccctgtggctgtggaaatctgacattgcaagccacttctcaaataagcgtaagaaatgtgtgcgcgattgcgaaaagtacaaacccggagtcctcctgggtttcaacatgaaagagttgaacaaggtgaaacatgaaatggactttgacgctgagtggctgtttgagaatcacgatgaaaaggacagtcgcgtcaatgcttccaagaccgcagataagaaactcaacctgggcaaggaggacgattccagcagcgatagcttcgagaatcttgaggaagagagcaatgaatctggatcaccttttgatccggtgtttgaggtggagcctaaaatcagcaatgacaatcctgaagaacatgtgttgaaggttatcccagaggacgccagtgagagcgaagagaagctcgaccagaaggaggacggatctaaatacgaaaccattcacctcacagaagaacccaccaagttgatgcacaatgcttcggacagcgaagtggatcaggacgacgtagttgagtggaaagatggtgcaagcccttcagaaagcggccctgggtcccagcaggtgtccgactttgaggacaacacctgtgaaatgaagccaggaacgtggagtgatgaatctagtcagtctgaggatgcccgctccagcaagccggctgcaaagaaaaaggccactatgcagggcgaccgggaacagttgaaatggaagaatagttcctacggtaaggtcgaggggttctggtcgaaagaccagtcccagtggaaaaacgctagtgagaacgatgagagactatctaaccctcagatcgaatggcagaactccaccattgattctgaggacggtgagcagttcgataatatgactgacggtgtggcggaaccaatgcacggctcgctcgctggggtgaagctatcctcgcagcaggcctag

SEQ ID NO: 2302 - DNA, 522 bp, synthetic construct
  misc_feature 1..522: note = source = /note="Description of Artificial Sequence: Synthetic coding sequence"
  source 1..522: mol_type = other DNA
atgtttcagttacccgtgaacaacctaggtagtctccgcaaggcccgaaaaacagtgaaaaaaatcctgagcgacatcggactggagtattgtaaggaacacatcgaggattttaagcagtttgaaccaaacgacttttatttaaagaatactacatgggaagatgtgggcttgtgggacccaagtctcacaaaaaaccaagactatagaaccaaacccttttgttgcagcgcttgtcccttcagtagcaagttcttctccgcttacaaatctcatttccggaatgtgcattccgaggacttcgagaatcgtattttactgaactgtccttactgcacattcaatgctgataaaaagactcttgagacccacataaagatcttccatgctccgaacgcatcagctccctctagttccctttccacatttaaggacaaaaataaaaacgatgggctcaagcctaaacaggccgacagcgttgagcaggctgtgtactattgtaaaaaatgcacatatcgctag

SEQ ID NO: 2303 - DNA, 441 bp, synthetic construct
  misc_feature 1..441: note = source = /note="Description of Artificial Sequence: Synthetic coding sequence"
  source 1..441: mol_type = other DNA
atggtgatcctgacagagccagagggtgcacccaacatcactgctaacctcacatcatctctgttgtcggtttgtggttggtcccagacaatcaaccctgaagacgatacagaccccggacacgccgatcttgtcctctacataactaggttcgacctcgaactgccagacggaaatcggcaagtcagaggcgtcactcaactcggtggcgcctgcagtccaacctggtcctgcctgatcaccgaagacactggctttgacctgggcgtcacaatagcccatgaaatcgggcaccgcatttgcgcccgcccttctcctgctacccagacacgatggacgaaggctgcagccgccgcaagctcgttcctgtcctggatgggccagaatgtagcctggagatctggtgcgcctcgtgtcgccgccgctccctggtggtcatag

SEQ ID NO: 2304 - DNA, 4116 bp, synthetic construct
  misc_feature 1..4116: note = source = /note="Description of Artificial Sequence: Synthetic coding sequence"
  source 1..4116: mol_type = other DNA
atgcaccagcgtcatcctcgcgccaggtgtcccccactgtgcgtggccggtatcctggcgtgcgggtttctacttggctgttggggaccatcccatttccaacagagctgtttgcaagcgctagagccccaggccgtgtcctcctatttgtcacctggcgccccattgaagggcaggcctccatcccccggctttcagcgccagcgacagagacaacgcagagccgccggcggcatcttgcacctagagcttctcgtcgccgtgggacctgacgttttccaggctcaccaggaggacacggagcgctatgtgctgaccaatttgaatattggtgccgagttgctgagagatccatcccttggagcccagttccgggtccatctagttaaaatggttatcctaactgaaccggagggcgccccaaatataactgcgaacttgactagttcccttctgagcgtttgcggatggagtcagaccatcaatcccgaggacgatacagatcccggccatgccgatctcgtgttgtatattactcggtttgacctggaactcccagacggcaaccggcaggtccgcggagttacccagttagggggggcttgctcccctacctggagctgtcttattaccgaggacacaggcttcgatctcggcgttacaattgcacacgagatcggtcacagcttcggcctggaacatgatggagcaccaggaagcggctgcggcccctctggacacgttatggcctcggatggggccgctccccgcgccggtctggcctggagcccatgctcgcggaggcagttgttgtcactcctgtctgctgggagggcccgatgtgtgtgggatcctcccagaccccagcctggaagtgccggccaccctccagacgcccagccaggtctgtattattcagcaaacgaacagtgcagagtggcattcggacctaaggctgttgcctgcactttcgcgagggagcatttggatatgtgccaggccctgtcatgccacaccgaccccctcgaccaatcatcgtgttctagactactggtgcccttgctggacgggactgaatgtggcgtggaaaagtggtgctccaaaggcagatgcaggagcctggtggagttaacccctatcgccgccgtacacggtcgctggagttcttggggcccccgcagcccatgttcgaggtcctgcggcggaggagtggtgacccggcgacgccagtgcaacaatccgcgtccggccttcgggggtcgagcatgcgtcggtgcagacctacaggccgagatgtgcaacacacaagcctgcgaaaaaacccagctggaatttatgtcacagcagtgtgcccggaccgatggccagccgctaagatcctcacccggtggcgccagcttctaccactggggagctgcagttccccatagccagggcgacgccctctgcagacatatgtgcagagccattggagagtcttttataatgaaaaggggcgattccttcctggatgggacccgctgcatgccttctgggccacgcgaggatggcactctgtcattatgtgtgtcagggagttgcaggacttttggctgtgacggtagaatggatagccagcaggtctgggatagatgccaggtttgcggaggtgacaattcaacctgcagtccacggaaagggtcttttacagccggccgcgctagggagtacgtcaccttcctcaccgtcactccgaacttgaccagcgtctatattgccaatcataggccactctttacccacctggctgtgaggatcgggggcaggtatgtggtggcgggtaaaatgtccatttcacccaacacgacataccctagtctgctcgaagacggaagagtggaataccgggttgcactgactgaagaccggttaccgagacttgaagagattagaatctggggcccactccaggaagatgctgacatccaggtgtatcgtaggtacggggaggagtacggaaatttgacaaggccagacataacttttacatattttcaaccaaagccaaggcaggcgtgggtgtgggctgcagtgagaggaccctgctctgtctcctgtggcgcaggcttacgctgggtgaactacagttgtctggaccaggcacgaaaggagctcgtggagacagtgcaatgccagggcagccagcagcccccggcttggcctgaggcctgcgtccttgagccctgtcctccctattgggcagtgggcgacttcggaccatgtagtgcaagctgtgggggcggcttgagggagagaccagtgcggtgtgtggaagcgcaaggctccctgctgaaaacactgccacctgcacgatgtcgggctggcgctcaacagcctgcagtggctctggagacctgtaaccctcagccatgccccgctaggtgggaggtgtctgagcctagctcgtgcacctcagccggaggcgccggactcgcactggaaaacgaaacctgtgtgccgggagccgacggcctcgaggctccagtgactgaaggccccggtagcgtcgatgaaaagctgcctgccccagagccctgcgtcggcatgtcttgccctccagggtggggccacctcgacgcaacctcggccggcgagaaagcaccttcaccttggggtagtatcaggacaggagcacaagccgcgcacgtgtggacacccgccgccgggagttgctcagtgtcctgcggaagggggttgatggaactccgtttcctgtgtatggactctgccttgagagtgccggtacaagaagagctgtgtgggctagccagtaagcccggaagcaggagggaggtgtgccaggctgtgccttgcccagcaagatggcaatacaagctggccgcatgctccgtttcgtgcggaagaggggtagtgcggaggatactttattgcgctcgggcccacggggaagatgatggcgaagagatactcttagacactcaatgccaagggttgcccagaccagaacctcaggaggcttgctctctcgagccctgcccaccccggtggaaggttatgtcccttggaccatgtagcgcctcgtgtgggctcggaaccgctagaagatcagtggcttgtgttcagctcgatcagggccaagatgtggaggttgacgaggctgcttgtgcggcactggttagaccagaagcttccgttccctgcctgattgccgattgtacatacaggtggcatgtgggcacgtggatggagtgctcggtgagctgcggcgacggtatacaacggaggagggacacctgtctgggtccgcaggcgcaggctcccgtgcccgctgatttttgtcagcacttacccaaaccagtcactgtgaggggctgctgggctggaccgtgtgtaggacagggggcctgcgggagacaacacctggagcccacaggtactatcgacatgagaggccctggccaagctgactgcgccgtggcaatcggcaggcctttgggcgaagtagtaacattacgcgttctggagagttctttgaattgttcggccggtgatatgctactgctctggggcagacttacttggcgtaaaatgtgtagaaagctgttggatatgacattcagctcaaaaaccaacacgctggtcgttcggcaacgatgcggaagacccggcggaggggttcttcttcgttatggcagccaactggcccctgaaaccttttatagagagtgcgacatgcaactgtttgggccgtggggggagatagtgtcaccctctctgtctccagctacctcaaatgccggcggctgtagactgttcattaacgtggccccgcatgctagaatagccattcacgcccttgcaacaaatatgggggctggcaccgagggagccaatgcaagctacatcctaatacgtgatacacactctttgcggacaacagcctttcacgggcagcaggtactttactgggaaagcgaaagcagtcaggccgagatggaattttctgaggggttcctcaaagcccaggcttccctgcggggccagtattggacacttcagagctgggtgcccgaaatgcaggaccctcaatcttggaaaggcaaggaaggaacatag

SEQ ID NO: 2305 - DNA, 4023 bp, synthetic construct
  misc_feature 1..4023: note = source = /note="Description of Artificial Sequence: Synthetic coding sequence"
  source 1..4023: mol_type = other DNA
atgcaccaaagacatccccgggcccggtgtccccctctttgtgtcgctggcattttagcctgtggcttcctcttgggttgttggggaccttctcactttcagcagtcctgcctgcaggcattagagcctcaggcagtgtcctcctacctgagccccggcgctccactgaaggggagacccccaagcccagggtttcagcggcaaaggcagcgacagcgaagggccgctggaggcattctgcatctggagctcctggtggcagttggaccagatgtctttcaggcacatcaagaggacacggaaaggtacgtcctgacaaatctgaacattggagccgagttgctgagggacccttcccttggcgctcagtttcgcgtccacttagtcaaaatggtgatccttacagaacccgagggggcccctaatatcactgccaatctcacttcatccctcctcagtgtgtgcggctggtcccagactattaatccagaggatgataccgatcctggtcacgccgatctcgttctatacattacacggttcgatttggaattgcctgacggcaatcgccaggtgcgcggagttacacaattgggtggggcgtgcagccctacctggtcttgccttattactgaggacacaggatttgacctgggggtgaccatcgcccatgaaatcggtcacagttttgggctggaacacgacggggcccctggctctgggtgcggaccatcaggacacgttatggccagtgacggtgctgcgccacgggctggactcgcctggagcccatgctcccgaagacagctgctgagcctgctcagcgccaacgagcagtgcagagtcgctttcgggcctaaggctgtggcttgtacttttgccagggagcacttggacatgtgtcaggccctgtcttgccacactgatcctctagatcagagtagctgtagccgactcttggtgccccttcttgacggcactgaatgtggggttgaaaaatggtgcagtaagggaagatgtaggagtcttgtggaactcacgcctatcgcagccgtgcacggcagatggagctcgtggggcccacgatcgccatgtagtcgcagctgcggcggaggggtggtgacccggaggagacagtgcaacaatccccggccggcattcggtggcagggcctgcgtcggagcagatctccaagctgaaatgtgcaacacgcaagcatgtgaaaaaacccagctagaattcatgtcccagcagtgtgcccggacagacgggcagcctttacggtccagtcctggcggggcctctttctatcactggggtgccgccgtcccccacagccagggagacgctctctgtaggcacatgtgtcgcgcaataggggaatcattcatcatgaagcgaggggactcattccttgatggaaccaggtgcatgccaagcggcccacgtgaggatggcaccctctccctgtgcgtgagtggcagttgtagaacattcggctgcgatggacgcatggattcacagcaggtgtgggacagatgtcaggtgtgcggtggcgacaactctacatgctcgccaagaaagggctcattcactgccggcagggcgagggaatatgtaaccttcctgacagtaacacctaacctaacctctgtgtatattgcaaaccatcgccctctgttcacccacctcgccgtgcgaattggaggccggtacgtagtcgcaggaaagatgagcatttctccaaataccacgtatcccagcctgttagaggatggccgcgtagaatatagggttgccctcacagaagatcgcctgccgagactggaagagatcaggatctggggacctctacaggaagacgccgacattcaagtgtaccgtcggtatggggaagaatacggcaacctgactcgcccagatatcacctttacatatttccagccaaagcccaggcaggcctgggtttgggctgccgtgagaggaccctgctccgttagttgcggagccggcctgcggtgggtcaattatagctgcctagaccaggcaaggaaggaactggtggagaccgtccagtgccagggctctcagcagccgcccgcctggcctgaagcatgcgtgctagaaccgtgtccaccctactgggctgtgggggatttcgggccctgttcagcctcttgcgggggcggactgagagagaggcctgtccggtgcgtggaagcccaaggatctcttctgaaaactctcccccccgcccggtgcagggctggagcgcaacagcccgcagtggccctggaaacttgtaatccccaaccgtgccctgcccgctgggaagttagtgaacctagtagttgtactagcgccgggggggcagggctcgccctcgaaaatgaaacctgcgttccaggagctgacggactcgaggctccagtgactgagggacccggaagcgttgacgagaagttgccagctccggaaccttgcgtcggcatgagctgcccacccggttggggccacctcgacgcaacatccgccggtgaaaaggccccatcgccatggggaagcatacgaacaggtgctcaggccgctcatgtttggacaccagcagctggctcctgctctgttagttgtggaagaggcctgatggaacttaggtttctgtgtatggatagtgcactccgggtccccgtgcaggaagagctgtgcgggctcgctagcaaaccagggagccgccgggaagtgtgtcaagcagtcccttgtcctgccaggtggcagtacaagcttgccgcatgctctgtgtcctgcggacgcggcgttgtgcggagaatcctatactgtgcccgagcgcatggagaggacgatggggaagaaatcctgctagacacacagtgtcaaggtctgccacgccccgaaccacaggaagcctgttccctggagccatgccctcccaggtggaaagtgatgagcctgggcccctgctctgcgtcttgtggtcttggaacggcccggcgaagcgtggcctgtgtccagctggatcagggccaggacgtggaagtcgatgaagcagcctgcgcagctctggtgcgccccgaagcctccgtgccctgcttgattgcggattgtacctatcgctggcatgtcggcacctggatggagtgctccgtgagctgtggagatgggatccaaaggagacgggacacctgtttgggtccgcaggcccaggcccctgtcccagctgacttctgccagcatctcccaaagccagtaaccgttcgtgggtgctgggccggcccctgtgtcggccagggagcctgtggccgccaacacctggagccgacaggaaccatcgacatgagggggcctggtcaggctgattgcgcagtcgctattggaaggccactgggagaagttgtgactctgagggtgctagaatccagtctgaactgctccgcaggagacatgctgctgctctggggccgtctgacatggcggaagatgtgcaggaagcttctcgatatgacattttcctctaagacaaacacactggtggtgaggcagcgctgcgggcggccagggggcggagtactcctgcggtatggatcccaactggccccagaaaccttttaccgtgaatgcgacatgcagttgtttgggccatggggcgaaatagtgagtccttctctgagcccagctacgagtaatgcaggtggttgtcggcttttcattaatgtcgctccacatgccaggattgcgatccatgctctggcaacaaatatgggcgcaggtacagagggcgcaaatgctagctacatcctgatacgggacacccattcactgcgtaccacagcttttcacgggcagcaagttctgtattgggagagtgagtcctcacaggccgagatggaattttctgaaggctttctcaaggctcaggcctctcttaggggccagtattggaccttgcagtcttgggtgcccgaaatgcaggatccccagagctggaagggaaaagagggaacctag

SEQ ID NO: 2306 - DNA, 672 bp, synthetic construct
  misc_feature 1..672: note = source = /note="Description of Artificial Sequence: Synthetic coding sequence"
  source 1..672: mol_type = other DNA
atgcgagggccaggtcaggcggactgcgccgtcgccatcggtcgtcctttgggggaggttgtaaccctgcgggttctggaatccagcctgaattgttccgccggcgacatgctacttctgtggggcagattaacctggcggaagatgtgccggaagctgctcgacatgaccttctcgtctaaaactaacacgcttgttgttaggcaacggtgcggaagaccaggaggcggcgtgttgctgaggtatggaagccaactggcacctgagactttttatagggagtgcgacatgcaactattcggcccttggggcgagatcgtcagtccctccttaagtcccgcgacatccaatgcaggggggtgccggctgtttatcaatgtggcccctcacgccaggattgccatacacgctctggcaaccaatatgggtgctggaaccgagggcgccaatgcaagttacattctcattagggacacccactcactgcgcacgactgcatttcatggtcagcaggtactttactgggaatctgaaagcagtcaggcagagatggagtttagcgaaggctttctgaaggctcaggctagtctgagaggtcagtactggacccttcagagttgggtgccagaaatgcaggaccctcagtcatggaagggaaaggagggaacttag

SEQ ID NO: 2307 - DNA, 1035 bp, synthetic construct
  misc_feature 1..1035: note = source = /note="Description of Artificial Sequence: Synthetic coding sequence"
  source 1..1035: mol_type = other DNA
atgcaccagcggcacccgagagccagatgcccacccttatgtgtcgcaggtatccttgcttgcggatttctgttagggtgttgggggccttcccactttcaacagagctgcctgcaggcattggagccccaagcagttagttcatacctctcaccaggtgcccccctcaagggcagaccccctagcccgggtttccagagacagcgacaacgacagagacgagccgccgggggtatcttgcacctcgagctactggtagcggtgggacccgacgtgtttcaggcacatcaggaggatacagagcgctatgtcctgaccaaccttaatataggcgcagaattgttgcgggacccttccctcggagctcagtttcgggtacatttggtgaagatggtgatcctcactgaaccagagggagcccccaatataaccgcaaacctgacctcttcactgctgagcgtctgcggctggagccagacaatcaatccggaagacgacaccgacccagggcacgccgacctggtgctgtatatcacaagatttgacctcgaacttcccgatggaaacaggcaagtaaggggagtgacgcagctgggcggcgcttgctctcctacctggagttgtctcattactgaggatactgggtttgacctgggcgtcacgattgctcatgagatcggccattcgtttgggctggaacacgatggtgcccctggaagcggatgtgggccaagcggccacgttatggcatctgatggcgctgcccctagggctggcctggcatggtccccctgttctcggcggcagctgctctctttgctaagacccgtaccaccatcccctttacccctactcgctacccacctctgtgcgggccgcagcctttcgctgggcccaagccaggaacccgcacctggcggcgggaggggtccccgaacccccgttcctacgcacaaaaggccaagattccagaccctgccttcgagctgccccctgctccggccagcaagctcccggtgcactccccgagattag

SEQ ID NO: 2308 - DNA, 831 bp, synthetic construct
  misc_feature 1..831: note = source = /note="Description of Artificial Sequence: Synthetic coding sequence"
  source 1..831: mol_type = other DNA
atgcaccagaggcacccacgcgcccgatgtccgccactgtgcgttgcaggaatcttagcctgcggattcctactaggttgttgggggccttctcattttcaacagtcctgcctgcaggccttggaaccgcaggctgttagctcctatctttcaccaggagctcctctcaaaggtcggccccctagccccgggtttcagagacagcgccagcgccagcggagagccgccggcggaatcttgcatctggagcttctcgtcgctgtagggcccgatgtgtttcaggcgcatcaggaggacacagaacgctatgtgctgacaaatttgaacataggcgctgaattgctgcgcgacccttcattgggggcacagttcagggtccatcttgtcaagatggtaatcctgactgaacccgaaggcgcccctaatatcacagcaaatctgactagttctcttctgtctgtatgcgggtggtctcaaacaattaaccccgaagatgacacagacccagggcacgccgaccttgtactatacatcacccggtttgacctggagctgccggacgggaatcgccaggttaggggcgtaacacaactcggcggagcctgctcccccacctggtcctgcctgattactgaggacacaggctttgacttaggtgttaccattgcacatgagatcgggcatcggatttgtgccaggccatctcctgccacgcagactcgctggactaaggcagctgccgctgcgtcatcttttctgtcatggatgggacagaacgtcgcttggcggtctggagctccaagagtcgccgcagccccgtggtggtcttag

SEQ ID NO: 2309 - DNA, 4284 bp, synthetic construct
  misc_feature 1..4284: note = source = /note="Description of Artificial Sequence: Synthetic coding sequence"
  source 1..4284: mol_type = other DNA
atgcatcagcggcaccctcgggctaggtgccctccattatgtgtcgctgggatattggcttgcggcttcctgctcggctgctggggccctagccattttcagcagtcctgcctccaggccctggaaccccaggctgttagctcatatttatcccctggcgcccccttgaagggacggccgccgagccctggtttccagcgtcaacgccagcggcagcggcgggccgcgggcggaattctacacctggagctgctagttgcagtgggccccgacgtgtttcaggcccaccaggaagataccgagcggtacgtcctcacaaatctcaacattggcgcagagctgctgcgagacccttcccttggagctcagttccgcgtgcacttggtgaaaatggtgattctaaccgagcccgaaggtgcaccaaacatcacagccaacctgacttcttcactgctgagtgtgtgtggttggtcccagactataaaccctgaagatgacacggatcccggtcatgccgacctcgttttgtacataacgagatttgacctcgagctcccagatggcaacagacaggtgcgcggtgttactcagctggggggggcctgcagccctacatggtcatgtctgatcaccgaggacacaggtttcgaccttggcgtgaccatagcacacgagataggacattctttcgggcttgagcacgatggcgccccaggatctggttgcggcccttctgggcacgttatggcatccgacggcgcggccccgcgtgctggattggcctggtccccttgcagcagacgccagttgctaagtcttctgtctgccggacgggctcggtgcgtgtgggacccccccaggcctcagccagggtctgctggccatcctcccgacgctcaacctgggctgtattactcggcaaacgagcagtgtagagtcgcattcgggcctaaagctgtcgcttgcacattcgcaagagagcacctggacatgtgtcaggcccttagctgtcatacagaccctctcgatcagtcgtcgtgttcaaggttgctcgtgccgctactggacggtacagagtgtggcgtggagaaatggtgctccaaagggcgttgccgctcactggtggaattgactccgatcgctgctgtgcatgggaggtggtcctcttggggacctcgctctccctgttccagaagctgcggcggaggggtagtcaccagacggcgtcagtgtaataacccccgcccggctttcgggggcagagcttgtgttggcgcagatttgcaggcggagatgtgcaatacccaggcgtgtgaaaaaactcaactcgagttcatgtcccagcagtgcgcaaggaccgatggacagccactgcgctcttccccgggcggagccagtttctaccattggggagcagccgtaccccactcccagggagatgcactgtgccgccacatgtgccgggcaatcggagaaagtttcattatgaagcggggagattcattcctcgatgggacccgctgtatgccaagtggaccccgtgaagacggcactctgtcactttgcgtctccggcagctgtcgcacttttgggtgtgacgggcggatggacagtcagcaagtctgggaccggtgccaggtgtgtggaggtgataactctacttgctccccacgaaagggatcgtttactgccggtcgtgccagggagtacgttaccttcttgaccgtgacaccaaatttgacttccgtctatatcgcaaatcacaggccactgttcacacacctggctgtcaggatagggggcaggtacgtcgtcgcgggcaagatgtccatttctccaaacacaacttatccatcccttctcgaagatggcagagtagagtacagggttgccctcactgaagaccggcttccacggctcgaagagattcgcatatgggggcctctgcaggaagacgccgacattcaggtctacagacgctacggcgaagagtacggaaaccttacgcgccccgacatcacatttacctatttccagcccaaaccaaggcaggcatgggtttgggccgccgtaaggggaccatgttccgtgagttgcggggccggtctacgctgggtgaactactcttgcctggatcaggctcgtaaggaattggttgagacggtgcagtgccaagggtcgcagcagcctccagcttggcccgaggcctgcgtactcgaaccctgtcctccctactgggccgttggtgactttggaccctgctcggccagctgtggcggcggccttcgtgagaggccagtgaggtgtgtggaggcccagggtagcctgcttaaaaccctgccccctgccaggtgcagagcaggggcgcagcaaccagcagtcgcattagagacctgcaacccacagccttgccctgccagatgggaggtgagtgagccttctagttgcacgtccgcaggaggcgccggattggcactggagaacgagacttgtgtcccgggggccgacggcttggaggcgcccgtgactgaaggacctgggagtgtggacgaaaagctgcccgctcctgagccctgcgtcgggatgtcctgtccgcccggctggggccatttggacgccacctcggctggggaaaaagcgccatctccctgggggtctatacgcaccggggctcaagctgcccatgtttggacaccagcagccggctcatgctctgtgtcctgtggaagaggcttgatggagctccgattcctgtgcatggactccgctctccgggtgccagtgcaggaagaactgtgtggcctcgcctccaaacccggctccaggcgggaggtgtgccaggcagttccgtgtcccgccaggtggcagtacaaacttgccgcatgtagcgtgagctgcggcaggggtgtggtgcggcgcatcctgtattgtgctagggcccatggtgaggatgacggcgaggagattctacttgatactcagtgccaggggcttccccggccagaaccacaggaagcatgctccctggaaccttgcccgccaaggtggaaagtcatgtcactgggcccttgctccgctagttgtggcctgggaaccgctaggagaagtgtggcttgtgtgcagctggatcaaggtcaggacgtggaagtggacgaggccgcctgtgctgctctggtgcgacccgaggccagcgttccctgcctgatagcagactgcacgtatcgatggcacgtagggacatggatggaatgcagcgtttcttgcggcgatgggatccaaaggcgccgcgatacttgtcttggtccccaagcgcaagctccagtgcccgccgatttttgccaacacttgccgaaacccgtcactgtgagagggtgctgggcgggcccatgcgtgggccagggaacaccttctctggtgccacatgaagaagccgccgcccctggccgtaccacagctacccccgcgggggcaagtctggaatggtctcaggccagaggcctcttattcagcccagccccgcagccacgcagacttctgccgggtcctcaagagaactcagtgcagagcagcgcttgtggccgtcaacatctagagccaaccgggaccatagatatgaggggaccaggtcaggcagattgtgcagtcgctatcgggcggcccctgggcgaagtggtgactcttcgggtactggagtcttccttgaactgttccgcaggcgacatgcttctactgtggggaaggctcacatggcgaaaaatgtgtcggaaactgctggacatgacctttagctctaaaaccaacacccttgtcgttaggcaacgttgtggacggcccggaggaggtgttctcctgagatacggcagtcaactcgctcccgagactttttacagagagtgcgacatgcagttattcggaccatggggtgaaatcgtctctccttcactgagtcccgcaaccagcaatgcgggcgggtgtcggctgttcatcaacgtggctcctcacgctagaatcgcgatacatgcactggcaaccaatatgggagctggcaccgaaggcgcgaacgcctcatatattctcatacgcgatactcacagcctccgcacaacagcctttcatggtcagcaagtcctctactgggagagtgagtcttcccaggccgagatggagttctccgagggatttcttaaggcacaggcctccttaagaggccaatattggaccctgcagagttgggtgcccgagatgcaggatccccagagttggaaggggaaggaagggacctag

SEQ ID NO: 2310 - DNA, 1095 bp, synthetic construct
  misc_feature 1..1095: note = source = /note="Description of Artificial Sequence: Synthetic coding sequence"
  source 1..1095: mol_type = other DNA
atggacatgtgtcaggctctgagctgccacaccgatccactggaccagtcatcatgctcccgtctcctggtgccactactggacggcaccgagtgcggtgttgaaaagtggtgctccaaaggtagatgcagaagtttggtggagctgactccaatagctgccgttcacggacgctggtcgagttgggggccacgttctccttgttccaggtcgtgcggagggggagttgtcacaagaagacgccagtgtaataacccgaggcctgcgttcggagggcgggcctgtgtgggagctgacctccaggccgaaatgtgtaatacccaggcctgcgagaagactcaactagaatttatgtcccaacagtgtgcccggaccgatggccagccacttcgcagctccccgggaggagcgtcattttaccactggggggccgctgtcccacattcacagggagacgccctctgtcgtcacatgtgcagggccattggggagtccttcattatgaaacgtggagacagcttcctagacggcactaggtgcatgccatctggccctcgagaggacggcaccctttccctctgtgtgagtggctcctgtaggacattcggatgtgacggccggatggattcacagcaggtgtgggataggtgccaggtgtgcggcggcgataattccacgtgctcacctcgaaagggtagtttcaccgccggtagagcgagggaatacgtaacttttttgaccgtgacccccaatctcacttctgtgtacattgctaaccatagaccactgttcacccaccttgccgtaagaattggtggcaggtacgtggttgcgggcaagatgagcatttctcctaataccacttacccctctctactggaagatggccgggtggagtatcgagttgcactcacagaggataggctgcctcgcttagaagaaatacgcatatggggtcccctgcaggaggacgcagatattcaggtaggaggggtgcgcgctcagcttatgcatatttcatggtggtcccgacccggactgggtgagcgggatctctgtgcccgtgggcggtggccaggtgggtcatctgactag

SEQ ID NO: 2311 - DNA, 1095 bp, synthetic construct
  misc_feature 1..1095: note = source = /note="Description of Artificial Sequence: Synthetic coding sequence"
  source 1..1095: mol_type = other DNA
atgccatatcagtatcccgccctgacacccgaacagaagaaagagctttctgatattgcccatagaatcgtggcaccaggcaagggtattcttgccgccgatgagagtaccggaagcatcgccaagaggctacagtccattggcaccgagaataccgaagaaaataggcgtttttatcggcaattgttgctcacagccgacgatagggtaaacccatgtatcggaggggtgatattgtttcatgagaccttgtatcagaaagccgatgatggaaggccctttcctcaggtgatcaagagcaagggcggcgtggtcggcataaaggtggataagggggtcgttcccttggcagggacaaatggtgagacaaccacgcaagggctggacggcctgtcagaacgctgtgctcagtacaaaaaagatggggcagattttgctaagtggaggtgcgtgttaaagattggtgagcacactccctcggcacttgctattatggagaacgccaacgtcctcgcccgctacgcatcgatctgtcagcagaacggaatcgtaccgattgtcgaaccagagatcctgcctgacggtgaccacgacttgaagagatgtcagtatgtgacggagaaggtgctggcggctgtatataaagcgctcagtgaccaccatatatacctggaggggaccttgttaaaaccaaacatggttactccagggcatgcctgcacgcagaaattctcgcacgaagaaatcgcaatggctacagtaactgccttaagaagaactgtgccacccgccgtgactggtatcactttcctgagcggaggacagtccgaggaagaggcctccatcaacctgaacgctataaacaagtgccccctgttgaaaccttgggctctgaccttttcctatgggagggctctgcaagcttcggcgctcaaagcttggggtgggaaaaaagaaaatcttaaggcagctcaggaagaatatgttaaacgggcccttgctaacagccttgcctgtcagggtaagtacactccatcggggcaggccggcgctgccgcatcagaatcgctgtttgtctctaatcacgcatactag

SEQ ID NO: 2312 - DNA, 1095 bp, synthetic construct
  misc_feature 1..1095: note = source = /note="Description of Artificial Sequence: Synthetic coding sequence"
  source 1..1095: mol_type = other DNA
atgccataccagtacccagctctcacccccgagcaaaagaaagaactgagcgacatcgcacacaggattgttgcccccggcaagggcattctcgccgccgatgaatctaccggctctattgcgaagcgcctccagtcgatcggaactgagaacacagaggagaaccgcaggttctacaggcagctcttgctgaccgcagacgatcgtgtgaatccttgtattgggggagtgatcctgttccacgagacactttaccaaaaggcggatgatgggaggccattcccgcaggttattaagtcgaagggcggagtggtgggaatcaaagtggacaaaggagttgtgccactggcggggactaatggggagacgacaacccagggcctggatggcctgtcggagcgctgtgcacagtacaaaaaagatggcgctgacttcgctaagtggagatgcgtgctcaagatcggggagcacacaccaagcgccctcgccatcatggagaacgcgaacgttctcgctagatacgcctcaatctgccagcagaacggaattgttccaattgttgagcctgagattctgcccgatggagatcatgacctgaagcggtgccagtacgtgacagaaaaagtgctcgccgctgtgtataaagccctgtctgaccatcatatctacctggagggaactctcctaaagcccaacatggttacacctgggcatgcgtgcacacagaaattctctcacgaagagattgccatggcgacagtgacggcgcttcgcaggacagtgccgccagcggtcacgggaatcaccttcctgagcgggggacagagtgaagaggaggcctctataaatctgaacgccattaataagtgtcctcttttaaaaccctgggcactaacattctcctatgggcgcgctttgcaggcaagtgccctgaaggcctggggagggaagaaggaaaacctaaaggccgcgcaggaggagtatgtgaaacgggcgttggcaaatagcctggcctgccaaggcaagtacacccccagcggccaggccggtgctgcagcatcggagtcattgtttgtgtccaatcacgcctactag

SEQ ID NO: 2313 - DNA, 1257 bp, synthetic construct
  misc_feature 1..1257: note = source = /note="Description of Artificial Sequence: Synthetic coding sequence"
  source 1..1257: mol_type = other DNA
atggcccggagaaaacccgaaggctctagttttaacatgacacacctttctatggctatggcgttttccttcccccctgtggcaagcggacagcttcaccctcagttggggaacacccagcaccagactgagctgggcaaggagctcgccacgaccagcacaatgccataccagtacccagctctgactcccgagcagaagaaggagctgagtgacattgcccaccgtatcgtggctccaggcaaaggcatactcgccgccgacgagagtaccgggtctattgccaaaagactccagagcatcggcaccgaaaacacagaagaaaaccgccgattttatcggcagcttctccttactgccgacgaccgcgtgaacccttgtatagggggggtgatcctattccacgagactttatatcagaaagctgatgacggcagaccattcccccaggtcatcaagtccaagggaggcgtggtggggattaaggtcgataagggcgttgtccccctcgcaggcactaatggagaaacgacgacacagggcctcgacggcctctccgagcggtgtgcgcagtacaagaaagacggtgccgacttcgctaaatggcggtgcgtactcaaaattggcgagcatacaccatccgctcttgcgattatggagaacgcaaacgtcctcgcgaggtacgcctccatttgtcagcagaacggaatcgtgcctatcgtggaacccgaaattttaccagatggggaccacgacctgaagcggtgtcaatatgttacagagaaggttctggccgccgtgtataaggcactgtcagaccaccacatatacctggagggaaccctgttgaagccaaacatggtgaccccgggccacgcttgcacacagaaattcagccatgaagagatcgccatggccaccgtgaccgctctcagacggaccgtacctccagctgtcaccgggattacattcctgagcgggggccagtccgaagaagaggctagtataaatttgaacgcaattaacaaatgcccccttctcaaaccatgggcgctcacatttagctacggacgagccctgcaggcttctgcacttaaagcctgggggggcaaaaaagagaacctcaaagcagcccaggaggagtacgtgaagagggccctcgctaactctctcgcatgccagggcaaatacacccccagcgggcaggcaggagcagccgcttcagaaagtctctttgtgtccaatcacgcatactag

SEQ ID NO: 2314 - DNA, 1095 bp, synthetic construct
  misc_feature 1..1095: note = source = /note="Description of Artificial Sequence: Synthetic coding sequence"
  source 1..1095: mol_type = other DNA
atgccctatcaatatccagccctgactccagaacagaagaaggaactatccgacattgcccatcgtatcgtcgccccaggaaagggcattctggctgccgatgaaagtaccggcagtatagccaaacgactgcaatccatcggtaccgaaaacaccgaggagaaccgccgattttatcggcagctcctgctcaccgctgacgaccgagtgaacccttgcattgggggggttattctgtttcacgagacactgtaccagaaagcagatgacggtcggccgttcccccaagtgatcaagtcgaaggggggagtcgtgggcattaaggtcgacaaaggggtggtgccactcgcaggcacaaacggtgagacaaccacacaaggcctcgatggtttatcagagagatgtgcacagtataagaaagatggggcggacttcgccaagtggcgttgtgtgctgaaaataggtgaacatacaccctccgccttggccatcatggagaatgccaatgtgttagcaagatatgcctcaatctgccagcagaatggaatcgtgcctatcgttgagcctgagattttgcccgacggagatcacgacctcaagagatgccagtatgttaccgagaaggtcctggccgctgtatataaggccctttccgatcatcacatctatcttgaaggtacacttctcaaacccaacatggtgacacctgggcacgcgtgcacacagaagttctctcatgaggagatcgcaatggcaacggtgaccgccttaagacggacagttccccctgctgtcacaggcatcacgtttctgagtggagggcagagtgaagaagaagccagcattaatttgaacgcaatcaataagtgtcccttgttaaagccgtgggcactgaccttcagctatggccgggccctccaggcaagcgcactaaaagcttgggggggcaaaaaggaaaatctgaaagctgcccaggaagaatacgtaaagcgggccctcgccaatagtctggcttgtcagggaaaatacactccttctggtcaggcgggagctgctgcgtcggaaagccttttcgtgtccaatcatgcttactag

SEQ ID NO: 2315 - DNA, 1095 bp, synthetic construct
  misc_feature 1..1095: note = source = /note="Description of Artificial Sequence: Synthetic coding sequence"
  source 1..1095: mol_type = other DNA
atgccatatcagtaccctgctcttacccccgagcagaaaaaagagctaagcgacattgcgcatcggatcgttgctcccggaaaaggaatcctggccgcagatgagagtacgggttccatcgccaaaagattgcagagtataggaaccgagaacaccgaagagaatcgtcggttttatcgacagctgttattaaccgccgacgacagggtgaatccctgtatcggaggagtgattctgtttcatgagacgttatatcagaaggcagatgacggaaggccattcccgcaggtcataaaaagcaaaggcggtgtggtggggattaaagtggacaagggcgtagttccactggcgggaacaaacggagaaaccactacccagggtttggatggcctttcagaaagatgtgctcaatataagaaggacggagccgattttgccaagtggagatgcgtgctaaaaattggcgaacacacaccaagcgcactggctataatggaaaacgccaacgtgctagctcgttacgcttccatctgccaacagaacggaattgtgccgatcgtggagccagaaatcttacccgatggggaccatgatctaaaacggtgccaatatgtgaccgagaaggtgcttgccgcggtgtataaagccctgtctgaccaccatatctacctcgagggtacactgctgaagcccaatatggttactcccggtcacgcatgcacccagaagttttcacacgaggagattgcaatggcgaccgtgaccgctctgcggcgcaccgtccctccagccgtgacaggtattaccttcctttctggaggacagagtgaggaagaggctagtattaaccttaacgccattaataagtgccccttgctaaagccgtgggctctcaccttctcatatgggagagccctccaagctagtgcactgaaagcttggggcgggaagaaagaaaatctgaaggctgcccaggaagaatatgtcaagcgcgccctggccaactcactggcttgccagggcaaatatacacctagcggccaagcaggcgctgcggcaagtgaaagtctctttgtttctaaccacgcctactag

SEQ ID NO: 2316 - DNA, 1257 bp, synthetic construct
  misc_feature 1..1257: note = source = /note="Description of Artificial Sequence: Synthetic coding sequence"
  source 1..1257: mol_type = other DNA
atggcaagacgcaagccagagggcagcagcttcaatatgacacacttatccatggctatggccttttcatttccacctgtggcctcagggcagctgcacccccagttgggcaacacccagcaccagaccgaactcggcaaggagcttgctaccactagcaccatgccatatcagtatcctgcgctcacgccagagcagaagaaagaactttctgacatcgcccaccggatcgtggcccctgggaagggtattcttgcagctgacgaaagcaccggctcaattgccaaacgcctccagtctattgggacggaaaatacagaggagaatcgacgcttttatcggcaactcctgctgacagctgatgaccgggtgaacccatgtatcggcggtgttattctgttccatgagactctttatcagaaggcagatgacggccggccgtttcctcaggtgatcaagtctaaaggcggcgtggtcggcatcaaagtagacaaaggggtggtacccctcgctgggaccaacggtgaaacaaccacccagggactcgacggcctaagtgaacggtgcgcccagtataagaaggacggagccgattttgcaaagtggagatgcgttttgaagatcggggagcacactcccagcgctctcgccattatggagaatgccaatgtgctggcacgttacgcctcgatttgccaacagaacggcattgttccgatcgtggagcccgagatcctgccagacggggaccacgatctgaaacgctgccagtatgtgacagagaaagtactggcagccgtgtacaaagcccttagtgaccaccacatctacctggagggtaccctcctgaagcccaacatggtcacacccggtcatgcatgtacacaaaagttcagccacgaagagatcgcgatggctacagtgactgcactccgccgaactgtgccacccgccgtaactggcatcacatttcttagtggagggcagagtgaggaggaagcatcgatcaatcttaatgctattaataagtgcccgcttctgaagccatgggcccttacgttttcctacgggcgcgccctacaggcgagcgccctgaaagcctgggggggcaaaaaggaaaaccttaaggcagcacaggaggaatacgtgaaacgggccttagcaaattccctagcctgtcagggcaagtatacacctagtgggcaggcgggcgccgctgcgtccgagtcgctgtttgtgagcaaccatgcctactag

SEQ ID NO: 2317 - DNA, 1095 bp, synthetic construct
  misc_feature 1..1095: note = source = /note="Description of Artificial Sequence: Synthetic coding sequence"
  source 1..1095: mol_type = other DNA
atgccctatcagtacccggcactcacccctgaacagaagaaggaattgtctgatatagcccaccggattgtggctccaggtaagggcattctggcagctgatgagtcaaccggatctatcgccaagaggctacagtcaatcgggacagagaacactgaagaaaataggagattctatcggcagttgcttctcaccgctgacgatcgggtcaacccgtgcattgggggagtcattttattccacgagactttataccagaaggctgatgatgggagacctttccctcaggtcattaagagcaaagggggagtcgttggcattaaggttgacaagggtgtggtgcccttagcaggtaccaatggggaaaccaccacccagggcctggacggccttagtgagagatgcgcccaatacaaaaaggatggagccgacttcgccaagtggagatgcgtcctgaagatcggcgagcacacaccctccgcgctcgcgattatggagaatgccaacgtgctggctcgctacgctagtatttgtcagcaaaacggtattgtcccgattgtggaacccgagattctccccgatggagaccatgatctgaaaagatgccagtacgtcacagagaaggtattagccgcggtgtataaggccctgtcagaccaccatatctatctagagggtaccctgcttaagccaaacatggtgaccccaggtcatgcctgtacccaaaaattctcacacgaggagatcgcgatggccacagtcaccgccttgcgtcgcactgttcctcctgccgtgacagggattacttttctctccggcgggcagtctgaagaggaagcatccattaatcttaacgccattaacaaatgtcccctccttaagccatgggccctaactttctcctatggcagggctctgcaggcttccgctctcaaagcctggggcggaaagaaagagaacttgaaagctgctcaagaggagtacgtgaaacgggcactcgcgaatagtctggcatgccaaggcaaatataccccttctggtcaagccggagcagccgccagcgagagtttattcgtgagcaaccacgcctactag

SEQ ID NO: 2318 - DNA, 1344 bp, synthetic construct
  misc_feature 1..1344: note = source = /note="Description of Artificial Sequence: Synthetic coding sequence"
  source 1..1344: mol_type = other DNA
atgtcggcctccaaaattccgctctttaagatgaaggacctgattcttattttatgtctgctggagatgtcattcgccgtaccattttttccccagcaaagcggtacacctggcatggccagtttatctctagagacgatgaggcagcttggctcactacagagactgaataccttgtctcagtactctcgctacggatttgggaagtcttttaactccctgtggatgcacggcctgctgcctccgcactcttcactgccctggatgagacctcgggagcatgaaacacaacagtatgaatattctctgcccgtacacccaccaccacttccatcacagcccagcctgaagccacaacagcctggactgaaacctttcctccaatccgccgcggctaccaccaaccaggccaccgcgctaaaggaggctttgcagccacctattcacctcggacatttgcccctgcaagaaggtgagcttccccttgtacaacagcaagtggcgccatctgacaagcctccaaaacccgaactccccggcgttgacttcgccgacccccagggcccttcgcttcctggcatggatttccctgatccacagggtcccagcctgccaggtctcgattttgccgatccacagggcagcaccatttttcagatagcgcgtctgatctctcacgggccgatgccgcagaacaaacagtcaccgctgtacccaggcatgctttacgtaccgtttggggccaaccagctcaacgcacccgcacggttgggtattatgagctctgaagaggtcgccggcggtcgcgaggatccaatggcttatggtgccatgttccccggattcggcggaatgcggcccggtttcgaaggcatgccacataatcccgcaatgggcggggacttcacactggaattcgatagcccagtcgctgctactaagggccctgagaatgaggaaggcggtgcgcagggttccccaatgcccgaggcaaatccagacaacctggagaacccagcattcctcaccgaactcgagcccgctcctcatgcaggcttgttagctctcccgaaagatgatattccagggctgccgcgatcaccctctggaaaaatgaaaggactgcccagcgtcacacctgccgcggcggatccccttatgaccccagagctggccgatgtctataggacctacgatgcggatatgactacctccgttgacttccaagaggaggccacaatggataccacgatggccccaaactcattacaaaccagcatgccaggcaataaagctcaggagcctgagatgatgcacgacgcctggcacttccaggaaccttag

SEQ ID NO: 2319 - DNA, 1299 bp, synthetic construct
  misc_feature 1..1299: note = source = /note="Description of Artificial Sequence: Synthetic coding sequence"
  source 1..1299: mol_type = other DNA
atgagtgcttctaaaataccattatttaagatgaaagatctcatcctgattctttgtctcctggagatgtcatttgccgtcccctttttcccgcagcagtcgggaacccctggaatggcaagcctgagtctcgaaaccatgcgtcagctgggctctctccagaggcttaataccttgagtcagtattcacgatatggatttggaaagtcttttaatagcctctggatgcatggactgcttccaccacatagtagtttgccatggatgaggccacgggagcacgagacgcaacagcccagccttaaacctcagcaaccggggcttaaacccttcttacagtcggccgccgccactacaaaccaggccactgctctcaaggaggctctgcagcctccaatacatctgggacacctgccactccaggagggagaactgccgctcgttcagcaacaggtagcaccaagcgacaagccccccaagcctgagctgccaggagtcgattttgctgacccccagggcccatctctgccgggcatggactttccagatcctcaaggcccatccctgccaggcttagacttcgcagacccccagggaagtaccattttccagatcgcccgccttatctcgcacggcccaatgcctcagaacaaacaaagcccactgtatcccggtatgctttacgtgccgttcggtgccaaccagctgaatgcccctgccagactgggcattatgagcagtgaagaagttgccggagggagagaggaccccatggcttatggtgccatgttcccaggtttcggaggaatgcggcctggttttgagggaatgccacacaaccccgctatgggcggcgatttcacactagagttcgacagccccgttgccgccacaaaaggcccggagaacgaggaaggcggggcacaggggagcccaatgcccgaggccaacccagataatctggagaaccctgcctttctgacagaactggagcccgctcctcacgccggtctgctagcgttgcctaaggatgatattccaggcctgcccaggagtcctagcggaaagatgaaagggcttcctagtgtcacccctgcggctgccgatcccctcatgacaccggagctcgccgacgtctatagaacctatgacgcggatatgacaacatctgtggacttccaggaagaagctaccatggataccacaatggcaccaaacagcttgcaaactagcatgcccggtaataaggcccaggagcctgaaatgatgcacgatgcctggcatttccaggaaccatag

SEQ ID NO: 2320 - DNA, 1341 bp, synthetic construct
  misc_feature 1..1341: note = source = /note="Description of Artificial Sequence: Synthetic coding sequence"
  source 1..1341: mol_type = other DNA
atgagcgctagcaagatccctctctttaaaatgaaagatctgatcctgattctttgtttactggagatgtcttttgctgttccattcttcccacagcagtcgggtacaccaggcatggcctcgctttccttagaaacgatgcggcagttggggagcctgcaaagattaaataccctgagtcagtacagcagatacggtttcggtaagtcattcaattccctgtggatgcatggcttgctaccaccccactcatctctcccttggatgcgtcctcgagagcacgaaacacagcagtatgaatactcgctacctgttcacccgccgccattacctagccagccatccctgaagcctcagcagcccggattgaagccatttcttcagtccgcagcagccacaactaatcaagccacagcactgaaagaggccctacaaccgccaatccatttagggcatctgccactccaggagggagaattacccctcgtccagcagcaggttgctcccagcgacaagcctccgaaacctgaactgcgcgtggactttgcggaccctcagggcccgagtctgcctggtatggacttccctgatccccaggggccctctttaccagggctcgacttcgccgatccgcagggatccactatcttccaaatcgcccggcttatctctcacggacctatgccccagaataagcagagcccactttatcctggcatgctgtacgtgcctttcggcgcgaatcagctaaacgcaccggcacggctcgggatcatgtcttcagaggaggtggctggagggcgagaagatccgatggcgtatggagctatgttccccgggttcggtggaatgaggccaggatttgaggggatgcctcataatcctgccatgggcggcgacttcacactggaatttgattcacccgttgccgcaacaaaaggtcctgagaacgaagaagggggggcgcagggttctcccatgccggaagccaaccccgacaacctggaaaacccagctttccttacagagctagagcccgctccccacgctgggctgctggccctgccaaaagatgatattcccggcctcccacgatcgccatccggaaagatgaaagggctgccatccgttactccggcagcagccgatcccctgatgacccctgaactagctgacgtgtacaggacttacgatgccgacatgacgacgtccgtggatttccaggaagaggcgactatggatacaacaatggcaccaaattctttgcagacctccatgccaggcaataaggcgcaggagcccgagatgatgcacgacgcctggcatttccaagaaccctag

SEQ ID NO: 2321 - DNA, 528 bp, synthetic construct
  misc_feature 1..528: note = source = /note="Description of Artificial Sequence: Synthetic coding sequence"
  source 1..528: mol_type = other DNA
atgggaacctggatcctatttgcctgccttttgggggccgccttcgctatgcccgtgcttacgcccctgaaatggtaccagagcatacgacccccctacccatcttatggctatgagccaatgggaggttggcttcaccaccagatcattccagtcttgtctcagcagcacccgccaacacacactcttcagccccatcaccacatacccgtggtccctgcccagcagccagtcataccacaacagcccatgatgcctgtgcccggccagcacagcatgacacccattcagcatcaccaacccaacctgccacctccagcacagcagccataccaacctcagcctgtacagccccaaccccatcaaccaatgcagccacagcccccagtacatcctatgcagccactcccaccacagccacctttaccgccaatgtttcccatgcagccactgccccctatgttgcccgatctcaccttggaagcatggccgtcaaccgacaaaactaaaagagaggaggttgactag

SEQ ID NO: 2322 - DNA, 618 bp, synthetic construct
  misc_feature 1..618: note = source = /note="Description of Artificial Sequence: Synthetic coding sequence"
  source 1..618: mol_type = other DNA
atggggacttggattctattcgcctgtctgcttggagctgcttttgccatgcccctgcccccgcaccctggacacccagggtacattaacttttcctacgaaaattctcatagccaggccatcaacgtcgacaggactgcacttgtactgacgcccctgaaatggtaccagtctatccgcccaccgtatccttcatacgggtacgagcctatgggaggctggctgcatcatcaaatcatccccgtattgtcccagcaacatcccccaactcacacacttcagcctcatcaccacattcccgtggtgccagctcagcaaccagtgatcccacagcagccaatgatgccagtccccggtcagcactccatgacccccatccagcaccaccaacctaatctaccaccccccgcacaacaaccttatcagccccagcccgtacaaccccagcctcaccagcctatgcagccacagccccccgtgcaccccatgcaacccttaccccctcagccaccactgcctccgatgttccctatgcagcctttacctcctatgcttcctgatctgaccttagaggcctggccaagcaccgacaagaccaagagagaggaagttgactag

SEQ ID NO: 2323 - DNA, 576 bp, synthetic construct
  misc_feature 1..576: note = source = /note="Description of Artificial Sequence: Synthetic coding sequence"
  source 1..576: mol_type = other DNA
atggggacatggattctttttgcctgcctgttgggcgccgcattcgcaatgccactccccccccatcccggccatcccggctacatcaacttttcctatgaggtgttgaccccgctgaaatggtatcagtccattcggccaccatatccgagctatgggtacgaacctatgggcggctggcttcaccaccagatcatcccggtcctgtcgcaacagcacccccctactcacacccttcagccacaccatcatattcctgtggtgccagcccaacagcctgttatcccacagcagcccatgatgcctgtccctggacaacactccatgacccccattcagcaccaccagccaaacctcccaccgcccgcccagcagccatatcagcctcagcctgtgcagccgcagccgcatcaacccatgcagccacagcctcccgtgcatcccatgcagcccttgccgccccaaccgccgttgccacccatgttccctatgcagcctttaccccccatgttgcctgatctgacactggaagcctggcccagtaccgataaaaccaagagggaagaggtcgattag

SEQ ID NO: 2324 - DNA, 4023 bp, synthetic construct
  misc_feature 1..4023: note = source = /note="Description of Artificial Sequence: Synthetic coding sequence"
  source 1..4023: mol_type = other DNA
atgtttcgggtcggcttcttgattatcagcagctctagcagtctgtcccctctgctcctcgtttctgtcgtgagagtgaataccacaaactgtcataaatgtctgttatcaggaacatatatttttgctgtccttctggtttgtgtggtcttccacagtggtgcccaggagaagaactacactatcagagaggagatcccggagaatgtgctgatcggtaacctgttaaaagacctgaatcttagcctcataccaaacaaaagtctgactaccaccatgcaatttaagcttgtgtacaagaccggcgatgtgcctctgattagaatcgaggaggataccggcgagatatttacgaccggggctcggatcgatcgcgagaagttgtgcgccgggatcccacgagatgagcactgcttttacgaggtggaagttgccatcctgcctgatgaaatttttcggctggtgaaaattagatttctgatcgaagatatcaatgacaacgctccgctgttccctgccactgtcattaacatctccattccagagaattctgccatcaattctaaatatactctgcccgctgcagtggatcccgacgtggggatcaacggggtgcagaactacgagctcattaaaagccagaacatcttcggcctggatgtgatagaaacacctgagggcgataaaatgcctcaacttatagtacaaaaagagttggaccgagaggagaaagacacatatgttatgaaggtaaaggtggaggatggggggttcccccagcgatcatcaaccgccatcttacaagtgtccgttaccgacacaaatgataatcacccagtgtttaaagaaacagagattgaggtgagtattccagagaacgccccggtcgggactagcgtgacccagctccatgccactgacgccgacattggggagaatgccaaaattcacttttctttctcaaacctagtaagcaatattgcgcgcaggttgttccaccttaatgctaccactggattgatcaccattaaggagccacttgatagggaggagacacctaaccataagctgctggtgctcgcaagcgacggtgggctgatgccagctcgtgcaatggtccttgttaacgtcaccgatgtcaacgataatgttccgtcaattgacattaggtacattgttaaccccgtgaacgatactgttgtgctgtccgaaaatatccctctcaacactaagatcgccctgattactgtcactgataaagacgccgatcacaatggcagggtcacctgttttaccgatcacgagatcccattccgccttagaccagtttttagtaaccaatttcttctggagaatgcggcctatctggactacgagtcaactaaagagtacgctattaaactgctggctgctgatgcaggaaagccgcccctaaaccagtcagctatgctgtttattaaagtcaaggacgaaaacgataacgcacctgtctttactcagtcgttcgtgaccgttagcattcctgagaataacagtcctgggatccagctgatgaaggtgtcggcgacggatgcggatagcggacccaacgccgaaattaattatctgctcgggcctgacgccccacctgagttctctctggaccgacggactgggatgctcaccgttgtaaaaaaactcgacagggagaaagaggataaatacctgttcaccatccttgccaaagacaatggtgtgcctccactgacctcaaacgtaacggtctttgtcagcattattgaccaaaatgacaacagtcctgtgttcactcataacgagtataagttttatgttcctgagaacttgcctcggcacggaaccgtaggcctgatcacagtgaccgaccccgattatggcgacaactcagcagtcactcttagtatactggacgagaacgacgacttcacgatcgacagtcagactggggtgatccggcctaacatttcttttgatcgcgagaaacaggaatcctatacattttatgtaaaagcagaggatggcggtcgggtatctcgtagcagttccgccaaggtgacaatcaatgtcgtggacgtgaacgataataaacccgtgttcatcgtgccgccctataactatagctacgagttagtcctgccatctacaaatcctggcactgtggtgttccaggtgatcgccgtggacaacgatacgggaatgaacgcagaggtgcgttactctatcgtcggcggcaataccagagaccttttcgctatcgatcaggagactggaaatattacactgatggagaagtgtgacgtgaccgatctgggactgcatagagtgctggttaaagcgaatgacctcggccagcctgatagcctttttagcgtggtcattgtcaatctgtttgtgaatgagtcagttactaacgcaacgttaattaacgagttggtgagaaagtctattgaggcccctgtgacacccaataccgagatagcagacgtgtctagtccaacttctgattacgtaaaaatcctcgtcgctgccgtggctgggacgattacagttgtggtggtcattttcattactgccgtcgttcgttgccgccaggcgcctcaccttaaagcagcccagaaaaacatgcaaaatagtgaatgggctacaccaaacccggagaacaggcagatgattatgatgaagaagaaaaagaagaaaaagaaacattctcccaaaaacctgcttctcaacgtcgttaccatcgaagagaccaaggccgatgatgttgattccgatgggaaccgcgtgactctggatctccccatcgatctagaggagcagacaatgggtaaatacaactgggtgactacccccaccacctttaaaccagattcccccgacctggctcgccattacaagtctgcatcgccgcaacccgcctttcagatccaaccagagacacccctgaaccttaaacatcacataatccaagaactcccgctggacaacactttcgtagcctgcgatagcatcagtaattgttcatccagctcctcagatccctactccgtgagcgactgtggctaccctgtgacaaccttcgaagttccagtctccgtgcatacaagaccatcacagaggagagtaaccttccacctgcccgaaggctctcaggagtctagctccgacggcggtctcggggatcatgatgcaggctccctgacgtctacgtcacacggtttgcctctcggataccctcaggaagagtacttcgatcgggccacaccctcaaatcgcaccgagggagatggaaactcggacccggagtcgaactttatcagcggcatgcgcgaaaagattactgtacagcctacggtggaagaggcctccgataactgcacacaggaatgcctgatatatggccactcagacgcttgctggatgccagcatcactcgatcatagcagttccagccaagcgcaagcgagcgccctatgccactcgcctcccctctcacaggcctccactcaacaccattcaccacccgtgacccagaccatagtgctttgccactctccacccgtaacccaaaccatcgccctctgccactcacctcccccaattcaggtatctgcgctccatcactcaccaccgcttgtgcagggtacggctctccaccacagtcccccttccgcgcaagcgtctgctctctgttacagtcccccgctagcccaggctgcggctataagccacagctcaagtctccctcaggtcatagcattgcaccggagccaggctcaatcgagcgtcagcctgcagcaggggtgggtgcaaggggccaatgggctttgttccgtggaccagggtgttcaaggctcagccacttcccaattttatacaatgagcgaaaggctgcacccctccgacgattccataaaggtaatacccctgactaccttcgccccccgccagcaagctcgtccaagccgtggggactcccccattatggagactcaccccttgtag

SEQ ID NO: 2325 - DNA, 621 bp, synthetic construct
  misc_feature 1..621: note = source = /note="Description of Artificial Sequence: Synthetic coding sequence"
  source 1..621: mol_type = other DNA
atgggaacttggatcctttttgcgtgcctcgtcggagcagctttcgcgatgcccttgcccccccacccagggcaccctggttacatcaatttctcctacgagaatagccacagccaggccataaacgtcgatcgcatagccctggtgctaacccctctcaagtggtaccagtccatgattagacctccgtacagttcatacggatacgagccaatgggcgggtggctgcaccaccagattattccagtagtcagtcaacaacacccactcacacatactttgcagagtcaccatcacattcccgtggtcccagcccagcaacccagggtcaggcaacaagccctgatgccagtgcccgggcagcagtcaatgacacccacccagcaccaccaacccaacctgcccctgccagcccagcagcccttccaaccacagcctgtgcaaccccagccccaccagcccatgcagccacagcccccagtacagccaatgcagcctttattgcctcaaccacctttgcccccaatgttcccactgcgccctctcccgccaatcctacctgacttgcatctggaggcctggcctgccaccgataagaccaaacaagaggaggtagattag

SEQ ID NO: 2326 - DNA, 618 bp, synthetic construct
  misc_feature 1..618: note = source = /note="Description of Artificial Sequence: Synthetic coding sequence"
  source 1..618: mol_type = other DNA
atgggaacctggatcctcttcgcttgtctggtgggagccgcttttgctatgcccctgcccccccaccccggtcaccccggttatatcaattttagttacgagaactcccactcacaggctataaacgtggacagaattgctttagtgctgacccctctgaagtggtaccagtccatgattcgaccgccttacagcagctacgggtatgaaccaatgggcggatggctgcatcaccagattatacctgtcgtgtcccagcagcacccactgacgcatacactccagagccatcatcacatacccgtggtccctgcccagcagcctcgcgtcagacagcaagctcttatgccggtaccgggccagcagtccatgacccctacacagcatcatcagcccaacctgccgcttccggctcagcaaccatttcagccacaaccagtacagccccagccccaccagcccatgcagccccagccccctgtgcagcccatgcagcccttgttgccacagcctcctcttcctcccatgttccccttgcggccgttaccccctatactccccgatcttcacctcgaagcgtggccagctaccgacaagacgaaacaggaagaggtgtag

SEQ ID NO: 2327 - DNA, 4599 bp, synthetic construct
  misc_feature 1..4599: note = source = /note="Description of Artificial Sequence: Synthetic coding sequence"
  source 1..4599: mol_type = other DNA
atggggcattcaaaacagattagaatattattactaaatgagatggagaaactggaaaaaactctgttcaggctggagcaggggtacgaactccagttccgtttaggccctactcttcaggggaaagccgtgactgtttacactaattaccctttccctggagagacattcaatagggagaagttcagatctctcgattgggagaaccctacggaaagggaggatgattccgacaagtactgcaagttaaatctgcagcagtctggaagctttcagtattacttcctgcagggcaacgaaaagtccggaggcggctacatcgtagtagatcccattcttcgcgtcggggctgataatcacgtgctcccactcgattgcgtaacgttacaaacctttctcgcaaagtgtcttggccccttcgatgagtgggaaagccgactgagagtggcgaaggagtccggttacaatatgattcatttcacgccgctgcaaacactgggattgtctaggagctgttattctctcgctaatcagctcgaactcaatccagacttcagtcgtcccaaccgaaagtatacttggaatgatgttggccagcttgtggaaaagttgaaaaaggagtggaatgtgatctgtattacagatgtggtgtacaatcacacggcagccaatagtaaatggattcaagaacaccctgagtgcgcttacaacctggtgaattcaccccacctgaagcctgcatgggtgctggatcgggccctttggcgcttctcctgcgatgtagctgagggtaagtacaaggagaaagggattcccgcactaatagaaaacgatcatcatatgaatagtatccgaaagattatatgggaggatatattccctaaactgaaactctgggaattcttccaagtggacgtcaacaaggccgtcgagcagttccggcgattgcttacccaagaaaaccgtcgcgttactaaatccgaccccaaccagcatctcacaataatccaggaccccgagtacagacgcttcggttgtactgtggacatgaacattgcccttaccactttcattccccatgacaaaggtcctgccgccattgaagaatgctgcaactggtttcacaaacggatggaggagctcaattccgagaagcatagactgatcaattatcatcaggaacaggctgtgaattgcttgctgggcaacgtgttttatgaacggctggcggggcacggaccaaaactcggaccagtgacaaggaagcaccctctggtcactaggtactttactttcccttttgaagagattgacttcagtatggaagaatcaatgatccacctgccaaacaaagcttgctttctgatggcacacaatgggtgggtcatgggcgatgaccctctgagaaacttcgccgagcccggaagtgaggtctacctcaggagagagcttatttgttggggcgactctgtcaagctgcggtatggcaacaaaccagaggattgcccttacttgtgggctcatatgaaaaagtatacagaaataacagccacttatttccagggcgtcaggctcgataattgtcacagcacccccctgcacgtcgccgagtacatgctggacgccgccaggaatttgcagccaaacctatacgtcgttgccgagctgtttacagggtcggaggacctcgataatgtgttcgttactcgcctggggatctccagcctgatccgagaggccatgagcgcttataattcccatgaagaggggcggctcgtttaccggtatgggggggaacccgtggggtcatttgttcagccctgtttgcgacccttaatgcctgcgatcgcacatgcactgttcatggatatcacgcacgacaatgaatgccccattgtgcacagaagcgcatacgatgccctgccaagcaccacaatcgtctcaatggcctgctgtgctagcggcagcaccaggggctatgacgaactggtgccccaccagatctcagttgtgagcgaggaacgattctacaccaaatggaatcctgaggcactacctagcaacacaggggaggtgaacttccagtccggtataatcgccgcaaggtgcgctatctcaaagctgcatcaggagctcggtgctaagggttttatccaggtctatgtagatcaagtagacgaagatattgtcgccgtgacaaggcactccccctccattcaccagtctgtcgtcgccgtcagccggactgctttccgcaatcctaaaacctccttttacagcaaagaggtgccgcaaatgtgcatccctgggaaaatcgaagaagtcgtcctcgaggctaggaccattgaacgcaacactaagccttacaggaaagatgaaaatagtattaacggcacaccagacataactgtggaaattcgcgagcacattcaactcaacgaatcaaaaattgtcaaacaggctggtgtcgcaactaagggccccaacgagtacatacaggaaatcgagttcgagaatctgagtccaggcagcgtcatcatctttcgtgtgtccttggatccccatgcacaagtggcagtgggcatactgaggaatcacctaacccagttctcacctcattttaaaagtgggagtctggccgtggacaacgctgacccaatcttgaagatacccttcgcatccctggcctctcgattaacactagcagagttgaaccagattttgtaccgctgcgagagtgaggagaaggaggacggaggtggctgctatgacattcccaattggagcgcacttaagtatgcgggtctgcagggactgatgagcgtgctagcggagatccgcccaaaaaatgacctcggccatccgttctgtaacaacttgcggtctggcgactggatgattgactatgtgtctaaccgcctcatctcgcggagcggaaccatcgcagaggtgggtaagtggcttcaagctatgttcttctatctgaaacagatcccacgttacctgattccttgttatttcgacgccatactgataggcgcttacaccacgcttctcgatacagcctggaagcagatgtcttcattcgtgcaaaacggctcgacttttgtcaagcatctgtcattgggtagtgtccaactgtgtggcgtcgggaagtttcccagcttgcctattctctcacctgctctgatggacgtcccttatcggctcaatgagatcacaaaggagaaggaacaatgctgcgtcagtttggccgccggcctcccccacttcagcagtggtatcttccgatgttggggccgcgacacattcattgctctgaggggtatactactgatcaccggacggtatgttgaggcccggaatatcatactggccttcgctggaacactgcggcacggattgatacctaaccttctgggagaaggtatctacgccaggtacaattgccgcgacgccgtttggtggtggcttcagtgtattcaggattattgcaaaatggtgcccaatggcttggatattctcaagtgcccggtgtcccgcatgtacccaaccgatgattccgctcctctgcccgccggtacactcgaccagccactgtttgaggtcatccaggaggccatgcaaaagcacatgcagggcatccagttccgggaacggaatgcaggcccccagatcgataggaatatgaaagatgaaggcttcaacattacggcgggcgtggacgaggagacggggttcgtgtacggcggaaataggttcaattgtggtacgtggatggataagatgggcgagtccgatcgggctaggaatcgaggcattccagcgaccccacgagacgggagtgcggtggagatcgtgggcttgagcaagagtgccgtccggtggctgcttgaattgagcaagaaaaacatcttcccttaccacgaggtgacagtgaagcggcacggcaaagccattaaggtgagctatgatgagtggaatagaaagattcaagataactttgaaaaactgtttcacgtttccgaggaccccagcgatttgaacgaaaagcatcccaacctggttcacaaaagaggtatatacaaagatagctatggcgcatcgagcccctggtgtgactaccaactgcgccctaacttcacaattgcaatggtggtcgcccccgagttattcaccacagagaaggcctggaaggcactggaaatagcagagaaaaagctgttggggcccctgggaatgaagaccttggaccctgatgatatggtgtactgcggcatatacgacaacgcgctggacaacgataactacaatttggctaaaggttttaattaccaccaaggacccgaatggttgtggcccatcgggtactttctgagagctaagttgtacttttcccggttgatgggccctgaaactaccgccaagaccatcgtcctggtgaagaacgtgctttcgaggcactatgtccacctcgagcggtccccatggaagggcctgccagagttaactaatgagaacgcccaatactgtccatttagctgcgaaacccaagcttggtcaatagctactatacttgagaccctgtatgacctgtag

SEQ ID NO: 2328 - DNA, 4551 bp, synthetic construct
  misc_feature 1..4551: note = source = /note="Description of Artificial Sequence: Synthetic coding sequence"
  source 1..4551: mol_type = other DNA
atggctccaattctttccattaatctgtttatcggctatgagctgcagttccggctcgggcccactctgcagggcaaggcggttactgtgtacacaaactaccccttcccgggcgagacctttaacagggagaagttccgttccctcgattgggagaatcccacagaacgagaggacgactcagacaaatactgcaagctcaacctccaacaaagcgggtccttccaatactatttcctgcagggcaacgaaaagtcgggagggggctacattgttgtggatccaatcctgcgggtgggagcagacaaccatgtgttgcctttagattgcgtgaccttgcagacgtttttggccaaatgcttggggccttttgatgagtgggagtcacgtctgcgggtggccaaagaatcaggctataacatgatccacttcacacctctgcagaccctgggcctttcccgctcatgctactccctggctaaccaattagaactgaatccggatttttcaaggcccaaccgtaaatatacttggaacgacgtcgggcagctggtcgagaagttaaagaaggaatggaacgtcatttgcattactgacgttgtgtacaatcacaccgcagccaattctaagtggattcaggagcacccggagtgtgcctataaccttgtgaactcacctcacctgaaacccgcttgggtactcgatagagcattatggcgattcagttgcgacgtggctgaggggaagtataaagaaaagggcattcctgcattgatcgagaacgaccatcacatgaactccatcaggaagattatatgggaggacattttccccaaacttaagctctgggagttcttccaagtcgatgtgaataaggcagttgagcagtttcgcaggctgttgacccaggaaaaccgccgtgtgacaaagtctgaccctaatcagcatcttactattatccaagatcccgagtacaggaggtttggatgtacagtcgacatgaatatcgccttgaccacatttataccccacgacaaggggccagcagccatcgaggaatgctgcaattggtttcataagagaatggaggaactcaattctgaaaaacaccgactgataaactatcaccaggaacaggcagtcaattgcctgctgggtaacgtgttctacgaaagattggcaggccacgggcccaagctagggccggttacaagaaagcaccccttggtgacgcgctattttacttttccgtttgaagagatcgatttttccatggaggagagcatgatccacctgcctaacaaggcatgcttcttaatggcacacaacggatgggtgatgggcgacgacccactcaggaatttcgcggaacccggatctgaggtgtaccttcgaagagagctcatctgctggggggattccgtaaagctgcgatacgggaataaaccggaagattgtccttacttgtgggcccatatgaagaaatacaccgaaattaccgctacctactttcagggtgtgaggctggataattgtcattcgacacctctgcatgtcgctgaatatatgctcgatgccgcaagaaatttgcagcctaacctgtacgtggttgcagagctgtttacgggatccgaggacctcgacaatgtttttgttactagactggggatttcatcactgatcagggaggccatgtctgcgtacaacagccacgaggaaggaaggctggtctataggtacgggggcgaacccgtgggctcttttgtccagccttgtctgagacctctcatgcctgccatagcccacgccctcttcatggatatcactcacgacaacgagtgccccattgtgcatcgaagcgcctacgacgcgttaccaagtaccactatcgtgtcaatggcatgttgtgcgagtggatcaacgcggggatatgacgaactggttccgcatcagatctcagtggtctctgaggaacgcttttacacgaaatggaatccagaagccctgcccagcaacaccggcgaagtgaacttccaatcaggcattatcgcagctcgctgcgcgattagcaagttgcatcaagagctgggggccaagggattcattcaggtctacgtggatcaggtggacgaagatatagtggcagttacccggcacagtcctagcattcaccagagcgtagtggccgtgagccgaactgcatttcgaaaccctaaaacttctttttactctaaggaggtaccccaaatgtgcatccccggcaaaatcgaagaggtggtcctggaagcccgtactattgagcggaacaccaagccttacaggaaggatgaaaactccataaacggcacgcctgacataacggttgaaatacgtgagcacatacaacttaacgagtccaagattgtgaaacaagcaggggttgctactaaaggccccaacgaatacattcaagagattgagttcgagaatctctcacccggcagcgtgatcatttttcgcgtatctttagatcctcacgcacaggtggccgtgggcatcctgcgcaaccatttaacccaattctcacctcacttcaagagtggcagtctcgccgtggataatgccgacccaatactgaagatcccattcgcttctctggccagtagactgacactagctgaactgaatcaaatcctctacagatgcgagtcggaagaaaaggaggacggtggtggctgttacgacatcccaaactggagcgctctgaaatatgcaggtctgcagggcctgatgtctgtgcttgctgagatacgccctaaaaacgacctggggcatccattttgcaataatctccgctcaggggactggatgattgactacgtgagcaacaggctgatctcccggtccggcaccatagccgaagtcggcaaatggctgcaggctatgttcttctatttgaagcagatacccagatacctcataccttgctattttgacgccatcctgattggggcctataccactctgctggacacagcctggaaacagatgtccagttttgtccagaatgggtctaccttcgtcaaacaccttagcttgggctccgtccagctgtgtggtgtaggtaagtttcccagccttcctatcctttcaccagccctgatggacgtgccataccggctgaatgaaatcacaaaggaaaaggagcagtgctgcgtgtccctggccgccggtcttccacatttctctagtggcatctttcgatgttgggggcgcgatacattcattgctctgcggggaattctgctcatcactgggaggtatgttgaagcccgaaacatcattctggcttttgcaggtacactgcgacacggacttatcccaaaccttctgggagagggtatttatgctcgctacaactgcagagacgcggtgtggtggtggttacagtgtatccaggactattgcaaaatggtgcccaatggcctcgatatcctcaagtgtccagtgtcccgcatgtatccaactgacgattctgctcccttgcccgccgggacactggaccagcccttattcgaggtcatacaagaagccatgcagaagcatatgcaagggatacaattcagggaacgtaacgctggccctcagatcgatcgaaacatgaaagacgagggtttcaacattactgccggtgtggatgaagagaccggattcgtatacggtggaaaccgctttaattgtggcacctggatggataaaatgggtgaaagcgatagggctaggaatcgggggattcctgccaccccccgcgacggctccgccgtggaaatcgtaggtcttagcaagtccgctgttagatggctacttgaattgtctaaaaagaatatcttcccataccacgaagttaccgttaagagacacggtaaagctatcaaagtgtcctacgacgaatggaacaggaagatccaagataatttcgaaaaattgttccacgtaagcgaggaccccagcgacctgaacgagaagcaccctaacttggtgcacaaaaggggaatttacaaagattcctacggagcatcaagtccatggtgtgactatcagttaagaccaaacttcaccatagccatggtggtagcccccgagctcttcaccacagaaaaggcgtggaaggctctagagatcgctgagaagaagctgctgggtcctttaggtatgaaaacgctagaccccgatgacatggtgtactgcggaatttatgataacgcattggacaacgataattataacctcgcaaaggggttcaactatcaccagggacctgagtggttgtggcctatcggctactttctgagggcaaaactgtatttctctcgcctgatggggccagagacaactgcaaaaacgatcgtgctcgtgaaaaatgttctctctcggcattacgtccacctggagagatccccatggaagggcttgccagagctgactaacgagaatgcccagtattgtcctttctcctgtgaaacacaggcttggagtatcgccacaatcctcgagaccctctacgatctttag

SEQ ID NO: 2329 - DNA, 4548 bp, synthetic construct
  misc_feature 1..4548: note = source = /note="Description of Artificial Sequence: Synthetic coding sequence"
  source 1..4548: mol_type = other DNA
atgagcctgctgacttgcgccttctatctgggttacgaactccagttcagactcgggccaaccttgcaagggaaggccgtgacagtgtacaccaactatcccttccctggcgagacctttaatcgggagaaattcaggtcccttgactgggaaaaccccactgagcgggaggacgactctgacaagtactgcaaactgaacctacagcaatccggcagtttccagtactactttctgcagggcaatgagaagtccggcggcgggtacatcgtagtcgatccgattctgcgggtgggagccgacaaccacgtgctgcctctcgattgcgtgaccctgcaaaccttcttggccaagtgcctcggcccttttgatgagtgggagtcacggcttcgggtcgccaaggagagcggatacaatatgattcactttaccccacttcagactttgggcctgtctcggtcttgttattcgctggccaatcagctcgaactgaatcccgacttctcccgccccaacagaaagtacacttggaatgatgtaggacagctggtggagaagctgaagaaggagtggaatgttatttgcattaccgacgtggtgtacaatcataccgctgccaactctaaatggattcaggaacacccggagtgtgcctacaacctggtgaatagtcctcacctgaagccagcctgggtattggatcgagccctgtggcggttctcctgtgatgttgcggagggtaaatataaagaaaaagggatccctgccctgatagagaatgatcaccacatgaactcaattcggaagattatatgggaagacatcttcccaaagttaaaattgtgggagttcttccaggtggatgtgaacaaggccgtcgagcagtttaggcgtctccttacccaggaaaacaggcgagttaccaaatccgatccgaaccagcacctgacaatcatccaggacccagagtatcgtcgcttcggctgcacagtcgacatgaatatcgctttaaccaccttcatccctcacgataaaggccctgctgcaatcgaggaatgctgtaactggtttcataaacgtatggaggagctgaattctgagaagcaccggctaatcaattaccatcaggaacaggcagtcaactgtctgctcgggaacgttttctacgagaggctggcgggacatggacctaaactaggcccagtgactagaaagcaccccttagttacacgttacttcacttttccttttgaggaaattgattttagcatggaggaaagcatgattcacctgccaaataaagcatgcttcttaatggcccacaacggatgggttatgggggacgacccactgagaaactttgctgagccaggttctgaggtttacctcagacgcgaactgatatgttggggtgacagcgtcaagttacgctacggtaacaaacctgaagattgcccctacctttgggcccatatgaagaaatataccgagataacagctacgtactttcagggtgtgcgtctggacaattgtcattcaacgccgcttcacgtggccgagtacatgttggatgccgctagaaacctgcagccgaacctttatgtggtggctgagctgtttaccggatccgaggacctggacaacgtattcgtgacccgcctcggcattagttccttgattcgcgaggcaatgtccgcctataatagtcatgaggaaggccgactggtgtatcggtatggcggggagcctgtaggatcgttcgtacagccatgtttgagacccctaatgcctgctatcgcccacgctctgtttatggatattacacatgacaatgagtgccctatagtccacaggagcgcctacgatgccttgccctccacgactatcgtgtctatggcgtgttgtgcttcggggtccactcggggctacgacgagctggtgccccatcagatcagcgtagtttctgaagagagattctacaccaagtggaatcctgaggccttgccatctaatacaggcgaggtgaacttccagtccggcattattgccgctcgttgcgctatctcaaagttgcaccaggaactgggagctaaagggttcattcaggtgtatgttgaccaagtggatgaagatattgtcgccgttactcgacactcccccagcattcaccagagcgttgtcgcagtgagtcggacggcattcaggaacccgaaaacctctttttattctaaagaggtcccacagatgtgtatccccggaaagatcgaggaggtggttcttgaggctaggaccattgagcggaatactaagccctacagaaaggacgaaaacagcataaatggaactcccgacatcactgtggagattagagagcacatccagctgaatgaatcaaaaatcgttaagcaagcgggagtcgctaccaaggggcccaatgaatatatccaagagattgagttcgagaacctaagtcccggttccgttatcatttttcgagtgtcgctcgacccacacgcccaggttgcagtcggcattctcaggaatcacctgacacagttttctcctcattttaagtctggttctcttgcagtggataatgctgaccccatcctaaaaattccttttgccagcctcgcatcaagactgaccttagccgaattgaatcaaatcctgtaccggtgtgagagcgaggagaaggaagatgggggtgggtgttatgatattcccaactggagtgccctaaagtatgccggcctgcagggtctcatgagcgtgctagctgagatccggccgaaaaatgacctgggtcaccccttctgcaataacttgcgttcaggcgactggatgatagactatgtctcaaaccggttgattagtaggtccggaactattgcagaggtgggaaaatggctacaggctatgtttttctatctaaaacagatcccgagatatttgatcccgtgttatttcgacgccattctgattggagcctatacaacgctgctcgacacagcatggaaacaaatgagcagcttcgttcagaatggcagcacattcgtgaaacacctgtcactcgggtcggtacaattatgcggtgtaggaaaatttccttccctgcctatcctgagcccagcgctgatggacgtcccctaccgccttaacgagatcaccaaggaaaaggagcagtgttgtgtctcactggccgccgggcttccacatttctctagtggaatttttcggtgctggggacgagatacctttattgccctccgcgggattttactcataactggacgttacgtggaggctcgcaacatcattctggccttcgccggaacacttagacacgggctgattcccaatttgctcggcgaagggatctatgcccgatataattgccgggatgccgtgtggtggtggctgcagtgtatacaggactactgtaagatggtgcccaatggtcttgacatcctgaaatgtcccgtgtctcggatgtacccaacggacgattcggcccccctgccagctgggactctcgatcagcctctttttgaagtaatccaggaggccatgcagaaacatatgcagggaatacagtttcgggaacggaatgcaggtcctcaaatcgaccgcaacatgaaggacgagggattcaacatcactgccggagtcgacgaagagacaggattcgtctacggtggcaataggttcaactgcgggacatggatggacaaaatgggggaatctgatcgcgcacgcaacagaggcataccggcaacccctagggacgggagcgccgttgaaatagtgggtctgtcaaagtctgccgtgcgctggctgttagagcttagtaaaaagaacattttcccttatcacgaagtgaccgtgaagcgccatgggaaagctatcaaggtgagttatgatgagtggaatcgcaagattcaagataacttcgaaaaactgtttcacgtgagtgaagatccctccgacctgaacgagaaacatccaaacttggtgcataaaaggggaatttacaaggattcctacggggcctcttccccgtggtgcgattaccaactcagaccgaattttaccatcgccatggttgtcgcacctgaactcttcacaaccgagaaggcctggaaagctctggagatcgcggagaaaaagctgctcggccccttgggaatgaaaactctggacccagacgatatggtgtattgtggcatctatgacaatgcgctggacaacgacaattataatctggcgaagggcttcaattaccaccagggccctgaatggctttggccaatcgggtattttctaagggcaaaactatatttctcccgacttatgggacctgagaccaccgccaaaaccatcgtgttagtgaagaatgtgctgagtagacattatgtgcatctggagagaagcccttggaaagggttgcctgaattgacgaacgaaaacgcgcagtactgccccttcagctgcgagacgcaggcctggagtatcgctaccattttggagaccttatacgacctgtag

SEQ ID NO: 2330 - DNA, 4599 bp, synthetic construct
  misc_feature 1..4599: note = source = /note="Description of Artificial Sequence: Synthetic coding sequence"
  source 1..4599: mol_type = other DNA
atggggcactctaagcaaatacgcatcctccttttgaatgaaatggaaaaactcgagaaaaccctattcaggctggaacagggctacgaacttcagttccgactaggtcccacgctccaaggaaaagcagtcaccgtctacacaaattacccctttccaggagagacattcaaccgggagaagtttcgtagcctggattgggagaatcccacagagcgagaggacgattctgataagtactgtaagcttaatctccagcaatccggatcttttcaatattactttctccagggaaacgagaaatccggcggaggttacatcgttgtggatcctatcctacgagttggagccgataatcatgtgctgccactggactgtgttaccctgcagacctttctcgcgaagtgtctgggcccttttgatgaatgggaatcacgcctcagagttgctaaggagtctggctataatatgattcacttcacacctcttcagacactgggattgagtcgatcatgctactctctcgccaaccagctggagctgaatccagacttctcacgacctaaccgaaagtatacatggaatgatgtggggcagttggtagaaaagttgaagaaagagtggaatgtgatctgtattaccgacgtcgtttataaccacactgcagctaattcaaaatggatccaagaacaccctgaatgtgcgtacaacctggtgaactctcctcacttaaaacctgcttgggtgctggaccgcgcgctttggcgcttctcctgcgacgtggccgaaggcaaatacaaggaaaagggcattcccgctctaatcgagaacgaccaccacatgaactccataagaaaaattatctgggaggacatctttccaaagctgaagctctgggagttcttccaagttgacgtgaacaaggcggtggaacaattccggcgactccttactcaggaaaatcgcagagtgacaaagtcagaccccaaccaacatttgactataatccaagatcccgaatatcggcggttcgggtgtactgtcgatatgaatatcgccctgacaacatttatcccccatgacaaggggccagcggctatagaagagtgctgcaactggttccataaaaggatggaagagcttaacagtgaaaagcacaggcttattaactatcaccaagagcaagccgtcaactgcttattaggcaatgtgttctacgagaggctggctggccacggccccaagctaggaccagtgactcgcaagcacccactggtgacaagatacttcactttcccattcgaggagatcgacttctctatggaagagtccatgatacatctgccaaacaaggcctgcttcctgatggcccacaacggttgggttatgggagatgaccctttaaggaacttcgctgaacctgggagcgaggtgtatctccggcgtgagttgatctgttggggggattcagttaagctccgatacggcaataagcccgaagattgcccatatttgtgggcccacatgaaaaaatataccgagataacagccacctatttccagggggtccggttggacaactgccatagtactccccttcacgtcgctgagtacatgctcgacgccgccagaaatctgcagccaaacctgtacgtggtggcagaactgtttacagggtcagaagatctcgacaatgtctttgtcactaggctgggcatttcttccttaatacgtgaggcaatgagtgcatacaacagtcacgaagaaggccgtttagtgtaccggtacggcggcgaacctgtggggtccttcgttcagccatgtctacggccactgatgcccgctatcgcccatgccctgttcatggatatcacacacgacaatgagtgcccaatcgtccacagaagtgcttatgacgcattaccaagcacaaccatcgtctccatggcctgctgcgctagcgggagcactagagggtacgacgaactggtaccacatcagatctcagtcgtcagcgaagagcggttctatacgaaatggaaccccgaggccttgccttcaaacacaggggaagtcaacttccagtcgggaatcattgctgccagatgcgctatctccaagttgcaccaagagctgggggccaaaggcttcatacaagtctatgtcgaccaggtggatgaagatattgtggccgtcactagacactctccctcaatccaccaatctgtcgtggcagtgtcaaggacagctttccgcaacccaaaaacttccttttacagcaaggaggtaccccagatgtgcatccccgggaagatcgaagaggttgtcttagaggcccgcacgattgagcgcaacactaaaccgtatagaaaggatgaaaacagcatcaacggtactccggatatcaccgtggagatccgcgaacatatccagctcaacgagagtaagatagttaagcaggccggagtggcaacaaagggacctaacgaatacatccaggagatcgagttcgaaaacctgagtcccggctctgtgatcatctttcgagtgtctctcgatcctcatgcccaggtggcggtggggatacttcggaaccacctcacacagttttcaccacacttcaaaagcggcagcctcgcggtagataatgccgacccgattttgaagatacctttcgctagcctggcttctcgactgactttggccgagctcaaccagatcctctaccgatgcgaatctgaagagaaggaggatgggggtggctgctatgacatccctaactggagtgctttgaagtacgctgggttgcaagggctgatgtctgtgttggcggagatccgtcctaaaaatgatctggggcacccattctgtaacaaccttcggtcaggtgattggatgattgactacgtcagcaatcggcttatttcccggtctgggacaatagcagaagttggaaagtggctgcaggccatgttcttctacctcaagcagatcccccgctacctcatcccatgctacttcgacgccatcctcatcggtgcctatacaacactattggacactgcctggaaacaaatgtcatccttcgttcagaatgggtccacctttgtcaagcatttgtccttgggaagtgtccagctgtgcggcgtgggcaagtttcctagtctgccgattctgagtcccgctctcatggacgttccctaccggctgaacgagattacaaaggaaaaagagcagtgttgcgtctcgttggcggccggactgccgcacttctcaagcgggatcttccggtgctggggacgggataccttcatagcattgcgaggcattctgttgattactggtcggtacgtcgaagcaaggaatataatcctggcttttgctggcaccctgcgccacggcctgattcctaatctgcttggggagggtatatacgcccgctacaactgccgtgacgctgtctggtggtggctccagtgcatccaagactattgcaagatggtgccaaatggtctagacattcttaaatgccccgttagccggatgtacccaacagacgactctgcccctcttccagccggaaccctggaccagccactcttcgaggttatccaggaggccatgcagaaacacatgcaagggattcagtttcgagagcgcaatgccggcccccagatcgacaggaacatgaaagacgagggattcaacatcactgccggagtagatgaagaaacaggattcgtctatggaggcaaccgcttcaactgcggcacgtggatggataagatgggggaaagcgaccgagcacggaatcggggtattcccgccaccccccgagacggcagcgcagtggagatagtcggcctgagcaagagcgcagtccgctggctccttgaattatccaaaaaaaacattttcccttatcatgaggtgaccgtaaagcgtcatggtaaagccataaaggtgagctacgacgagtggaatagaaagatccaggacaattttgagaaactgtttcatgtaagtgaggaccccagcgatctcaacgaaaaacatccaaatctagtacataagcgcgggatctataaagactcttatggcgcatctagcccctggtgcgattatcagctgcgacccaactttaccattgcaatggtggtagccccagagctctttacaacagaaaaagcctggaaagcactcgaaatcgccgagaaaaagctgttgggacctcttggaatgaagaccttggatcccgacgatatggtatattgtggcatttatgacaatgccctggacaatgacaattataacttagcgaaaggtttcaattaccaccaaggcccagaatggctgtggcctatcgggtattttcttcgtgctaaattgtatttcagtaggttgatgggccctgagaccaccgccaaaaccatagtactggtgaaaaacgtcctgagtcgtcattacgtgcacttagagcgttctccctggaaggggcttcctgagcttacgaacgagaacgcacaatattgccctttctcttgcgagactcaagcatggagtatagcgaccatactggagactctttatgatttatag

SEQ ID NO: 2331 - DNA, 4551 bp, synthetic construct
  misc_feature 1..4551: note = source = /note="Description of Artificial Sequence: Synthetic coding sequence"
  source 1..4551: mol_type = other DNA
atggctccgatcctgagcattaatctgttcatcggctacgagcttcagtttcggcttggcccaacattgcagggtaaggcagtgaccgtgtacaccaactatccattccccggggagacatttaatcgtgaaaagttccggtccctcgattgggagaatcccactgagcgtgaagacgattcagacaaatactgcaagctcaatttgcaacagtcagggagcttccagtattattttctccaaggcaacgaaaagtctggaggggggtatattgtagttgatccaatcctgcgcgtgggtgcagacaaccatgtgctgcccttggactgtgtcacactccagacttttcttgcaaaatgtctcggaccgtttgatgaatgggaatcccgccttagagtggccaaagagtccggctacaatatgatccattttacccctctgcagaccctgggtctgtctcgttcctgctacagcctggccaatcagctggagttgaaccccgacttctctcgcccgaacagaaaatatacgtggaacgacgtcggccagctggtggaaaaattaaagaaagaatggaacgtaatttgtattactgatgtggtctacaaccacaccgccgcgaattccaaatggattcaggagcaccctgagtgtgcttacaacttggtcaattcccctcacttgaagccggcttgggtgctggacagggctttatggaggttcagctgcgacgtggctgagggaaagtataaagagaaagggattcctgcacttatcgagaatgatcaccacatgaattctatccgtaaaataatatgggaagatatattcccaaagctaaagctatgggagtttttccaagtggacgtaaacaaggcggtggagcagttcagacggctgttgacgcaggagaaccgcagggtgacaaagtccgaccccaaccaacacttgacaattattcaggacccggaatatcgtaggtttgggtgtaccgtcgatatgaacatcgcacttacgaccttcatcccacatgataagggtcctgcagccattgaagaatgctgcaactggttccataaaaggatggaagaactgaactccgaaaaacatagactcatcaattaccatcaggaacaggctgttaactgtcttttgggcaacgtgttttatgagagactggcgggtcacggacccaaactgggccccgtgacgcggaagcatccactggtcactaggtattttaccttcccttttgaggagatcgacttctctatggaagagtcaatgatccaccttcctaacaaagcctgctttctgatggcacacaacggatgggtaatgggagatgaccctctgcggaattttgctgagcccggtagcgaagtctacctcagacgggaactgatctgttggggggacagtgtgaagctcaggtacggcaataaaccagaagactgtccttatttgtgggcacacatgaaaaaatacacagaaataaccgctacatactttcaaggtgtaaggctagacaattgtcattctaccccactccacgtagcagagtatatgctggatgcggcgcgcaacctgcaaccaaatctatatgtggttgctgagttgttcacgggctccgaagatctggacaacgtatttgttacacgtttgggaatcagttccctcattagagaggctatgagcgcatacaacagtcatgaagaaggccggcttgtgtaccgctacggaggggagcctgtgggcagttttgtccaaccctgcttaagaccactgatgccagccatcgcgcacgccttatttatggacattactcatgacaatgagtgcccaattgtgcaccgaagtgcctacgatgccctgccttccacaaccatcgtctcgatggcttgttgtgcaagtggctccaccagaggatacgatgaattggtgccacaccaaatctctgtcgtctccgaagaacgcttctacaccaaatggaatccggaggctctgcccagtaataccggggaggtgaatttccaatctggcataattgccgcccgttgcgcaatcagtaaattgcaccaggagctgggggctaagggcttcattcaggtgtatgtcgaccaggtagacgaggatatcgtggcggtgactagacactccccttctattcatcagagcgtggtcgctgtgtcgagaactgcattccgtaaccccaaaacctctttttattctaaagaagtgccccagatgtgtatcccaggaaagatcgaggaggtcgtgctggaagcccggaccatcgaacgcaataccaaaccttataggaaggacgaaaattctatcaacggcacccccgatataactgtggaaatccgtgaacatatccaacttaacgagtctaagatcgtgaaacaggccggtgtagcaaccaaaggacctaacgagtacatacaggaaattgagtttgagaacctatcacctggcagcgtcattatttttcgggtgtcactggaccctcatgctcaggttgcagtgggcatcctaagaaatcacttaacccagttctctccgcactttaagtcgggcagtttggctgtggacaatgcagatcctatcttaaagattccctttgccagcttagcttcaagactgactttagcagaactgaatcaaatcctgtatcgctgtgagtccgaggagaaggaggacggaggtggctgttacgatatcccgaattggtccgcccttaaatatgctggcctccagggccttatgtctgtgctggccgagatcaggcctaaaaacgacctaggacaccctttttgtaacaacctcaggtctggcgattggatgattgattatgtgtcaaataggctgatcagtagaagcggcaccatagctgaagtgggcaagtggctgcaggccatgttcttttacctaaagcagattccccggtatttgatcccttgttatttcgatgccatcctcattggggcctacaccacactgctggacacggcgtggaagcagatgagcagtttcgtccagaacggaagcacatttgtcaaacacctgagcctgggttcagtgcaactatgcggcgtgggaaagttccccagcctgcctattctctctccagcccttatggacgtgccatacagattgaatgaaattacaaaggagaaagaacaatgctgcgtgagtcttgccgctggtctcccacatttctctagcggtatctttcgttgctggggcagagacacctttatcgctctgaggggaatcttactcatcacgggccggtatgttgaggcaaggaacatcattctagcctttgcagggacactgcgacatggtctgattcccaacctgcttggggaagggatatatgctagatacaactgccgggatgccgtgtggtggtggcttcagtgcatccaggattactgcaaaatggtgcccaacggcctcgacattttaaaatgcccagtctccagaatgtacccaaccgacgactctgcccctctgcccgctggcacactggaccagccgctattcgaagtcatacaggaggctatgcagaagcacatgcaagggatccaatttcgggaacgcaacgccggtcctcagatagataggaacatgaaggatgaggggttcaacataaccgctggtgtggacgaagagacaggcttcgtttatgggggaaaccgctttaactgcggcacctggatggacaaaatgggtgaatccgaccgtgcacgaaatagaggaattcctgcgacgccgcgcgatggtagtgccgttgagatagtggggctgagtaaatcagccgttaggtggctcttagagctttcaaagaaaaatatttttccgtatcacgaagtgacagtgaaacgccatggcaaggcaatcaaggtctcttacgacgagtggaacagaaagatccaagacaattttgaaaaactttttcatgtgtccgaggatcccagcgacctgaatgaaaaacatcccaatctagtgcacaagcgggggatctataaggatagctacggtgcatctagtccctggtgcgactatcaattgcgcccgaactttaccatcgccatggtggtcgcccctgagctgtttactaccgagaaagcctggaaggcactcgagatcgcagagaagaaattgctgggcccgctgggcatgaagacactcgaccctgacgacatggtgtattgcggtatttacgataacgctctggataatgataattacaatctggccaaggggttcaattaccaccaggggcctgaatggttgtggcctatcgggtatttcctgcgggctaagttgtactttagtcgtttaatggggccagaaaccaccgcaaagacgatcgtgctggtgaagaatgtgctttcaagacactacgtgcacttggagaggtcaccttggaaaggcctgcctgagttgactaacgaaaatgctcagtattgccccttcagctgcgaaacacaggcctggagcatcgctacaatcctggagaccctctacgatctgtag

SEQ ID NO: 2332 - DNA, 4599 bp, synthetic construct
  misc_feature 1..4599: note = source = /note="Description of Artificial Sequence: Synthetic coding sequence"
  source 1..4599: mol_type = other DNA
atgggtcacagcaagcagatcagaatcctcttactcaatgaaatggagaaattggagaagaccttattccgcttggaacagggatacgagctgcagtttaggttgggaccgacccttcagggcaaggcagtgaccgtttacactaattacccttttcctggggagacctttaatagagaaaaattccggagtttggattgggaaaatccaacagagcgcgaagacgattcagacaagtattgtaagctgaacctgcagcaatccggatcctttcagtactatttccttcaaggtaacgagaagagtgggggcggctatattgttgtagatccaatcctgagagtcggagccgataatcatgtgttaccactagactgtgtgacattgcagactttcttagctaaatgtctgggcccctttgatgaatgggaaagccggttgagggtagccaaggagtccggctacaatatgatacacttcacaccccttcaaaccctgggcctgagcaggtcttgttattctctggccaaccaactggaactgaacccggacttctctcgtccaaacagaaagtacacatggaacgatgtcgggcagctggtcgagaagctgaagaaagagtggaacgtgatatgtattaccgatgtggtgtacaaccacactgcggcaaattccaagtggatacaggaacaccccgagtgtgcctataaccttgtcaacagcccacatctcaaaccggcctgggtgctggatcgcgcactctggcgttttagctgcgacgtagccgagggcaagtacaaggaaaaggggatcccggctctgatcgaaaatgaccatcatatgaattccatccgtaaaatcatctgggaggacatctttccgaaactgaaactatgggaatttttccaggttgatgtgaataaagctgtggaacaattccgccgcctgctaacccaggaaaataggcgggtgactaagtctgaccccaatcagcatctgactattattcaggatccagagtataggagattcggttgtacagtagacatgaacatcgcacttactacctttatcccccacgataaggggcccgccgctatcgaggaatgttgtaactggtttcacaagaggatggaagagctgaatagcgagaaacaccgcctaatcaattaccatcaggaacaggcagtgaattgcctcctgggaaacgtgttctatgagagactagcaggccatggaccaaaattaggccctgttacgcggaaacatcccctggtgacgcgctattttaccttccccttcgaagagattgatttcagcatggaggaatccatgatccatttgccgaacaaggcctgttttctaatggcacataatggttgggtcatgggcgacgatcccttgaggaacttcgcagaacccgggagcgaggtttatttgaggagagaacttatctgttggggcgattcggtgaagttgcggtatggcaataaaccagaagactgcccgtacctctgggcgcatatgaagaagtacacagaaattacagctacctatttccaaggagtcagactcgataactgccactccacacccctgcatgttgctgaatacatgctggatgcggctcgtaatctacagcccaacctgtacgtggtcgccgaactgtttaccggatccgaggatctggataacgtttttgttacccgcctaggaatttcatctctgataagggaagcaatgtccgcctataatagccacgaggaaggaagactcgtgtatcgttacggaggtgagccagtcggctctttcgttcagccatgtctgaggccgctcatgcctgcaattgcccacgccctgttcatggatatcactcacgacaacgaatgtccgatcgtgcaccgttccgcttatgatgctctgccatctacaacgatcgtgtccatggcctgctgcgcaagtggttcgacccggggatatgatgagctggtgccccaccagatttctgtggtgtcggaggaacgcttctacaccaagtggaaccccgaggccctgccgagcaataccggcgaggtgaactttcaaagcggcattatagctgcccgttgtgcaatcagcaagttgcaccaggaactgggggctaagggattcattcaagtctacgttgaccaggtggacgaggatatcgttgctgtgacacgccactcgccttccatccaccagtctgtggttgccgtctctaggactgcttttcggaacccgaaaacgtccttctattcgaaggaagtcccacagatgtgcattcccgggaagattgaagaggtagtgttggaagcaaggactatagagcgtaacaccaagccttatcggaaggacgaaaactctattaatggcactccagatataaccgtagagatccgggagcacatccagctgaacgaaagtaaaatcgtgaagcaagccggggtggccaccaaggggcctaatgagtatatccaggagattgaatttgaaaacctgagtccagggagcgtcatcatttttcgagtgagcctcgatccccacgctcaggtcgctgtcgggatacttaggaatcatcttactcagttttccccacatttcaagtccggcagcctggcagtggataacgctgatcctatattaaaaattcccttcgcatccctagcatcacgccttacgctggccgagctgaaccagatactgtatagatgtgagagcgaagaaaaggaggatggtggcggctgctatgatattccgaattggtctgccctgaagtatgccggtttgcaaggtctgatgagcgtcttagccgaaatcaggccaaagaacgacctgggacaccctttctgcaacaacctccgctccggtgactggatgatagactatgtgagcaaccgattgatttcgcgaagcggaacaatcgctgaggttgggaaatggctgcaggccatgttcttctatttgaaacaaattcccaggtacttaattccatgttactttgacgccatacttattggcgcttacaccaccctcctggatactgcctggaaacaaatgagcagctttgtgcagaatggttcaacatttgtgaaacatttatccttgggttcagttcagctttgcggcgtcggcaagtttccaagtcttcctatcctgtctcccgctctgatggacgtcccatatcggcttaacgaaattacgaaggaaaaggagcagtgctgcgtgagcttagcagcagggctcccacacttctccagcggaatcttccggtgttggggccgcgacacatttatcgctctgcgtggtatacttctgataaccggacgctatgtggaggcgaggaacatcatcctggcatttgctggtacccttagacacggcctcattcctaacttactcggtgaggggatctatgcacggtacaactgtagagacgctgtctggtggtggctgcagtgtatccaagattattgcaaaatggtgcccaacggcttggacattctcaaatgccccgtgtccaggatgtatccgactgacgacagtgcaccactgcccgctgggaccctcgaccagccgttattcgaggtgatccaggaggcaatgcaaaagcacatgcagggtattcagtttagagagagaaacgccggacctcagatcgacagaaatatgaaagatgaagggtttaatataactgctggggtggacgaagaaactggctttgtatacggaggcaatagatttaattgcgggacatggatggacaaaatgggagaatcagaccgcgcacggaatagggggatccccgccactccaagagatggtagtgcagtggagattgtaggcctgtctaaaagcgccgtgcgctggctgctggagttgtctaagaagaatatctttccataccacgaggtgaccgtcaagagacatggcaaggcaataaaagtttcctacgatgagtggaacaggaaaattcaggacaattttgaaaaattattccacgtctcagaagatccgagcgatttgaatgaaaaacacccgaacttggttcataagaggggcatttataaagatagttacggcgcatcctccccatggtgcgactatcagttgagacctaacttcacgattgctatggtagttgcacctgagctcttcaccaccgagaaggcctggaaggctctggagattgctgaaaagaagctccttggccctctgggcatgaaaactctggaccctgatgatatggtgtactgcgggatctatgacaacgccttggacaacgacaactacaatctggccaagggcttcaattaccatcaaggcccagaatggctgtggcctataggttattttttacgtgccaagttgtacttcagtcgactcatgggaccagaaaccacggcaaagaccatagttctggtcaaaaacgtgcttagtagacactacgtgcatctggaacggagtccatggaaaggcctccctgaactaacaaatgaaaacgcccaatactgccctttcagttgcgagacacaagcatggtcaatcgccacgatccttgagaccctgtatgacttgtag

SEQ ID NO: 2333 - DNA, 4599 bp, synthetic construct
  misc_feature 1..4599: note = source = /note="Description of Artificial Sequence: Synthetic coding sequence"
  source 1..4599: mol_type = other DNA
atgggacatagcaagcagatacgcatcttgttactgaatgagatggagaaattagagaagactctttttaggctagagcagggatacgagctacagttccgcctgggcccgactctgcagggcaaggccgtgacggtttacactaactacccctttccaggtgaaacatttaacagggaaaagttcaggagcctggactgggagaaccccacagaaagggaggatgacagcgataaatactgcaagttaaacttgcagcagtctggatctttccagtactattttctgcaaggcaacgagaagagcgggggaggatacattgtcgttgatcctattctgcgggtgggagctgacaaccacgtgttacccctggactgcgttacccttcagaccttcctggctaaatgtctcgggcctttcgatgagtgggagagccgcttacgggttgcaaaagaaagcggctataacatgattcacttcaccccgctccagaccctaggtttgtctaggtcatgctattccctggcgaaccagctcgaactcaaccctgatttttcccgcccaaatcgaaaatatacctggaacgacgtcgggcagctagtggagaaactcaagaaggaatggaacgtgatatgtattaccgacgtggtctacaaccacacagctgccaacagtaaatggatccaggaacaccccgagtgtgcctacaacctggtcaattccccacatctcaaaccggcctgggttcttgatcgggctctttggcgatttagttgcgatgtcgctgaaggaaagtataaagaaaaggggatacctgccctcatcgaaaatgatcaccatatgaatagtataagaaagatcatctgggaggatatcttcccaaagcttaaactttgggagttctttcaggtagacgtaaataaggccgtcgaacagtttaggcgcctgcttacccaggagaaccgccgcgtgacaaaatccgatcccaaccagcatctgaccattatccaagatccagaatatagacggtttggttgcaccgtggatatgaatattgcactgacaaccttcattccccacgacaaaggccctgccgcaattgaagagtgttgtaactggtttcacaagcggatggaggagctgaactctgagaagcatcgactcattaactaccaccaggaacaggctgtgaattgcctcctaggaaacgtcttctacgaacggctggccggccatggccctaagctggggcccgttacgcgtaaacatcctttggtgacgcggtacttcactttcccttttgaggaaatcgatttctcgatggaggagtccatgatacacttgcctaacaaagcctgcttcttgatggctcacaacggctgggttatgggcgatgacccactgcggaattttgcggaaccaggaagcgaggtctacctgcgcagagagctcatatgttggggtgactctgtcaagcttcggtacgggaacaagcctgaagattgcccttacctgtgggcccacatgaagaagtatacagagattaccgctacatatttccagggagtgcggctcgataattgccattcaacccctctacacgtggcagaatatatgttagatgccgcacgcaatctgcagcccaatttatacgtagtggccgaacttttcactggatctgaggacttggacaatgtctttgtcactcggctcgggattagctcgcttatcagggaggccatgtcagcttacaattcacacgaagagggccgccttgtttataggtacggcggagagcccgtgggctccttcgtgcagccttgcttacgtcccctgatgcccgccattgctcacgccctgttcatggacatcactcatgataacgaatgcccgatcgtccacagaagcgcttatgacgccctgccatcaaccactatcgtgagcatggcttgctgtgcatccgggtcgactagaggctatgatgaactcgtgccccaccagataagcgtcgttagtgaggagaggttctacaccaagtggaaccccgaggcccttcccagcaataccggcgaggtgaacttccagagcggcattatcgccgctcggtgtgcaatctctaagctgcatcaggagctgggcgccaagggcttcatccaggtttatgtggaccaggtggatgaagatatagtggcagtgacaaggcactcacctagtatccatcagtcagtcgtggccgtgagtagaacagcttttagaaaccccaagacaagtttttactccaaagaagtgccgcagatgtgtatccccgggaaaatcgaagaagttgttctagaggctcgcactattgaaaggaacacaaaaccctaccgaaaggacgagaattccattaacggaactcccgacatcaccgtggagatccgcgagcacattcagctcaacgaatctaaaatcgttaaacaagcgggggtcgccaccaagggtccaaatgaatatattcaagaaatcgagtttgagaacctgtcgccaggctcagtgatcattttcagagtttcactggatccgcacgcacaggtcgcagtcggaatcttgagaaaccaccttacacagttctccccgcactttaaaagcgggtctctggcggtagataatgcagatcccattctcaaaattccattcgcctctctcgctagccggttgaccttagctgagctcaatcagatcctctatcgctgcgagagcgaggaaaaggaggacggcggaggatgctacgatatacccaattggtcagccctgaagtatgccgggctgcagggactgatgtcggttctcgcggagatacggccaaagaatgacctgggacaccccttctgcaataacctgcgttctggagattggatgatcgactacgtatctaaccgcctgatttcacggtcaggaacaatagcggaagttggaaagtggctgcaggctatgttcttttatttgaaacagataccacgctatctaatcccttgttacttcgatgctattctaatcggcgcctacactacactgcttgacaccgcctggaagcagatgtcatctttcgttcaaaacgggagcaccttcgtgaagcaccttagtctgggatccgttcaactttgcggggtcgggaaattcccttcactccccatattaagccccgccctgatggatgtgccctatagactgaacgaaattacaaaggagaaagagcagtgctgcgtgtctctggcagccggccttccacattttagctcaggaatatttcgatgctggggccgggacacatttatcgcattacgcggaatactcctaatcacaggacgatacgtcgaggccaggaatattatcctggcctttgctggtactctccggcacggcctgatccctaacctgttaggcgaaggcatctatgccaggtataattgtcgcgatgcggtgtggtggtggctgcagtgcattcaagactactgtaaaatggtcccgaatgggctggatatccttaagtgccccgtgtcacgcatgtatccaacggacgacagcgctcccttacctgctggcactctggatcagccactgtttgaagtgattcaggaagccatgcagaagcatatgcagggcattcagttccgagaacgcaacgccggccctcaaatcgatagaaatatgaaagatgaaggttttaatattaccgctggagtagacgaggagacagggtttgtgtacggaggcaatcggtttaattgcggaacctggatggacaaaatgggggaatccgatagagccagaaatcgtggcatccctgcgaccccacgcgacggtagtgcagtcgaaatcgtaggtctttccaagagcgcagtgcggtggttgctcgaactctccaagaagaacatctttccttaccacgaagtgactgtgaagcgtcacggaaaggccattaaagtaagctacgatgaatggaacagaaagattcaggacaattttgaaaagttattccatgtgagcgaggacccctctgatttaaatgaaaagcatcccaacctagtccacaaaaggggcatctacaaagatagttacggggcttcatccccttggtgtgactatcaactgcggcctaactttactattgctatggtggtggcccctgagctgttcaccacagaaaaagcatggaaagctctggagatagctgaaaaaaagctgctggggccactcggcatgaaaactctggaccccgatgatatggtgtactgtggaatttatgacaacgcgctggacaacgataactataaccttgccaagggcttcaattatcatcagggcccggagtggctatggcctataggatacttcttgcgggctaaactctacttttctagattaatgggccctgaaacaacagccaagaccatcgtgctggtgaagaacgttctgagtaggcactacgtccacctagagcgttccccctggaaagggctaccagaactgactaatgagaatgcccagtattgtccattcagctgtgagacgcaggcgtggtcaatagccacaatactagaaaccctgtatgatctctag

SEQ ID NO: 2334 - DNA, 672 bp, synthetic construct
  misc_feature 1..672: note = source = /note="Description of Artificial Sequence: Synthetic coding sequence"
  source 1..672: mol_type = other DNA
atgaataagcccctgctgtggatcagcgtgctgacaagccttctcgaagcgttcgctcacaccgacctctcaggtaaggtgtttgtttttccccgtgagtctgtgaccgatcatgttaaccttatcaccccactggaaaagccgcttcaaaatttcactctttgtttcagagcgtattctgaccttagtcgcgcatacagcctgttcagctacaacacacagggacgagataacgaacttctggtctacaaagagcgtgtcggtgagtactctctttacattgggcggcacaaagtaacttcaaaggtgatcgagaagttccccgccccagtccatatctgcgtgtcgtgggagagcagtagcgggatcgcagaattttggattaacggtactccccttgttaagaaaggactgcgccagggttactttgttgaggcccagccaaaaatcgtgctggggcaggaacaagactcttatggcggaaaattcgatcgatcacagtcattcgtgggtgagatcggggacctctatatgtgggatagtgttctcccccccgagaatattttgtccgcgtaccaaggtactccgctccccgctaacatactggattggcaggccctaaactacgagattagaggatatgtgattattaagccccttgtctgggtttag

SEQ ID NO: 2335 - DNA, 2418 bp, synthetic construct
  misc_feature 1..2418: note = source = /note="Description of Artificial Sequence: Synthetic coding sequence"
  source 1..2418: mol_type = other DNA
atgagttcttccagttggctcctgttgtccctcgttgcagttactgccgcccagagcacaatagaagaacaggcaaaaacttttctggacaaattcaatcacgaagccgaagacctcttttatcagagttcactggcaagttggaactacaacaccaatattactgaggaaaacgtgcagaacatgaacaatgcgggggataagtggtccgcctttttgaaggagcagtcaactctggcacagatgtacccattacaggaaattcagaacctgacagttaagctccagctacaggcgttacagcaaaatgggtcaagcgtcctgtcagaggacaagtctaaaagattgaacaccatcctcaatacgatgagtactatctactcaactggtaaagtgtgtaacccagataacccacaggaatgcctcttgctggagcccggcctgaacgaaataatggctaatagcctggactacaatgaaagactgtgggcatgggaatcatggcgcagcgaagtgggtaaacagcttagaccactttacgaggaatacgtggtccttaagaatgagatggctcgcgccaatcactatgaggattatggtgattattggcgcggagattatgaggttaatggcgtggacggctatgactactcaaggggtcagcttattgaggacgtagagcataccttcgaagagataaagcctttgtacgagcatttgcacgcctatgtacgggcaaaattgatgaacgcctacccatcctacatatccccgatcggatgcctgcctgcgcacctgttgggcgatatgtgggggcggttttggaccaacttatactccctgacggttccttttggtcaaaagcctaacatcgacgttacggatgcgatggtggatcaggcttgggacgcccagaggattttcaaagaggcagagaagttttttgtgagcgtagggttgcccaatatgactcagggcttttgggaaaactcgatgctaaccgacccgggtaacgtacaaaaggctgtgtgtcaccccacagcctgggacttggggaaaggagattttaggattctgatgtgcacaaaggtgacaatggacgatttcctgaccgcccatcacgaaatgggacacatccagtacgatatggcctacgccgcccaaccattcctgctgcggaacggcgcaaatgaaggctttcacgaagccgtgggcgaaatcatgagcctctctgccgccacccctaagcatctgaaaagcatcggtttactgtcccctgactttcaagaggataatgaaaccgagataaattttctgctcaagcaggctttaactatcgtcgggactttaccatttacctacatgttggaaaagtggaggtggatggtttttaaaggggagattccaaaagaccagtggatgaagaaatggtgggaaatgaagcgggaaatcgtgggtgtggtcgagcccgtacctcacgacgagacgtactgtgatcccgcctctctgtttcacgtcagcaacgactattcattcatccggtattatactagaacgctttatcagttccaatttcaggaggccttatgccaggctgccaagcacgaaggaccgctacataaatgcgacatctccaattcaacggaggcaggacagaaattgtttaacatgctgcgcttgggtaagagcgagccttggaccctggccctggagaatgtggttggcgctaagaacatgaatgtcagacccctgctcaattacttcgagcccttgttcacttggctcaaggaccagaacaagaatagcttcgtgggatggtccactgactggtcaccttacgccgatcaaagtattaaggtgcgcattagcctcaagagtgcgctcggggacaaagcgtatgagtggaatgataatgagatgtacctgtttcgctcaagtgtggcctacgccatgaggcagtattttctcaaggttaagaaccaaatgatcctgttcggcgaagaggatgtccgagttgcgaacctgaaaccacgaatctcttttaacttcttcgtcaccgctccaaaaaatgtatccgatataatacccagaacggaagtggagaaagccatcagaatgtcacgatcccgcattaatgacgcttttaggctgaacgataattccttagaatttctcggcatacagcctacgctgggccccccaaaccagccgccagtgtcaatctggcttatagtgtttggcgttgtcatgggcgtgatcgtcgtaggcattgtgatccttattttcacaggaatacgggatagaaaaaagaagaacaaggcccgaagcggcgaaaacccttatgccagtatcgacatcagcaaaggggagaacaacccgggcttccagaatactgatgacgtgcagactagtttctag

SEQ ID NO: 2336 - DNA, 2418 bp, synthetic construct
  misc_feature 1..2418: note = source = /note="Description of Artificial Sequence: Synthetic coding sequence"
  source 1..2418: mol_type = other DNA
atgtcatccagtagttggctgctgttatccctagtggcggtgactgccgcccaaagtacgatagaagaacaagctaaaacatttcttgacaagtttaaccacgaggcggaagatctcttctatcagtcatccctggctagctggaactataacactaacattaccgaggaaaacgtccagaacatgaataacgcgggtgataaatggtccgcattcctgaaggagcagtcaacccttgcacagatgtatccacttcaagagatccagaaccttactgtgaagctgcagcttcaggccctgcagcagaatggatccagcgttctgtcagaagacaagagcaaacgtctgaatactattctgaatacaatgtctaccatctattcaaccggaaaagtctgcaatcccgataacccacaggaatgtttgcttctggagcctggccttaatgagataatggccaattcactggactacaacgaacgactatgggcgtgggagtcttggaggtctgaagtgggaaagcaactccggccgctttatgaagaatacgtcgtcctaaagaacgaaatggctagggccaatcattatgaggactacggagactattggcgtggagactatgaggttaatggggtcgacggctacgattactctcgtggccagctgatcgaagatgtggagcatacctttgaggagattaagcctttgtatgaacatctgcatgcctatgtcagagctaagcttatgaatgcgtatccctcctacatttcacctatagggtgtcttcccgctcatctgttaggtgacatgtggggtcgtttttggacaaatctgtactccttgacagtgcctttcggtcagaaacccaacatcgacgtgactgatgccatggtggaccaggcatgggatgcccagagaatttttaaggaggccgaaaaattcttcgtgtctgtaggcctgcctaatatgacccagggtttctgggaaaattccatgctgactgatcccgggaatgtgcagaaagccgtctgccaccccactgcttgggatctgggaaagggcgactttcggatcctaatgtgtaccaaagttactatggacgattttctcaccgcgcaccacgaaatgggccatatccagtacgatatggcatacgcagcccagcctttcctgctgaggaacggggcaaatgaaggctttcacgaggccgtgggggaaattatgagcctgtcggcagcaacccccaagcacctgaagtcaattggattgttatcacccgacttccaggaggataatgagaccgagataaattttctcctcaagcaggctctgactatcgtggggaccctgccgttcacctatatgctcgaaaaatggaggtggatggtgtttaagggcgagattcccaaggatcaatggatgaagaaatggtgggaaatgaagcgcgagatcgtgggagtagtggaacccgtaccccatgatgagacatactgtgacccagcctcgctattccacgtgagcaatgactatagcttcatcaggtattacacgaggacgctgtaccagttccagtttcaagaagctctgtgtcaggccgcaaagcatgaagggccattacacaaatgtgacattagtaacagtacggaggctggtcagaaactatttaacatgttgagactgggaaagagcgaaccatggacattggccctagagaatgtggtgggggccaagaatatgaacgtaagaccactgctcaactactttgaaccactattcacttggctcaaggatcagaataagaattcatttgtggggtggagtaccgattggagtccatacgctgaccagtcaatcaaagtccggatatcgctaaagtctgctctgggagacaaggcctatgaatggaacgacaacgagatgtaccttttcaggagctcagtcgcatatgcaatgaggcagtacttcctcaaggtcaagaaccagatgattcttttcggagaggaagatgtgagagtcgctaaccttaagccccgaataagtttcaatttttttgtgaccgcacccaaaaatgtctccgacatcataccccgaactgaggtcgaaaaagctatccggatgagtcgctccagaatcaacgacgctttcagactgaatgacaatagcctagaatttctcgggattcagccaaccctgggccctcctaatcaaccccccgtctcaatttggctgatcgtgtttggtgttgtaatgggagtgatagtggtggggattgtgatacttatttttactggcataagggataggaagaaaaagaataaggcaagaagtggggagaacccctacgcgtcaattgatatcagcaagggcgagaataacccggggttccaaaacacggatgatgtgcaaactagcttctag

SEQ ID NO: 2337 - DNA, 804 bp, synthetic construct
  misc_feature 1..804: note = source = /note="Description of Artificial Sequence: Synthetic coding sequence"
  source 1..804: mol_type = other DNA
atgaaggccgccgttttaactttggccgtgcttttcctgacgggtagtcaggccagacatttttggcaacaggacgagcccccccagtcaccatgggatagggtgaaagatttagctactgtgtacgtcgatgtgttgaaggacagcggacgcgattatgtttcccagtttgaaggatccgcattggggaagcagctgaacttgaagctacttgacaattgggactcagtgacttcaaccttttcaaagctccgggaacagctcggccccgtgacgcaagaattttgggacaacctcgaaaaggaaactgaggggttacgccaggagatgagcaaggacctggaagaggttaaagcaaaagtgcagccatacctcgacgatttccaaaaaaagtggcaagaggagatggagctgtatagacagaaagttgagccattgagagctgagctccaggaaggcgcacgccagaaactccacgaattacaggaaaaactgagtccgctgggtgaggaaatgcgtgatcgggcccgagcccacgtggatgccctaaggacacatctggccccctatagtgacgaacttagacagtgtcttgctgcccgtttggaggcccttaaggagaatggcggcgcacggctcgcagaataccatgcgaaggcgacggaacacctgagcacactcagcgaaaaagcgaagccagcccttgaggacttgcggcagggattgctcccagtgctggagtccttcaaggtctcattcctttcagctcttgaagagtacacaaaaaagctgaacactcagtag

SEQ ID NO: 2338 - DNA, 804 bp, synthetic construct
  misc_feature 1..804: note = source = /note="Description of Artificial Sequence: Synthetic coding sequence"
  source 1..804: mol_type = other DNA
atgaaggctgcggtgctgacactggcagtgttgtttttgactggctcccaagctagacatttttggcaacaggacgaaccacctcagtctccatgggatagggtgaaggatttagcaaccgtttacgttgacgtcctgaaagacagcgggcgcgactatgtctctcagttcgaagggtccgctctgggtaagcagctgaatctgaagttactagataattgggacagtgttacttctaccttctcaaaactccgggagcagttgggacccgtcacgcaggaattctgggacaacctggagaaagagaccgaagggctgcgtcaggagatgtcaaaagatctggaggaggttaaagctaaggtccagccctacctcgacgacttccagaaaaaatggcaggaagagatggaattataccgacagaaagttgaacccctgagggcagagttacaggagggagcacggcagaagctccacgagctgcaggaaaagttatcaccccttggagaggaaatgcgagactgtgccagggcccacgtcgacgccctacgaacccacctcgccccgtatagcgatgagctgcgccagcgcctggcagcccgcctggaggctctgaaagagaatggtggtgcacggttggctgaataccacgctaaggccaccgagcatctgtccaccctcagtgaaaaagccaagccagctctagaggatctcaggcagggtctgctccctgtgctagaaagcttcaaggtctctttcttatccgctctagaggagtataccaagaaacttaacactcagtag

SEQ ID NO: 2339 - DNA, 804 bp, synthetic construct
  misc_feature 1..804: note = source = /note="Description of Artificial Sequence: Synthetic coding sequence"
  source 1..804: mol_type = other DNA
atgaaggccgcagtgttaacgctcgctgttctgttcttaacaggatcacaagcacgccatttttggcaacaggacgagccaccacagtccccgtgggatcgcgtgaaggatttggcaactgtgtatgttgacgtcctgaaggatagtggccgcgactatgtctcccagtttgaaggaagcgctttgggcaagcagctgaatttaaagcttctggacaactgggatagcgtcacttcgacgttctcaaagctgcgggagcaactcggtcccgtgacgcaggaattttgggacaatctggagaaagaaacggagggtctgagacaagagatgagcaaggatctggaggaagtaaaagcaaaggtccagccttatctagatgacttccagaagaagtggcaggaggaaatggaattgtatagacagaaggttgagcccctgcgagcagagctccaggagggagcccgtcagaagctgcacgagctgcaggaaaagctcagcccactaggggaggaaatgagagaccgcgcaagagctcatgtcgacgcgcttaggacccacctcgccccatacagtgatgagttgcgccaacgcctagctgcaaggctggaggccctgaaggagaacggcggcgcaagactagccgagtatcacgccaaagccacagaacatctgagtaccctatccgaaaaagccaagcccgccctggaagacctgcgacaggggcttctgcctgtgctggagagttttaaggtcagctttctcagtgccctggaagagtatactaaaaagttgaacacacagtag

SEQ ID NO: 2340 - DNA, 804 bp, synthetic construct
  misc_feature 1..804: note = source = /note="Description of Artificial Sequence: Synthetic coding sequence"
  source 1..804: mol_type = other DNA
atgaaggccgcggtcctgacacttgctgtgttgttcttaacagggagccaggcccgccatttctggcaacaggatgaacccccccagagtccgtgggatagagttaaggacctggccactgtatatgtggatgtgcttaaggacagcggaagggactatgtatcacagtttgagggcagcgcactcggaaaacaactgaacttaaagcttctcgataactgggattccgtgacctcgacttttagcaaacttcgggagcaactgggccccgtgacccaggaattctgggataatctggagaaggaaaccgaaggcctcagacaggaaatgagcaaagatcttgaggaggtgaaggcgaaggtgcagccttatttagacgacttccagaagaaatggcaggaggaaatggaactgtatcgccaaaaggtcgaaccactgagagccgagctccaggaaggcgcccggcagaagctgcatgagctgcaggaaaaactgtcccctctcggcgaggagatgagagatcgggcccgtgcacacgtagatgctctccgcacacatttggccccttatagcgatgagctcagacaaagactggcagctcgtctggaggcccttaaagagaacgggggcgctcgcctggccgagtaccacgccaaagccacagagcatctgtcgactttatcagaaaaggctaagccagctttggaggatctgcgtcaaggcctcctgccagtccttgagtctttcaaagtgtctttcttgagtgcgctcgaggagtacacgaagaaactgaatactcagtag

SEQ ID NO: 2341 - DNA, 804 bp, synthetic construct
  misc_feature 1..804: note = source = /note="Description of Artificial Sequence: Synthetic coding sequence"
  source 1..804: mol_type = other DNA
atgaaagctgccgtgctgaccctggccgttttgttcttgacaggcagccaggctagacacttttggcagcaggacgaaccaccgcagtccccttgggaccgcgtgaaagatctggcaacggtctacgtcgatgtgctcaaggatagcggaagagactatgtgtctcagtttgaaggttcggcactaggaaagcaactgaacttgaagctgcttgataattgggattccgtcacatcgacattctcgaaactcagagagcagttaggccctgtgacccaggagttttgggacaatctggaaaaggagacagaaggactgcgccaagagatgtcaaaggacctggaggaggttaaagctaaagtccagccttaccttgatgactttcagaagaaatggcaggaggagatggagctctatcgacagaaggtcgagcctctgcgggccgagcttcaagagggggcacgacagaaacttcacgagcttcaggaaaaactttcccccctgggcgaagagatgagagaccgcgcccgggcgcatgtggacgcccttagaactcatctggcaccgtattccgatgagttgcgccaaaggctggccgcccgcctggaagcgttaaaggaaaacggaggagcacgcttagccgaataccatgccaaagccaccgaacacctctccaccctgtccgaaaaggctaaacccgcactggaggacctacgccagggactcctgcccgtgctggagagcttcaaggtatccttcctgagcgcattagaggaatacaccaagaagctaaacacacagtag

SEQ ID NO: 2342 - DNA, 804 bp, synthetic construct
  misc_feature 1..804: note = source = /note="Description of Artificial Sequence: Synthetic coding sequence"
  source 1..804: mol_type = other DNA
atgaaggctgccgtcctgactcttgccgtgctatttcttactgggagtcaagcccggcacttctggcagcaggacgagccaccccagtctccctgggaccgcgtgaaagatttggcaactgtatatgtggacgtccttaaagattcaggtagggactatgtgagccagttcgaaggcagcgcacttggcaaacaactgaacttaaagctgcttgataactgggactccgttacctccaccttctccaaactccgagaacagctcggcccagtcacacaagaattctgggacaatctggagaaggagactgagggactacggcaggagatgagcaaggacctggaggaggtgaaagcgaaagtgcaaccctaccttgatgattttcagaaaaaatggcaagaggaaatggagctatataggcaaaaggtggaacccctccgcgcagagctgcaggagggcgccaggcaaaagctgcacgaactacaagagaaactgagccccctgggcgaggagatgcgcgaccgcgcaagagcacacgtggacgccctcaggacgcatctggccccttattctgatgagcttagacagaggttagcagcacgccttgaagccctgaaagaaaacggcggcgcaagactagccgagtatcatgccaaggccacggaacatctctctactctgagcgaaaaagccaagcccgcgctagaagacctgagacaaggtctcctgcccgtcttggagagcttcaaagtttcgttcctatccgctttggaagaatataccaaaaagcttaacacacagtag

SEQ ID NO: 2343 - DNA, 1653 bp, synthetic construct
  misc_feature 1..1653: note = source = /note="Description of Artificial Sequence: Synthetic coding sequence"
  source 1..1653: mol_type = other DNA
atgacaggtgacaagggtccccaaagactgtccggttcctcatatgggagcattagtagtccaacttctccaacatctcccggtccacagcaagcaccccctcgagagacctatctctcagaaaagattcctatccctgatactaagcccgggacattttcactgagaaaactgtgggcttttactgggcctggcttcttgatgtcgattgccttcttagacccggggaacattgaaagtgatctgcaggcaggcgcggttgctggatttaagctgctctgggttcttttgtgggccaccgtgctgggactgctgtgccagagactggccgctagactcggggtggtaactggcaaagatctgggagaggtgtgccacctgtattatccaaaagtgccccgaaccgtgctgtggctaactatagagctggccatagtggggagcgacatgcaggaggtgatcgggacggctatagcgtttaatctgctgagcgctggccgaattcctttgtggggtggagtcctcatcacaattgtggacaccttcttttttttattcctcgacaactacggactgcggaagctggaggccttcttcgggctcttgattaccatcatggcgctcacctttggatatgaatacgtggtcgctagacctgaacagggggctcttctcaggggattgtttctaccttcttgtcccggctgcggtcacccagaattactccaggctgtgggcattgttggagctattatcatgccccacaatatctatttgcattctgcactggtcaagtcccgggagatagatcgcgccagacgcgccgacatcagagaagccaacatgtatttcctgatcgaggctactatcgcgctgagcgtgagctttataattaacctgtttgtgatggcagtgtttggtcaggccttctatcagaagacgaatcaagcagctttcaacatctgtgccaattctagtcttcacgattacgcgaagatcttccccatgaacaacgccaccgtggcagtggatatttatcaaggtggtgttatccttgggtgtctgttcggcccagcagccctatacatctgggcgattggcctgctggctgccggccagtccagtacgatgacagggacttatgctggccagttcgtaatggagggattcctaagactcaggtggtctaggttcgcaagggtcctgttgacccgatcctgtgctatactaccaactgttttggttgcggtgttccgagatttgcgcgatctttcggggcttaatgacctactgaacgtactgcagtctttgctcctaccttttgctgtgctccccatattgacattcacttccatgccaacgttgatgcaggagttcgctaacgggttactgaacaaggttgtgacgtcctcaatcatggttctggtgtgcgcaataaatctttactttgtcgtctcttacctgccgagcttacctcatcccgcgtattttgggcttgccgctcttttggctgctgcctacctgggactgagcacctatctcgtttggacttgctgcctcgctcatggggccacctttcttgctcattcatcccatcaccattttctatatggcctgttagaggaagaccagaaaggtgaaacctctggctag

SEQ ID NO: 2344 - DNA, 13035 bp, synthetic construct
  misc_feature 1..13035: note = source = /note="Description of Artificial Sequence: Synthetic coding sequence"
  source 1..13035: mol_type = other DNA
atggacccaccccgcccagcccttctcgctttgctcgctctacccgccttgctgttgctgctcttagcgggggctagggccgaagaggagatgctcgaaaacgtgtccctggtgtgtcctaaagatgcaaccagatttaaacacttaagaaagtatacttacaactatgaggcagaatccagctccggcgtaccaggcaccgctgattctcgatccgccactagaatcaattgcaaggtcgagctcgaggtcccgcagctatgttcattcatcttgaaaacttcacagtgtacattgaaggaagtctacggatttaatcctgaaggtaaagctctcctgaagaagactaagaactcagaagagtttgctgccgctatgagccgctatgaacttaaattagctatcccagagggaaagcaggttttcctgtaccctgagaaggatgaaccgacctacattctcaatattaaaagagggattatcagcgctctgctggtgcctcctgagactgaagaggcgaagcaggttctgtttctggatacagtgtacggtaattgctcgacccatttcaccgtgaagacacgaaaaggtaatgtggcaactgaaatctctacagagcgcgatttggggcaatgcgacagattcaaaccgatccgcaccggcataagcccactcgcacttattaaaggcatgactcggcccctgtctaccctcatcagttcttcgcagtcctgtcaatataccctggatgcgaaacgcaaacatgtggcggaggctatttgcaaggagcaacacctttttctccccttttcctacaaaaacaagtatggtatggtcgcccaggtcacgcaaacgctcaagctggaggataccccaaaaataaactctaggttcttcggagaggggacgaagaagatggggctcgcttttgagagtacaaaaagtacctctccccctaaacaggctgaagccgtgttgaaaacacttcaggagcttaaaaaactgactatctccgagcagaacatccaacgagctaacttgtttaacaagctggtgacagaacttaggggtctctccgacgaggccgtgacatccctgctgcctcagcttatagaagtctcatccccgatcactctccaggcgcttgtccaatgtggccagccccagtgttcaactcatattctacagtggctgaagcgagtgcacgcaaatcccctgctgattgacgtggttacgtatcttgtggctctcatccctgagccctcagcgcagcagctgcgtgaaattttcaacatggctcgggaccagcgaagcagggccaccctgtatgctctgagccacgccgtcaataactaccacaagaccaatccaactggcacccaggagctgctcgacattgcaaattatctgatggagcagattcaggacgactgcactggcgacgaggattacacctatctgattttgcgggtcataggcaacatgggacagacaatggagcagctgacccctgagctgaaaagtagcatcctcaagtgtgttcagagtaccaaacctagcctgatgatccagaaggctgcaatacaggccttgagaaagatggagccgaaggacaaggatcaggaggttctactgcagacattcctggatgatgcatctccaggtgacaaacgcttggccgcttacttgatgttgatgagatccccaagccaggctgacataaacaagattgtccagatactcccatgggagcaaaacgagcaggttaagaattttgtggcatcacatatcgcaaatattcttaacagcgaagagctggacattcaagatctaaagaaactcgtcaaagaggcattgaaggaatctcagctgccgaccgtgatggactttaggaagtttagtcggaattatcagctgtacaagagcgtgagtcttccttcccttgatcccgcatctgcaaagattgaaggaaacctgatcttcgacccaaacaattacctgcctaaggagtctatgctgaaaacaacgttaaccgccttcggtttcgcatctgcagacctgattgaaatcgggttagagggcaagggatttgagcctaccctcgaggcactgtttggtaaacagggcttcttccccgattctgtcaacaaggcactgtactgggtgaacggacaagtcccggatggagtgagcaaagttctggtcgaccatttcggttataccaaggacgacaagcatgagcaggatatggtgaacggcattatgctgtctgttgagaaactgattaaagaccttaagagtaaggaggtgcccgaggcccgcgcctacctcagaattctgggagaagagctggggttcgcctcacttcatgaccttcaactgctcggcaagctgctcctgatgggagctagaactcttcagggaataccccagatgattggggaggtcatccgaaagggctcgaagaacgacttttttctccattacatctttatggagaacgcattcgaactgcctacaggggccgggttgcagctccagatatcctcctctggcgtaatagctccaggggcaaaagcaggagtaaagttggaggttgccaatatgcaggccgagttggttgctaaacctagcgtgagcgtagaattcgtgaccaacatgggaatcattattccagatttcgcccggtccggtgtccagatgaataccaacttttttcatgagtctggtctcgaggcccacgtggcgctcaaggctgggaagctgaagttcatcatcccttcccccaaacgcccagtcaagctactctccgggggtaacactctgcatctggtttcaaccaccaagacggaggtgatacccccattgattgagaatcgtcaaagctggtctgtgtgtaagcaagtgtttcctggactgaactactgcacctctggtgcctactccaacgcttcaagcaccgactcggccagctattaccccctcaccggtgacactagactagaactggaactgcgccctacaggcgaaattgagcagtatagcgtcagtgcaacctacgagttgcagcgcgaggatagggctctggtcgataccttaaagttcgtgacccaggcggagggcgcgaaacagacagaagccactatgacattcaagtacaatagacagtctatgaccctttctagcgaagttcagatcccagatttcgatgttgacctgggaactatattgagagttaacgatgagtcgacagaggggaagaccagctatcggctcacactggatatccagaacaagaagatcactgaagtagcgctaatgggccacctgagctgtgacacgaaagaggagcggaagatcaaaggagtgatctccatcccgcgtctccaagccgaagccaggtcagagattctggctcactggagtcccgccaagctacttctgcaaatggactcttctgcgacggcctacggcagcacagttagcaagcgcgtggcctggcactatgacgaggagaaaatcgagttcgagtggaacactggaacaaatgtggataccaaaaaaatgaccagtaactttcccgtggacctgagtgactatcccaagtctcttcatatgtatgctaacagactgttagatcatagggtgccgcagactgacatgacctttcgtcatgtggggtccaagttgattgtagccatgtcctcatggctccagaaggcaagtggcagcttgccgtatacacaaactttacaggaccacctgaatagcttgaaggagttcaatctccagaacatgggtttgccagacttccacatccccgagaatctatttcttaagtcagatgggagagtaaaatatacgctgaataaaaatagccttaagatagaaatacccttgccttttggcggaaaaagttctagagatcttaaaatgctcgagacagtgcgcactcccgcactacatttcaaatctgtcggatttcaccttccctcccgagagttccaagtgccaacctttacaattcctaagctctaccagttgcaagtccctctgctcggcgtccttgatttatcgacgaacgtgtattccaatctctataactggagtgcatcatatagcggtggcaatacgtccacagaccacttcagtttgcgcgcaaggtatcacatgaaggcagatagcgtagtcgacctgttgtcatacaacgtgcaagggagtggcgagacaacttatgaccacaagaatacattcacgctgtcctacgacggcagcctgagacacaagttcctcgattccaacattaagttcagccatgtggagaagctcggcaataaccccgttagcaaagggctgcttattttcgatgcttcctcttcctggggcccacaaatgtccgcgtctgtccacctggactccaaaaaaaagcagcacctgtttgttaaggaagtaaagatcgacggacagttcagggtttcctccttctatgccaaaggaacttacggcctgagttgccagagagatcccaacactggccggcttaatggagagtcaaatctccgtttcaactcatcttatctccagggtaccaatcagattaccgggaggtatgaggatgggactctctctttgacatcaacctccgatcttcaatcaggaatcatcaaaaacaccgcatcactgaagtatgagaactacgagctaactcttaagagcgataccaatggtaagtacaagaacttcgctacatccaacaaaatggacatgacattttccaagcagaatgcactgctcagatcagaataccaggcagattacgagagcctgagatttttctctctactgagcgggagcttgaactctcacggactcgagctgaacgcagatattcttgggacggacaaaatcaatagcggcgcccacaaagcgaccctccgcatcgggcaggacgggatctctacaagcgcaaccaccaatttgaagtgctcactgctagttctggagaacgagctgaatgctgagctgggactgagcggtgcttcaatgaaactgacaactaatggccggtttcgcgaacataacgcaaagttctctttggatggtaaggctgccctgaccgagctttcattggggtctgcctaccaggccatgattctgggggttgattccaaaaatatattcaattttaaagtttctcaggagggtctaaaactctccaatgatatgatggggtcctacgctgagatgaagtttgaccacaccaactcactgaatatagccggcctaagtctggatttcagctctaagttggataatatctatagttctgacaagttctacaagcagacagtgaacctgcagttacagccatacagtctggtgacgactctcaacagcgacctgaaatacaacgcacttgatctcacaaataacggaaaattgcgactagagccccttaaactgcatgtggcgggcaatctgaaaggggcctatcagaataatgaaatcaaacatatctacgcaataagctccgctgctctatctgcttcatacaaggctgatacagttgctaaagtgcagggtgtggaatttagtcatagattaaacaccgacattgctggtctggcgagtgctatcgatatgtccactaactacaatagcgactcattgcacttctccaacgtgtttcgtagcgttatggctccgtttacgatgacaatcgatgcgcatacaaacggtaatggaaagctggcactatggggagaacataccggccagttgtatagtaaattcctcctcaaagccgagcctttggcttttaccttttcccacgattataaaggctcgacatcacatcatttggtcagccgtaagtctattagcgctgccctcgagcataaggtgtcagcacttctgaccccggccgagcagaccggcacttggaagctcaaaacgcagttcaataacaacgagtacagtcaagacctagatgcgtacaacacaaaagataagataggtgttgagttgacaggcagaaccttggcagatctgaccttgttggacagcccaatcaaagttcccctgttactctcggaaccaatcaatatcattgacgcactggagatgcgggatgctgtggagaagccccaggaattcactatagtggcctttgttaaatacgacaaaaaccaggatgtccattccatcaatctgccttttttcgagaccctccaggaatacttcgagaggaaccggcaaactattatcgtggttctggaaaacgttcaacgaaatctgaaacacataaacatcgatcagtttgtgcgcaagtatcgagctgctttggggaagttgccacagcaagccaatgactatctcaactcgtttaattgggagcgccaggtcagccacgccaaggagaagctcactgcactgacaaagaagtaccggatcacagagaacgacattcagattgcgttggatgacgccaagatcaacttcaatgagaaacttagtcaactgcagacatatatgatccagtttgatcaatacataaaagacagctacgacctgcatgacctaaagatcgctatcgcgaacattatcgacgaaattattgagaagttgaaaagtctagacgagcactaccacattcgagtgaacctggtcaaaaccattcacgaccttcacctgtttattgagaacatcgattttaataagtcaggcagcagtactgcttcatggatacagaacgtggacacaaaataccagattcggatccagattcaggaaaagctacagcagctcaaacggcatatccagaacattgacatacagcatctggctggcaagctaaaacagcatattgaggctatcgacgtgcgtgtgcttctggatcagctcggaaccacaatctctttcgaaagaattaatgatattctggagcacgtcaaacactttgtgattaatcttatcggtgatttcgaagtcgccgagaagataaatgcatttcgggccaaagtccatgaactgattgagcgctacgaggtggaccaacagattcaggtgctgatggataagctggttgagctggcccatcagtacaaactcaaggagactatacagaagctgagcaacgtcttacaacaggtgaaaatcaaagactattttgaaaaacttgtcggttttattgatgatgccgtcaagaagttgaatgaactgtccttcaaaaccttcatcgaagacgtcaacaagtttctagatatgctgatcaaaaaacttaaaagtttcgattaccaccaattcgtggatgagaccaacgacaagattcgtgaggtgactcagcgcctgaacggtgagatccaggcactggagctccctcaaaaagcagaggcactgaagctgttcctggaagaaaccaaagctacagttgccgtgtatttggaaagcctccaggatactaaaattacgctgatcatcaattggctgcaggaggctctatcttctgctagcctggctcacatgaaagctaaattccgggaaaccctggaagatactcgcgatcggatgtatcagatggatattcagcaggagctgcagaggtacctcagcttggtcggccaggtgtacagtaccttggtaacatacatctctgattggtggactttggctgctaagaacctgaccgacttcgctgagcagtacagcattcaagattgggcgaaacgcatgaaggcccttgttgagcaggggttcaccgtgcccgaaatcaagaccattctgggcactatgccagcgtttgaagtttctttgcaggccctccaaaaggcaacatttcaaaccccagacttcatcgtcccgctcaccgatttgcgcataccctccgtccagatcaactttaaggatttgaaaaacatcaaaatcccttctcgttttagcaccccagagttcactattctcaacacttttcacatcccaagttttaccatcgatttcgttgagatgaaggtcaagatcattaggacgatcgatcagatgctgaatagcgagttgcaatggcccgtgcctgatatttatttacgtgacctgaaggtcgaagacatacctctggctcggatcacacttccggacttccgcttgcctgagattgcaattccagaattcattatcccgactctgaacctgaatgactttcaagtccctgatctgcacatccctgagttccaactgccccatattagccatacgattgaggtgccaaccttcggcaagttatattccattctgaagattcagagccccctatttacactcgacgctaacgccgatattggtaacggcacaacatccgccaatgaggctggcattgcggcaagtatcacagcaaaaggtgaatctaagctggaggtcctgaattttgactttcaggccaatgcccagctgagtaaccctaaaataaaccccttggcccttaaagagtccgtaaaattctccagcaagtatctccgaacagaacacgggagtgagatgttgttttttggaaacgcgatcgaaggcaagtccaacacagtggcaagcctgcataccgagaaaaacaccctggaattatcaaatggagtcatagttaagattaacaatcagctcaccctggactccaatacaaagtacttccataaactgaacataccaaaactggactttagttctcaggcagatttacggaacgagatcaagacacttctgaaagcggggcacatagcctggaccagcagtggtaaaggttcatggaaatgggcatgtcctagatttagtgatgaaggtacacatgagagtcagatcagttttaccattgaggggcctctgactagttttggtctatccaacaaaattaattccaagcacttgcgggtgaaccagaatctcgtgtatgagtcaggctcattaaatttctccaagttggaaatccagagtcaggtggattctcagcatgttgggcactctgtgctgacagctaagggaatggccctgtttggtgagggaaaggccgagttcacaggccgccatgatgcacacttgaacggaaaagtcattgggactctcaagaattccctttttttttcagcgcagcccttcgaaattacagctagcaccaataatgaaggcaacctgaaggttagattccccctcagactgaccggtaagatcgactttttaaacaactacgccctcttcttatcgccaagtgctcagcaggcttcttggcaggtgagtgctcgttttaaccagtataaatataaccagaatttctctgccggaaacaatgaaaatatcatggaggctcatgtcggcataaacggtgaagctaatctagacttcctgaacatcccgctaaccatccccgaaatgagactcccctacactatcatcacaacaccaccattgaaggacttcagcctgtgggagaagacaggacttaaggaatttctgaagactacgaaacaatcctttgatctcagcgtgaaagcgcagtacaagaagaacaagcaccggcacagcatcacaaacccacttgccgttttatgtgaattcatatcccaatccattaaaagcttcgataggcatttcgagaagaacagaaataatgctctggactttgtgacaaagagctacaacgagacaaaaatcaagttcgataagtataaggcagagaagtcacacgacgagctgccaagaacattccagatcccagggtacacagtccccgttgtcaacgttgaagttagcccctttaccattgagatgagtgcttttggatacgtgttccctaaagccgttagtatgccgtccttttctatactcggctcagatgtgagagtccctagttacacgttaattctgccgtctctcgagttgccagtgttgcacgtgccaagaaatctgaaattatctctgcccgatttcaaggaactttgtacgatctctcatattttcattcctgctatgggcaacatcacctatgatttctccttcaagtccagcgtgattaccctcaacacaaatgcagagctgttcaatcagagtgatatcgtggctcatcttctgagtagctctagtagcgtcattgatgccttgcagtacaagctcgaaggtactacaagactgactcggaaaagaggacttaagctcgcaactgccctatccctgtctaataaattcgtggaagggtcgcataactccaccgtgagcctgacaaccaagaacatggaggtctccgttgccactactaccaaagcgcagatcccgattctacgaatgaatttcaagcaagaactgaatgggaacacaaaaagcaagcctacagttagttccagtatggaatttaaatacgacttcaactcaagcatgctatacagcaccgctaaaggtgcagtagatcataagctctcgctggagtccctgaccagttatttttccatcgaaagttcaactaaaggagatgtcaagggaagtgtcttatcgcgtgaatatagtgggactatcgccagtgaagccaacacctacctgaatagtaagagtacccgatcctctgtgaagctgcagggaacttctaagatcgatgacatctggaacctggaggttaaggagaatttcgccggcgaggctacgctgcaaaggatctactctctctgggagcattcgaccaagaatcatctgcagctggaaggcctgttcttcactaacggagagcacacatcaaaggccaccctcgaactatcaccatggcagatgtcagccttagtgcaggttcacgccagtcagccatctagcttccacgatttccccgacctaggccaggaggtggcactcaacgctaacacaaagaatcagaagattagatggaagaacgaggtccgtatacattctggctcatttcagtcacaggtggagctctctaacgaccaggagaaggcccacttagacattgctggcagcttggagggtcacctccgtttcctgaagaatatcattcttcctgtgtatgataagtctctgtgggactttctcaagctcgacgtcactacaagcattgggagaaggcagcatctcagggttagtaccgccttcgtctatacaaagaatccgaacggttattccttttccattcccgtgaaggttctggctgacaaattcatcatccctggcctgaaactgaacgatctcaactccgtccttgtgatgccaacttttcacgtgccttttaccgaccttcaggtgccatcgtgcaaattggattttcgggagattcagatctataagaagctaagaactagcagtttcgccctgaatcttccaacgctgcctgaggtaaaattccctgaggttgacgttctcactaagtatagtcagcctgaagacagcctgattcctttcttcgagattacagtacctgagagccagctgactgtgtctcagtttactctccctaagagcgtatcagatggcatagccgccctggaccttaacgctgttgcgaataagatcgctgattttgagctgccgacaattattgtccccgagcaaactatcgagatccccagcatcaaattttccgtaccagcaggaatcgttattccctctttccaggctcttactgctagattcgaggttgacagccccgtgtataatgcaacctggagtgctagtctcaagaataaagccgactatgtagagactgtgcttgattccacctgctccagcactgtccagtttttggagtacgagttaaatgttcttggcacacacaagatcgaagatgggaccctcgccagcaagaccaaagggaccttcgcccaccgtgatttcagcgctgagtacgaagaggatggaaagtacgaaggcctccaagagtgggaaggtaaagcgcacctaaacattaagtcgccagcgttcacagatttgcatttgcgataccagaaggacaaaaaggggatctcaactagcgccgcttcccctgccgttgggacggtcggaatggacatggacgaagatgatgattttagcaaatggaatttctattactccccccaatctagccctgataaaaaactgacaatatttaagaccgaattgcgcgtcagagaatctgatgaagagacacagatcaaggttaactgggaggaagaggccgcttccgggctgcttaccagcctgaaagacaatgttccaaaggccaccggcgtactgtacgattacgtcaataaataccactgggagcatacagggttgaccctgcgcgaggtatcatcgaagcttcgtaggaatctgcagaacaacgcggagtgggtctatcaaggcgcgatccgccagattgacgacatcgacgtgagatttcagaaggccgccagcgggacaacaggaacgtaccaggagtggaaagataaggcccagaatttgtaccaggagctgctgactcaggagggacaggcgtctttccagggactgaaagataatgtttttgacggcctagtgcgcgtgactcaggaattccacatgaaagtcaaacatctcatagatagtctcatcgacttcttaaactttccaaggttccaattccctggcaaaccaggaatttatacccgagaggagctgtgcactatgtttattcgagaggtagggaccgttctgtctcaggtttactctaaggtgcataatggctccgagatcctgttttcatactttcaggaccttgtgatcaccctccctttcgagctgagaaagcacaaactgattgatgtcatctcaatgtatagagaactgctcaaggatttgtcgaaggaggcccaggaggtcttcaaggccatacagtccctaaaaactacagaagtactgcgcaatcttcaggatctgctgcagttcatcttccagctgattgaggataatatcaaacaactcaaagagatgaaattcacttacctgatcaactatatacaggacgagatcaacacaatcttcagcgactacattccgtgtttctag

SEQ ID NO: 2345 - DNA, 798 bp, synthetic construct
  misc_feature 1..798: note = source = /note="Description of Artificial Sequence: Synthetic coding sequence"
  source 1..798: mol_type = other DNA
atgaaaaaggaagtctgcagtgtggcctttttaaaagctgtatttgccgaatttcttgccactctgattttcgtgtttttcggattaggctcagctctcaagtggccctctgccttgcctacaatcctccagattgcgctcgccttcggcctggccatcggcacattagctcaggcgttagggcctgtctctggagggcacatcaaccccgcaatcacacttgcactcctcgtgggcaaccaaatctctctgctacgggccttcttttatgtcgcagcccagctggtgggagctattgccggagcgggaattctgtacggtgtcgccccgttgaatgcccgcgggaaccttgctgttaatgccctgaataacaacacaactcagggacaggctatggtagtcgagctgattctaacatttcagctcgccctgtgtatattcgcctccaccgattccagaagaacatcgcccgtgggttcaccagctttatcaatcggactcagcgtgactctgggacacctggttggcatttactttacaggttgcagtatgaaccccgcacgttccttcggtcccgcagttgtgatgaataggttctctccagcccattgggtgttttgggttggaccaattgtgggtgcagtgctggctgctatcctctacttttatctgctgttccctaacagtctcagtctgtcagaacgggtggctataattaaaggcacttatgagcccgacgaggactgggaggagcaacgcgaggaacggaagaaaaccatggaactcaccacccgctag

SEQ ID NO: 2346 - DNA, 993 bp, synthetic construct
  misc_feature 1..993: note = source = /note="Description of Artificial Sequence: Synthetic coding sequence"
  source 1..993: mol_type = other DNA
atgagtgcaaaaagtaggaccattggcataatcggagcccccttttccaagggacaacctagagggggagtagaagagggccccaccgtcttacgtaaagctggcctgctcgagaaactcaaggaacaggtgactcagaactttctgattctggagtgtgacgtaaaggattatggagacctgccattcgcagatattccaaacgacagcccatttcagatcgttaaaaaccctagaagtgtaggtaaggcctccgaacagctcgccggcaaggtcgccgaggtcaagaaaaatgggcggatttctctcgtgttaggaggagatcactccttggctataggcagtatctcaggccatgctagagtgcaccctgacttgggtgtgatttgggtggatgcacacactgacatcaatacacccctcaccacaaccagcggaaacctacacgggcagccagtaagttttctgctcaaagagttgaaaggcaaaatcccagacgtacccggctttagctgggtgaccccctgtattagtgccaaggacatcgtctacatcggcctgagggacgttgatcctggggagcactacattctgaaaactctgggaatcaaatatttctcgatgaccgaggtggatcgattgggcattgggaaagtgatggaggagaccttgtcttatctgctcggtaggaagaagaggccaatacacctgtctttcgatgtcgacggtttggaccccagcttcacaccggccactgggacacctgtggttggcggacttacctacagggaaggcctgtatattactgaggagatatacaagaccgggctgctgtctggccttgatataatggaggtcaatccaagcctcgggaaaaccccggaagaggtgacacgcaccgtaaacactgctgttgcgatcactctggcgtgcttcgggttagcccgagagggcaaccacaagccgatagactaccttaaccccccgaaatag

SEQ ID NO: 2347 - DNA, 969 bp, synthetic construct
  misc_feature 1..969: note = source = /note="Description of Artificial Sequence: Synthetic coding sequence"
  source 1..969: mol_type = other DNA
atgtcagctaaatctagaaccataggaatcataggtgctcctttctcgaagggtcagccgcgtggcggcgtggaggaaggccccacagtcctgcggaaggccggcctgttggaaaagttaaaggaacaggagtgcgatgtcaaggactacggtgatctccccttcgccgatattccgaacgatagtccctttcaaattgtgaagaatcccaggtcagtgggcaaggccagcgagcagttggccgggaaagttgccgaagtcaaaaagaacggccggataagcctagtgttgggaggcgatcattccctcgctattgggtccatatctggacacgcccgcgtgcaccccgacctgggcgttatatgggtggatgcacacactgacattaatacgccactgaccacaacctcaggtaacctccatggacaaccagtgtcttttctcctcaaagagcttaagggcaagatccctgatgtgccaggattcagctgggtcaccccttgtatctccgctaaagacattgtatatatagggctgagagatgttgatcccggtgagcattatatcttgaagacgttaggtatcaaatacttctccatgactgaggtggaccgccttggcatagggaaagtgatggaggagacactttcttacctactgggcaggaagaagaggccaattcacctgtcgtttgatgttgacggactcgacccttccttcacaccagccaccggcacccccgtggttggcggactcacctaccgtgagggtctgtatattacagaagagatttataagacgggcctgcttagcggactggatattatggaggtaaacccctcccttggaaaaacacccgaagaggtgactcgcaccgtaaacactgccgtggcaattaccctggcctgtttcggactggcacgggaaggaaaccacaaacccatcgactacctcaacccacccaaatag

SEQ ID NO: 2348 - DNA, 711 bp, synthetic construct
  misc_feature 1..711: note = source = /note="Description of Artificial Sequence: Synthetic coding sequence"
  source 1..711: mol_type = other DNA
atgtcagctaagtcaaggacgatcggcatcatcggtgcccctttcagtaaaggccagccgcgcggcggtgtagaggagggtcccactgtactgaggaaggcagggttgctagaaaaattgaaggagcaggagtgcgacgtcaaagactacggagacctacccttcgcggacatcccaaatgactccccctttcagatcgtgaagaaccctcgaagcgtggggaaggccagcgagcagctggctggaaaggtcgcggaggttaaaaagaatggtcggatttcgctggttctcgggggcgaccatagtctggctattggtagcatcagcggccatgcccgcgtccaccccgatttgggggtcatttgggtggacgcccacacagacattaataccccgctgacgaccacgagcgggaacctgcatggacagcctgtctcattcttgttaaaggagctaaaaggaaagattcccgatgtgccaggcttttcctgggtcacaccttgtatctctgcaaaggatatcgtatacatcgggctgcgggacgtggatcccggtgaacattacatcctcaagaccctcggaatcaagtatttctcaatgacagaggttacccggacagtcaataccgcggtcgccatcactctggcttgttttggcctggccagagaggggaatcacaagccgattgattacctaaacccaccaaaatag

SEQ ID NO: 2349 - DNA, 1395 bp, synthetic construct
  misc_feature 1..1395: note = source = /note="Description of Artificial Sequence: Synthetic coding sequence"
  source 1..1395: mol_type = other DNA
atggcatcagagtccggtaaactctggggcgggcgctttgtaggcgccgtggaccccatcatggagaagtttaacgccagcattgcctacgataggcacctttgggaagtggatgtacagggctccaaggcttacagccgcggtctggagaaggctgggttactgactaaggctgaaatggaccaaattctgcacggactcgacaaggttgccgaagagtgggcccaaggtaccttcaagctgaattcgaatgacgaagacatccacactgccaatgagcggagattaaaggagttaataggtgcgaccgcaggcaaactacacacggggcggtcaagaaacgaccaggtggttaccgacctaagactgtggatgcgtcaaacctgctccactctcagcgggcttctgtgggaacttataaggacaatggtggatagagcggaagccgaacgcgatgtgctttttccaggatatactcacctgcaaagggctcagcctatacgttggtctcattggatcctctctcatgccgttgctttaacgagagattctgaacggctgctggaggtcaggaagcgaattaacgtactgcctctggggagcggcgctatcgctgggaaccccctcggcgtggaccgcgaattactgcgcgccgaactcaattttggagcgatcactctgaacagtatggacgctacttctgagcgggattttgtggccgagttccttttttgggccagtctgtgcatgacacatttgagccgaatggccgaggatctgatcctttactgcactaaagagttctcgtttgtgcagctcagtgacgcgtactcaactggttcatcgctaatgcctcagaaaaagaatcctgacagcctcgagcttattagatcgaaagccggacgtgtctttggtagatgcgccgggcttttgatgactctaaagggcctaccatcaacctacaacaaggatctccaggaagacaaggaggcagtgtttgaggtgtcagatactatgtccgccgtcttgcaggttgctactggcgtaatctccacgctgcagatccatcaggagaatatgggccaagctttatcccccgatatgctcgccacggacctggcctactacctcgtaagaaaagggatgccattcaggcaggcgcacgaagcctcagggaaggccgtgttcatggccgaaacaaaaggggtagctctgaaccaactgagcttacaagaactccaaaccatctctccgctctttagtggggatgtgatctgcgtgtgggattacggccactctgtcgagcagtacggggctttgggcggaaccgctagatcctctgtggattggcagatcaggcaggtgagagccctgttacaggcccagcaggcatag

SEQ ID NO: 2350 - DNA, 1317 bp, synthetic construct
  misc_feature 1..1317: note = source = /note="Description of Artificial Sequence: Synthetic coding sequence"
  source 1..1317: mol_type = other DNA
atggcgtctgagagcggcaaattatggggggggagatttgtaggagcagtggaccctattatggagaaattcaacgctagtattgcctatgacagacacctgtgggaagtagacgtccagggaagcaaggcatatagcaggggccttgagaaggccggactgctgaccaaagcagaaatggaccagatccttcacggcctcgataaagtggctgaagaatgggcccagggcaccttcaagctaaattctaacgacgaagatattcacacagcgaacgagcgacgactgaaggagctgattggagctactgccggtaagctgcatacaggaagatcacggaatgaccaagtggtcacggatcttagactttggatgaggcaaacgtgttcgactttgtctggtctcctgtgggaactcattagaactatggtggatagggccgaggccgagagagacgtgctctttcctggctatacacatcttcagagggcccagcctattcggtggagtcactggattttatccggagccattgcagggaaccctctgggtgtggaccgcgaactgctaagggcagagctgaacttcggcgccattacccttaattcaatggacgcgacgagcgagcgtgatttcgtcgcggagttccttttttgggcgtccctttgtatgacccatctatcacggatggccgaggaccttattctgtattgcacaaaggaattttcctttgttcagctgtctgatgcttattccacaggctcttcgctgatgcctcagaagaaaaatccggactctctggaattgatccggagcaaggccggccgcgttttcgggcgttgcgccgggctgctaatgactttgaagggattgccgtctacttataacaaggacctgcaggaagacaaagaggctgtgtttgaagtctccgacaccatgagtgccgttcttcaggtcgccactggagtaatctccacactgcagattcaccaagaaaacatggggcaagctctgtcacctgatatgctagctacggacctggcatactaccttgtccgcaaggggatgccctttcgacaggcccacgaggcttctggtaaagccgtcttcatggcagaaacgaagggggtggccttgaatcagttatctttacaggagctgcagactatttcaccactgttttctggcgacgtgatctgcgtctgggattacggtcatagcgtggagcagtatggcgcgctcggcggtaccgctcggtcttctgtggattggcaaattaggcaggttagagcccttctccaggctcagcaggcttag

SEQ ID NO: 2351 - DNA, 1335 bp, synthetic construct
  misc_feature 1..1335: note = source = /note="Description of Artificial Sequence: Synthetic coding sequence"
  source 1..1335: mol_type = other DNA
atggctagtgagtcaggcaagctatggggcggaagattcgttggagcagtcgatcctattatggagaagtttaatgcaagtatcgcatacgatcggcacctctgggaagtcgacgtacagggcagtaaggcatactcaagggggctcgagaaggccggtctcctgaccaaagccgagatggaccagatactccatggattggacaaggtggctgaggagtgggcccagggcacattcaaacttaatagcaatgatgaggacattcatacagcgaatgaaaggaggctgaaggaacttatcggcgcaacagccggtaaactccacactggtaggagtcggaacgaccaagttgtgacagacctgaggctttggatgagacagacttgttctacactttccgggctgctgtgggagctaattcggacaatggtagatcgcgccgaggccgagcgggacgtgctcttcccaggttacactcatttgcagcgcgcgcagcccatcagatggagccactggatcttgtctcacgccgttgcacttaccagggattccgagcggctgttggaagtgagaaaaaggatcaatgttctgcctttagggagcggtgccattgcaggcaaccccctgggggttgatcgtgaactccttcgggcagagctgaactttggtgcaatcactctcaactctatggatgctacaagcgagcgtgactttgtcgctgagttcctgttttgggcctcactgtgcatgacgcacctgagtaggatggccgaagacctgatactgtactgcacaaaagaattctccttcgtgcagcttagtgacgcttattccacagggagtagtttaatgcctcagaagaagaacccagacagtctagagctgatccggtccaaagccggcagggtgttcgggagggaagacaaagaagcagtgttcgaagtatcagacaccatgtccgccgtattgcaggtagctacaggagttatttctacactgcagatccaccaggaaaacatgggtcaggcactgtcaccagacatgttggcaaccgatctcgcatattacttggtccgaaaaggtatgcctttccggcaggctcacgaggcctctggaaaagctgtatttatggccgagactaagggcgttgccctgaatcaactcagcctgcaggaactgcagaccatcagccctctgttctccggcgatgtgatttgcgtgtgggactatggtcactccgtggaacagtacggcgcgctggggggaaccgcacggtcttctgtggactggcaaatccgccaagttcgagctctcctgcaggctcagcaggcctag

SEQ ID NO: 2352 - DNA, 1395 bp, synthetic construct
  misc_feature 1..1395: note = source = /note="Description of Artificial Sequence: Synthetic coding sequence"
  source 1..1395: mol_type = other DNA
atggcatccgagagcggcaaattgtggggcggacgattcgttggtgccgtcgatccgattatggaaaaatttaacgcatcgatagcctacgaccgccatctgtgggaggtagatgtacagggatcaaaggcctatagccgcgggctagaaaaagccgggcttctgacaaaggccgagatggaccagatccttcacggcctggacaaggtagccgaggagtgggctcaggggacatttaagcttaatagtaacgacgaagacattcacaccgcgaacgaacggcggttgaaagagctgattggggcaactgcaggcaaattacacacaggtcggagccggaacgaccaggttgtcacggacctgaggctgtggatgaggcaaacatgttctacattgtctgggctcctctgggagctgattcggacaatggtagatcgtgccgaggccgaacgagacgtcttgtttccaggttacactcacttacaaagggctcagcccatccgttggtcccactggatactgtcccatgccgttgctctgacccgagattccgagagactcctggaggtcaggaaacgcatcaacgttctgcctttaggctccggagctatcgctggcaaccctctgggcgtggacagagagctcctcagggcagagttgaactttggagccatcactctgaatagtatggacgccacaagcgaacgcgatttcgtcgccgagttcctgttctgggccagcctgtgcatgacacacttatctagaatggctgaagacctcatcctgtactgtactaaggagtttagttttgtacagctcagcgacgcctacagcaccggatcctcgttgatgccccagaagaagaatcctgattccctggaactgatacgctcaaaagctggaagggtgttcggcagatgcgctggattgctgatgactttaaaaggactacctagtacgtacaataaggatctgcaggaagacaaagaagcagtgtttgaagtatctgacacaatgtccgccgtcctgcaagtagccaccggcgtgatctccaccttacaaattcaccaagagaacatggggcaggctttgtccccggacatgctcgctactgacctcgcttattacttggtgcgcaagggcatgccctttcgacaggctcacgaggccagtggcaaagctgtattcatggcagaaacgaagggggtggctctgaaccagctctcgctccaagagttacagactatctcccccctcttctctggagacgtgatttgtgtgtgggactacggacactcagttgagcaatacggggctcttgggggcaccgccagaagttcagtggattggcagataaggcaggtaagggctctgctgcaggctcagcaggcatag

SEQ ID NO: 2353 - DNA, 297 bp, synthetic construct
  misc_feature 1..297: note = source = /note="Description of Artificial Sequence: Synthetic coding sequence"
  source 1..297: mol_type = other DNA
atggaaaagtttaacgcttcaattgcttatgacaggcatctctgggaggtagatgtacagggtagtaaggcctattctcggggacttgagaaggctgggctgctaaccaaggctgagatggaccagatattacacggtcttgataaagtggctgaggaatgggcacagggaacatttaagctgaattccaacgacgaagacatacatacagctaatgagcgtagactcaaagagctcatcggagccactgcggggaagctgcatactggccgctctcggaacgatcaggtgttatag

SEQ ID NO: 2354 - DNA, 1239 bp, synthetic construct
  misc_feature 1..1239: note = source = /note="Description of Artificial Sequence: Synthetic coding sequence"
  source 1..1239: mol_type = other DNA
atgagctctaaagggtcagtagtgctcgcatattctggcggcttagacacttcctgcatccttgtgtggctgaaggagcaggggtatgatgtgattgcatatctggccaacattgggcagaaggaggactttgaagaggcacgtaaaaaggccttgaagctgggagccaagaaggtgtttatcgaagacgtgtcacgggaatttgtggaggaattcatctggcccgctattcaaagtagcgccttgtatgaagacaggtatctgctaggaacatctctggcgaggccctgcatcgcgagaaaacaggttgagatcgctcagagggaaggcgcaaagtacgtgagtcacggagctacaggaaaagggaatgaccaggttcgcttcgagctctcctgctactctctcgctccacaaataaaggttatcgcaccttggcggatgcccgagttttataaccgcttcaagggccgaaacgacctaatggagtacgcaaaacagcacgggatacctatccctgtgacgccaaagaacccatggtctatggacgagaatcttatgcatatctcctatgaggccggcattctagagaatccaaagaaccaggccccacccgggctgtatacaaaaacacaggaccccgctaaagcaccgaacacccccgacatcttagagattgaattcaaaaaaggagtaccggtaaaagtgacaaacgtaaaggacgggactactcaccaaacctcactggaactgtttatgtacctgaatgaggttgctggcaagcacggagtcggacgcatcgatattgtggagaaccgatttatcggcatgaaatctcggggaatttatgagacccctgctggtaccattctttatcacgcccaccttgatattgaggcctttactatggaccgagaagtccgcaagatcaagcaggggctcggtctgaagttcgccgagctggtatatactggcttttggcactctcctgagtgtgagttcgttagacattgcattgccaagagtcaggaaagagtggagggcaaggtacaggtgtccgttcttaagggacaggtatacatcctgggtagggaatctccattgtcactctataatgaagaactcgtgtctatgaacgtccagggggactacgagccaactgatgccacaggttttatcaacatcaactctctgcgactgaaggaatatcaccggctgcaaagcaaagtcacggctaagtag

SEQ ID NO: 2355 - DNA, 1239 bp, synthetic construct
  misc_feature 1..1239: note = source = /note="Description of Artificial Sequence: Synthetic coding sequence"
  source 1..1239: mol_type = other DNA
atgtcttctaagggttcagtggtgttggcctactccggaggcttggatacatcgtgtatcttagtctggctgaaagaacaggggtatgacgtcattgcttacctggctaatataggtcagaaagaagatttcgaagaggcgcgcaaaaaggccttaaagttaggagcaaaaaaagtttttattgaggatgtgtcacgcgaatttgtcgaggaattcatctggcctgccattcagtcctcagctctgtacgaggaccggtatcttcttggcacgagcctcgcacggccctgcatcgcccgcaagcaggtcgaaattgcccagcgcgagggcgcaaaatacgtgtcacatggcgccactggaaagggaaatgatcaggtccggttcgaactgagttgctacagtctcgcacctcaaataaaggtgattgcaccttggagaatgcccgagttttataaccgattcaagggccgcaacgacctgatggaatatgccaagcaacacggaatccccatcccagtgactcccaagaatccatggtccatggatgagaatctcatgcatattagctacgaagccggcattctggagaacccaaagaaccaggcccccccaggactctacacgaaaactcaggacccagcaaaggcacccaatactcccgacattctcgagatcgagttcaaaaagggggtgccggtcaaggttaccaatgttaaggacggcacgacccatcagacatctctagagctttttatgtatctgaacgaggtggccggcaaacatggcgtggggcggattgacatcgtggagaacagattcatcgggatgaaatctagggggatttacgagacccctgcagggaccatcctttatcacgctcacctcgacatagaagctttcaccatggaccgggaggtgagaaagattaagcagggactgggcctgaaattcgccgaactggtgtatacaggcttttggcactctccggagtgtgaatttgtgagacactgcattgccaagtcccaggagcgcgtggaggggaaggtccaggtgtcagtcctcaagggccaggtatatatactgggccgcgaaagtcccctctccctctacaatgaagaactggtgagcatgaatgtgcaaggagactatgagcctactgacgctacgggatttatcaatattaattcgctgaggctaaaagagtatcaccgcctgcagtctaaagtgaccgcaaagtag

SEQ ID NO: 2356 - DNA, 510 bp, synthetic construct
  misc_feature 1..510: note = source = /note="Description of Artificial Sequence: Synthetic coding sequence"
  source 1..510: mol_type = other DNA
gaacctggaccactccagcttatggtcgtggctgaggcccagggcggcaaacatggtgtcggtcgcattgacatcgtagagaatagattcattggaatgaagagtcggggcatctatgaaacccccgccgggactatcctgtatcacgcccatttggacatcgaggcttttacaatggaccgagaggtgcggaagatcaaacaaggactgggccttaagtttgctgagctagtatacactgggttttggcatagtccagagtgtgagttcgtgagacattgcattgccaagagccaggaaagagttgaaggtaaggtccaggtgagtgtactaaagggccaagtgtatatcctgggcagagaaagtccattgagtttatacaatgaggaattggttagtatgaacgtccagggggattatgagccaaccgacgctaccggattcatcaacatcaactctttgagattgaaagagtatcatagacttcagagcaaggtgaccgccaagtag

SEQ ID NO: 2357 - DNA, 1239 bp, synthetic construct
  misc_feature 1..1239: note = source = /note="Description of Artificial Sequence: Synthetic coding sequence"
  source 1..1239: mol_type = other DNA
atgagttcaaagggcagcgttgttctggcgtactcgggaggtcttgacacaagctgcattctggtgtggctgaaggagcaggggtatgacgtcatcgcttatctggcaaatatcgggcagaaagaagacttcgaagaggcgcggaaaaaggccctgaagctcggcgctaagaaggtgtttatcgaggacgttagtcgcgagtttgtggaggagtttatatggcccgcgatccagtccagcgcactgtacgaagatcggtacttgttgggaaccagcctggcgcggccttgtatcgcccgtaagcaggtggagattgcgcaacgggagggcgccaagtatgtttctcatggagccactgggaagggtaatgatcaggtccgcttcgaattgtcatgttactcgctggcaccacagatcaaggtgatcgccccttggagaatgccagagttctacaatcgattcaagggcagaaatgacttgatggagtacgccaagcaacatggcatacctattccagtcacgcccaaaaatccctggtccatggatgagaatttgatgcacatttcgtacgaggcaggcatcctcgaaaatcctaaaaatcaggcacctcccggactctataccaaaacgcaggaccctgccaaagctcccaacaccccagacatcctcgagatagagttcaagaaaggggtacctgttaaagtgacaaacgtaaaggacggaacaacccatcaaacctccctcgagcttttcatgtaccttaacgaagtagccggtaagcatggcgtgggtaggatcgatatcgtcgagaaccggtttatagggatgaagtcaaggggcatctacgagacccctgctggcactatcttgtatcacgcgcaccttgatattgaagcttttacaatggacagagaagtccggaagatcaaacaggggctcgggcttaagtttgccgaactcgtttacacggggttctggcactcaccggagtgcgaattcgtgcgtcattgtattgcaaagtctcaagaaagggttgagggtaaggtgcaggtcagtgtgcttaagggtcaagtgtatattctgggtcgggaatctcctctcagcctgtataacgaggagcttgttagcatgaacgttcaaggcgattacgagcctacagacgcaaccggtttcatcaacatcaattcactcagattgaaggagtaccacagactgcaatccaaggtaacggccaagtag

SEQ ID NO: 2358 - DNA, 1239 bp, synthetic construct
  misc_feature 1..1239: note = source = /note="Description of Artificial Sequence: Synthetic coding sequence"
  source 1..1239: mol_type = other DNA
atgagcagtaaaggcagtgtggtcctagcatactctggtggattggatactagttgtattctcgtttggctgaaagagcagggctacgatgtcatcgcctacctggccaacataggccagaaggaggacttcgaggaggccagaaaaaaggccctcaaattaggagcaaaaaaagtgtttatcgaagacgtgtccagagagttcgtggaggagttcatttggcccgcaatccagtccagcgctctttatgaggatcgttacctactcggaacttcactggcccggccttgcatcgcacgcaagcaagtagagatcgcacagcgagagggcgccaaatatgtatctcacggagccaccggtaagggtaatgaccaggttcgattcgagctatcttgttactccttagcaccccagatcaaggttatagccccatggaggatgcctgaattttacaaccgtttcaagggccgaaacgatctgatggagtacgcaaaacagcatgggattccaatcccagtcacccccaaaaacccctggtccatggacgagaacctgatgcatataagttacgaggcgggaatcttggaaaacccaaaaaaccaagctcctcccgggctttacaccaaaacccaagatcccgctaaagctcccaatactcctgacatactcgagatcgagtttaaaaagggtgtgccagtgaaagttaccaacgtgaaggatggcacgacacaccaaaccagtcttgaactcttcatgtacctcaacgaggtcgcgggaaagcatggcgtgggcagaattgacatagtggaaaaccgtttcattggcatgaaaagccggggaatatacgaaacccccgccggaacgattctgtaccacgcacacctggacatagaggccttcactatggaccgagaggtgaggaagattaagcagggactgggcctgaaattcgcggaacttgtatataccggtttctggcattcccctgaatgcgagtttgtccgtcactgcatcgcgaaaagtcaagagagggtcgaggggaaagttcaagtaagcgtgctgaaaggccaggtgtacattttaggccgcgagtctccgctgtccctgtacaatgaagaacttgtgtctatgaatgtgcagggggattacgaacccacagacgctaccggcttcatcaacatcaattccctcagactaaaggaataccatcgcttgcagtctaaagtcacggctaagtag

SEQ ID NO: 2359 - DNA, 597 bp, synthetic construct
  misc_feature 1..597: note = source = /note="Description of Artificial Sequence: Synthetic coding sequence"
  source 1..597: mol_type = other DNA
atgtcctctaaaggcagcgtcgtgctggcttacagcggaggtctcgacacaagttgtattctcgtatggctgaaggagcagggctatgatgtcattgcctatctggccaacatcggccaaaaagaagattttgaggaagccaggaagaaagctctgaagttgggggcaaagaaggtcttcatcgaagacgtgagtcgagagttcgtggaggagttcatctggccggctattcaatcatcagcgttgtacgaggaccggtacctgctgggtaccagcttggcgcggccttgtatagccaggaagcaggttgagattgcacaacgggaaggcgcaaaatacgtgagccacggcgccaccggaaagggtaacgaccaggtacgcttcgaattgtcttgctactccttggccccacagatcaaagttattgcgccgtggaggatgcctgaattctataaccgttttaaagggagaaacgatctgatggagtatgctaagcagcatggcattcctatccccgtgacgcccaagaacccatggagcatggatgagaacctaatgcacatttcctacgaagccggcatcctggagaacccatag

SEQ ID NO: 2360 - DNA, 540 bp, synthetic construct
  misc_feature 1..540: note = source = /note="Description of Artificial Sequence: Synthetic coding sequence"
  source 1..540: mol_type = other DNA
atgtcctcaaagggctcagtggtgctagcctattcaggcgggttagacacctcatgcatactggtttggctgaaagagcagggctatgatgttatcgcctacttagcaaatatcggccagaaggaagattttgaggaggccagaaaaaaagccctcaagttgggtgctaagaaggtgttcatcgaggacgtcagtcgtgaattcgttgaggagttcatctggcccgccatccagtcttccgccttgtacgaagaccggtacctgttaggcactagcttagcccggccttgcattgcgagaaagcaggtggagattgcccagcgggagggcgcaaagtacgtgagccatggtgcaactggtaaagttattgctccatggcgaatgccagagttctataacaggttcaagggaaggaatgacttaatggagtatgctaaacagcacggcattcccatcccagtaaccccgaagaatccgtggagcatggacgagaatctcatgcatatctcttatgaggccggcatactagaaaacccctag

SEQ ID NO: 2361 - DNA, 663 bp, synthetic construct
  misc_feature 1..663: note = source = /note="Description of Artificial Sequence: Synthetic coding sequence"
  source 1..663: mol_type = other DNA
atggaacttgggctgggcgggctgtctactctgagtcactgcccctggccaagacagcagcctgcattgtggcccacattggctgcactcgccctactttcttcagttgccgaagcgagtttggggtcagctcctcggagcccagccccaagggagggtcctccccccgtgctcgcgtcccctgctggacacctaccgggcggtaggaccgcacgttggtgctccgggagggcacggcggcctcctccccagcccagccgccccgctccaccacctcctgccccaccttctgcgctcccacgaggaggcagagcagcaagagcaggaggaccgggctccagagctcgcgccgccggagcccgggggtgtcgtctgagaagtcagctcgtgccggtgagggcattagggctcgggcatcgttccgacgagctggtgaggttccgattctgttcggggtcctgcaggcgggcaagaagtcctcacgatttatccctggcatcacttctgggcgcaggagccctgagaccacccccagggagcagacctgtctcccagccctgctgtcgcccaacgagatacgaggctgtgagtttcatggacgtaaattcgacctggcgaaccgtagaccggctgtctgccaccgcgtgtggttgcttgggttag

SEQ ID NO: 2362 - DNA, 663 bp, synthetic construct
  misc_feature 1..663: note = source = /note="Description of Artificial Sequence: Synthetic coding sequence"
  source 1..663: mol_type = other DNA
atggagctcggtctcggcggtctcagcacactgtcacactgcccatggccccgacaacagccagccttgtggccaacgcttgccgctttggcgcttctgtcttccgtggccgaagctagtctgggatctgccccacgcagtcctgcacctagagagggaccaccacctgtgctggcttccccagcagggcatctgcctgggggtaggacagcccgctggtgttcaggtagagcacgtaggccgcctccccagccctcccgacctgctccgcctccccccgccccaccgagcgctttgcccagaggtggccgggcagcccgggcaggggggccaggctctagggcccgagctgctggagctcgtggatgtagattaaggtcccagctggtcccagtgcgagccctcggactgggccatagaagcgatgagcttgttcgctttcgtttctgttccggctcatgcagacgcgctagatcaccacatgatctgagcctggcaagtctgttgggggctggggccttacgcccaccccctggctctaggccagtcagtcaaccatgctgtcgtcctacacgttacgaagcagtgagtttcatggacgtgaactccacttggcgtactgtagaccgtttaagtgccaccgcgtgcgggtgtctggggtag

SEQ ID NO: 2363 - DNA, 687 bp, synthetic construct
  misc_feature 1..687: note = source = /note="Description of Artificial Sequence: Synthetic coding sequence"
  source 1..687: mol_type = other DNA
atggaactgggcctcgggggcctttccaccctgtcacattgtccgtggccccggcagcaagccccactgggccttagcgctcagccagctttatggcctacattggccgccctggccctgctgagctcagtagcagaggctagtttgggttccgcccctcggtctcctgcaccaagagaagggccaccacccgtgctcgcttctccagccggacacctgccgggtggccgcaccgccaggtggtgttccgggcgtgccaggagacctcccccacaaccctctcgccctgcacctcccccaccagcacctccatcggccctccctcgaggagggagagctgctcgagccggtggaccggggagccgagctagagcagccggcgcccgaggctgtagactgcgttcccagctagtccccgtacgggccctcggcctcggtcatagatccgatgagctggtgcgtttccgcttctgcagcggctcctgccgcagagctcgtagcccgcacgatctgagcttggcctccctcctgggcgccggcgccctgcggcctccccccggaagtagacccgtcagtcagccttgctgtcgacctacaagatatgaggcagtctccttcatggatgtgaactccacatggcgaaccgtcgacaggttgtcagcgaccgcatgtggatgtttgggctag

SEQ ID NO: 2364 - DNA, 201 bp, synthetic construct
  misc_feature 1..201: note = source = /note="Description of Artificial Sequence: Synthetic coding sequence"
  source 1..201: mol_type = other DNA
atggagctgggcctaggagggctgtctacactgtctcactgtccctggcctagacaacagcctgctctgtggccaacgctcgcagcgctggctctgctgtcaagcgtggcggaggccagtctgggcagcgcccctaggtcacccgcacctcgagaagggcctccaccagttctagcctcacccgccggccatttaccctag

SEQ ID NO: 2365 - DNA, 270 bp, synthetic construct
  misc_feature 1..270: note = source = /note="Description of Artificial Sequence: Synthetic coding sequence"
  source 1..270: mol_type = other DNA
atggagctgggcttgggcggtctgtccaccttaagtcattgtccctggcctcgacaacaggcccccctgggcctgagcgcacaaccggcgttatggcccaccttagccgcactcgcactcttatcctccgtagcggaggccagcctaggttctgccccacgatcacccgcccctagagaggggccccccccggtgctcgcgagcccagccgggcatctgccgggcggccgcacagctcggtggtgctctgggagagcaaggcggccctag

SEQ ID NO: 2366 - DNA, 201 bp, synthetic construct
  misc_feature 1..201: note = source = /note="Description of Artificial Sequence: Synthetic coding sequence"
  source 1..201: mol_type = other DNA
atggaactgggactgggaggattgtcgaccttatcacactgcccctggccccgtcaacagcctgccctgtggcccactctggccgcactggcccttctttcctcggtcgctgaagcctcactcgggtctgccccgcggtcacctgccccaagagagggcccaccaccagttctcgcgtctcctgcgggccaccttccctag

SEQ ID NO: 2367 - DNA, 270 bp, synthetic construct
  misc_feature 1..270: note = source = /note="Description of Artificial Sequence: Synthetic coding sequence"
  source 1..270: mol_type = other DNA
atggagcttgggctgggaggccttagcactctgagccattgtccctggccccgtcagcaggcaccactgggtttaagcgcacagccagccctctggcccacccttgccgctttggccctgctgagcagcgtagccgaggccagtctgggcagtgctccacgaagccctgcccccagggaaggccctcctccagtccttgcctcccctgctggccacttacctggcggtcgaaccgcccgatggtgtagcgggagggcgcgtcgcccttag

SEQ ID NO: 2368 - DNA, 687 bp, synthetic construct
  misc_feature 1..687: note = source = /note="Description of Artificial Sequence: Synthetic coding sequence"
  source 1..687: mol_type = other DNA
atggaactcgggttaggcgggctgagcaccctgtcccattgcccatggcccaggcaacaggcgcccctcggactctcggcccaaccagcactctggcctactttggccgctcttgctttactgtcatcagtggcagaagcctcactggggtccgccccacgtagtcctgctccccgcgaaggccctccacctgtgttggccagccccgctggccacctgcctggcggtcgcactgccaggtggtgttccgggcgagcacgcagaccaccccctcagccttctcgtcccgccccaccccctccggcccccccatccgctctgccgcggggtgggcgagctgcgcgggccgggggccctgggtcaagagcccgcgcagcaggcgcccggggctgtagactgcgctcccaacttgtcccagtgagagcccttgggctggggcaccggtccgatgagttggtgcggtttaggttctgctcaggaagttgccgacgcgctaggtccccccacgatttgagcctggcctcactgctgggggcaggggctctgaggcctcccccaggatcccgtcccgtgtcacagccatgctgccgacccacacggtacgaagcagtttcctttatggatgtgaactctacctggcggactgttgatcggctgtcagccaccgcctgtggctgtcttggctag

SEQ ID NO: 2369 - DNA, 1602 bp, synthetic construct
  misc_feature 1..1602: note = source = /note="Description of Artificial Sequence: Synthetic coding sequence"
  source 1..1602: mol_type = other DNA
atggggcctaggggcgctgcgagcttgcctcgcggacccggcccccgtcggctgctgctacccgttgtgctcccattgctgctcctgttactccttgctccacccgggtccggcgccggcgccagtcggccaccgcatctggtttttctcctcgctgacgacctcggctggaatgacgtaggcttccatggcagtagaattcgtactccgcacttggacgcactggcggccgggggcgtgctgctcgataattactatacacaacccctctgcaccccaagccgctctcagctgctgaccggaaggtatcagatcagaaccgggctgcagcaccaaataatttggccctgtcagccaagttgtgtccctctcgacgagaagttgttgcctcagttacttaaagaggccggatacactacccatatggtgggcaaatggcacttgggcatgtacaggaaagagtgcctaccaacaagaagaggtttcgacacctatttcggctacttattaggcagtgaggactattactcacacgaaagatgtacactcatcgatgccttgaatgtcacaagatgtgctctcgatttccgcgatggtgaggaagtggcaaccggatacaagaatatgtattctactaacatctttacaaaaagagctatcgcactgattacgaaccacccacccgagaaacccctgtttctctacctcgccctacagtccgtacacgaaccactccaggttccagaagaatacctgaaaccctatgacttcatccaggataaaaacaggcatcattatgccggtatggtctcattgatggacgaagctgtaggcaatgtcacagcagctctgaagagctccgggttgtggaacaatactgtcttcattttcagtaccgacaacggcggccaaactctggctggcgggaacaattggcccctgagggggcggaagtggtcgctgtgggagggaggggttagaggagtgggatttgtcgctagtccactcttaaagcagaagggcgtcaagaatcgtgaactgatacatatttctgattggctgcctactctagttaagctggctagggggcacaccaacgggactaagcctctggatggctttgacgtatggaagacaatttccgaaggttcaccaagccctagaatagaactgctgcataatattgaccctaacttcgtggattcttccccgtgccctcgcaattccatggctcctgccaaagatgattcgtctctgcccgagtactctgcctttaatacatcagtgcacgccgcaattaggcatggcaactggaagctgctcaccggatatccagggtgcgggtactggttccccccgccaagccaatataatgtgagcgagataccgagcagcgaccctcccactaaaacactgtggctgttcgatatcgatagggacccagaagaaagacatgacctcagccgggagtatccacacatagtaactaagctgctgtcccggctgcagttttatcataaacactctgtgcccgtgtatttccccgcccaagacccccggtgcgatcctaaggctaccggggtgtggggtccttggatgtag

SEQ ID NO: 2370 - DNA, 1602 bp, synthetic construct
  misc_feature 1..1602: note = source = /note="Description of Artificial Sequence: Synthetic coding sequence"
  source 1..1602: mol_type = other DNA
atgggcccccggggggcagcctctttgcccaggggacccggaccgaggcggcttttgcttccagtcgtgctaccgttactgctcctattgctgcttgccccacccggaagtggcgcgggcgcttcgcgcccaccccacttggtattcctgttagccgacgacctggggtggaacgatgtgggctttcatgggtctcggatcaggactcctcacctcgacgcactggcggctggaggcgtgctcttggataattactatacacaaccgctctgtaccccctcaagaagccaacttttgacaggccgataccaaattcgcacgggcttgcaacaccaaatcatctggccttgtcaacccagctgcgtgcctctcgacgagaaactgctgccccagctgctaaaggaagccggatatactacccatatggtcggcaagtggcacctgggaatgtacaggaaggagtgtttacccacacgacgcggatttgatacatactttggatatctgttgggctcagaagattattatagccacgagaggtgtacccttattgatgccctgaatgtcacgcgctgtgctctggacttcagggacggcgaggaagtggcaacaggttacaaaaacatgtatagcaccaacattttcacaaagcgtgcaatcgctctgatcacaaatcaccccccagagaaacctcttttcctttatctggcactgcagtctgtgcatgagcccttacaagtccctgaggaatatcttaaaccctacgacttcatccaggataagaacagacaccattatgcagggatggtttccctaatggatgaagccgtgggcaacgtaaccgctgctctgaagtccagcggcctttggaacaacaccgtttttattttctctacggacaacggcggtcagactttggcaggcgggaataactggcctctcagaggacggaagtggtctctgtgggagggcggggttcgaggggtgggatttgtggcctcacctctattgaagcagaaaggggtgaaaaatcgcgaactgatccacatctccgactggctccctactttggtgaagctggccagaggccataccaacggtacaaaaccactggacggtttcgatgtatggaaaactatctcggagggctcaccttcccccagaattgagcttctgcacaacatagatcctaactttgtggatagcagtccctgtccaagaaatagcatggccccagccaaggatgactcttctctgccagagtatagtgcctttaatacctcagtccacgccgccatccgacacggcaactggaagctgctgaccggttacccaggttgcggttattggtttcctcctcctagtcagtataatgtttcagagatcccctcaagcgaccctcctactaagacactttggctgttcgatattgatcgcgacccggaggaacgccatgacctcagccgcgaatatccacatatcgtgaccaaactactaagccgcctccagttttaccataaacattccgtgccggtttacttccctgcccaggacccaaggtgtgaccctaaggccactggagtctgggggccgtggatgtag

SEQ ID NO: 2371 - DNA, 1242 bp, synthetic construct
  misc_feature 1..1242: note = source = /note="Description of Artificial Sequence: Synthetic coding sequence"
  source 1..1242: mol_type = other DNA
atgggtccacggggtgctgctagcctgccaagagggcccggcccccggcgactattgctccctgtggtcctccctttactgctgcttctgctgcttgccccccccggaagcggggccggcgcttcacggccaccacatctggtgtttttgctcgccgatgacctggggtggaacgacgttggcttccacggttctagaataagaactcctcacctggatgcattagctgccgggggggtcctgctggataactactatactcagcccctgtgcaccccgtcacgcagccagctgctcacgggaaggtatcagattcggactggacttcaacatcagattatttggccttgccagccttcatgtgtccctctggatgagaagctcctgcctcaacttctgaaggaagctggatacaccacacatatggtaggaaagtggcatcttggaatgtaccggaaggagtgccttcccactcgccgcggctttgacacctattttggctacctgctgggatccgaggattattatagccacgagcggtgtaccctaatcgatgctttgaacgtgaccagatgcgccctggatttcagagatggtgaggaggtcgcaactgggtacaagaacatgtactccaccaatatttttacgaagagggctattgctctgataaccaaccatcccccggaaaagcccctttttctgtacctggcactgcagagcgtgcatgaaccccttcaggtgcccgaagagtatttgaagccatatgacttcatacaggataagaataggcaccactatgccggcatggtaagcctcatggacgaggccgtgggcaatgtgacagcagccctgaaaagctccggattgtggaataacacagtcttcatcttctccaccgataatggcggacagacgctggccggaggcaacaactggccactgcgcggacgcaaatggtctctttgggaaggtggagtaaggggcgtcggatttgttgcttcaccgctgctgaagcaaaagggcgtgaagaacagggaattgatacacatttcggattggctccccacccttgtgaaacttgcccggggccacaccaacgggacaaaacctctggacggttttgacgtttggaaaactatttctgagggcagtccatctcctagaatagagctgttacacaacattgaccctaacttcgtagattcatccccctactggcccgaatgctccttgctcctctag

SEQ ID NO: 2372 - DNA, 138 bp, synthetic construct
  misc_feature 1..138: note = source = /note="Description of Artificial Sequence: Synthetic coding sequence"
  source 1..138: mol_type = other DNA
atgggtccccgtggggccgcctccctacctcgtggtcctggacctcgccgcctgctgctgccagtggtcctgcccctgctcctcttgttgctcctggctccccctgggtcgggagctggagcctcgcgacccccctag

SEQ ID NO: 2373 - DNA, 1788 bp, synthetic construct
  misc_feature 1..1788: note = source = /note="Description of Artificial Sequence: Synthetic coding sequence"
  source 1..1788: mol_type = other DNA
atggcaggcccaagtccccctcttcgagctggcgtggggagacgacttctaggggttgcacatccggatctgaggccatgtttatgcggcgaattacaggtggagggaggcccaggccccgtgcccggaatgttacggacttgctacgtcaggtctccctggagacgtggaccctcatcagccaggggtgagcagtccggaagcggtcacctcgaacaagaggaggtgcagtcaggcagcctgttgtttcgcttgctcctttttttgtccagatctccagccagtagaaatcagaggatcttgtatacagtgctggaatgtcagccactattcgattcaagtgatatgacaattgcagaatgggtgtgtctggcacagaccattaagcgacactacgagcagtaccacggcttcgttgtgatacacggcacagacaccatggcattcgctgcatccatgttaagctttatgttagagaatttgcagaagacagtaatactcacaggcgcccaggtgcccattcacgccttatggagcgacggccgcgagaacctgctgggtgcactgttgatggctggtcaatatgtgatcccagaagtatgcttgttcttccaaaaccagttatttagaggcaaccgagccacaaaggttgatgcaagaaggtttgccgccttttgtagtccgaacctgctgcccctggctacagtgggcgcggacataaccataaacagagaactggtccgaaaggtcgacggaaaggcaggactagtagtgcatagcagtatggagcaagacgtcggcctcctaagactttacccaggaataccggcagccttggtgagagcttttttgcagcctccattgaagggagtcgtcatggaaacatttgggtcgggaaacgggcccaccaagcctgatctattacaggaactgagggtcgcaacagagagggggctcgtgatcgtgaattgcacccattgcctgcagggagctgtgaccaccgactacgcagccggtatggcgatggcgggagccggggtaataagcggcttcgatatgacctccgaggccgcgcttgcgaaactgtcctacgtcctcgggcaacccggtctgagcctggatgtgcggaaagagctgctcacaaaggatctgcggggtgagatgacccccccatctgtggaggagcggaggccttctctccagggaaacactctggggggcggagtgagctggctgctcagcctgagcggctcacaggaagctgatgccctgcgcaatgctctggttccttcgttggcttgtgccgcagcccatgctggtgacgtggaagccttgcaagccctcgtcgagcttgggtctgatctcggtttagtggattttaacggccaaacacctctgcatgcagcagcgcgcggtgggcatacagaagctgttacaatgctccttcagaggggcgtcgatgtgaacacaagagataccgatggcttctcccctctgcttctggctgtcagaggccgtcaccctggcgtcattggcttgctcagggaggccggcgcaagtctaagcacgcaggagctggaagaagcgggtaccgagctttgccgactcgcctacagagccgatttggaaggcttacaggtgtggtggcaggcgggagcggacttgggccagcctggctacgacgggcactcagctctgcacgttgccgaggctgctgggaatctcgcggtggttgcgttcctgcagtcattggagggagcagtgggagctcaggcgccttgtccctag

SEQ ID NO: 2374 - DNA, 1740 bp, synthetic construct
  misc_feature 1..1740: note = source = /note="Description of Artificial Sequence: Synthetic coding sequence"
  source 1..1740: mol_type = other DNA
atggctagggcggttggtccggagaggcgactcctggctgtgtataccgggggcactattggaatgaggtctgagttgggggttctggtgcctggcaccggtctagccgcaattctacggacactgcccatgtttcacgacgaggaacacgcccgcgccagaggcctgagcgaggataccctcgtgctccctccagcgagccggaatcagcgaatcttgtataccgtgcttgaatgccaaccactgttcgactcatctgacatgactatcgccgagtgggtgtgtctggcccagaccattaagcgacactatgagcagtatcacgggtttgtcgtaatacacgggacggataccatggcctttgctgcgtctatgttgtcattcatgctagagaacttgcagaaaaccgtaattttaacaggcgcacaggtgcccatacacgccctttggtccgatggaagggagaacctactgggagccctccttatggcgggacagtacgtcatcccagaagtgtgtctgttttttcagaaccagctgttcagagggaatcgagccacaaaggtcgacgccaggcgatttgcagccttttgtagcccgaacctcctcccattagcgaccgtaggagcggatatcacaattaaccgggaattggtgcggaaggtcgatggaaaggcggggctggttgtacattcatcaatggagcaagatgtgggcctgttaagactttaccccggaatccctgccgccctggtgcgcgccttcctgcagcctcctctcaagggggtcgtaatggaaactttcggcagtggcaacggaccaaccaagccagatctgctccaggaactccgcgtggcgacagaacgcggactcgtcatcgtcaattgtactcactgcttacagggagctgtgaccaccgactatgcagccggaatggccatggccggcgccggcgtgattagtggcttcgatatgacaagtgaagctgcactagcgaagctcagctacgtcctgggccagcccgggttatctttggacgtgagaaaggagctcctcactaaggatttgcgaggtgaaatgaccccaccatctgtcgaagaacggcgcccatcactacaggggaatacactgggcggtggggtttcctggctgctgagcttgagcggctcccaggaagcagacgccttgcggaatgccctggtgccatccctggcctgtgccgcagcacacgcgggggacgtggaggcactgcaggccctagttgaactgggatctgacttaggtctggtagacttcaatgggcagacaccactgcacgcggctgccaggggtgggcacacggaagcagtcacaatgctcctccaacgaggcgtcgatgtgaatacccgtgacaccgatggattttctccactcctgctggccgttagaggcaggcaccctggggtgattggcctgttgagggaggccggagcaagtcttagtacgcaggagctggaggaagccggaacggaattgtgtcggctggcttaccgcgcagacttggaaggcctccaggtgtggtggcaggcaggggcagacttaggtcagcctgggtacgacggtcactctgcgttacatgtagctgaggctgccggcaatctggctgtggtggcgtttctccaatcgctagagggagcagtgggcgcccaagctccgtgccccgagccatcctgcttccaggaggtgctgcccggcgtgtag

SEQ ID NO: 2375 - DNA, 423 bp, synthetic construct
  misc_feature 1..423: note = source = /note="Description of Artificial Sequence: Synthetic coding sequence"
  source 1..423: mol_type = other DNA
gccgctgcgaggggagggcacacagaggcagtaacgatgcttctccaacggggagtggacgtgaataccagggatactgacggattctctccacttcttctggccgttcgtgggagacatcccggtgtgatcggtctgctcagggaagccggcgcaagccttagcactcaggagcttgaggaggccgggactgaattgtgtcggctggcataccgagctgaccttgagggactgcaagtgtggtggcaggcaggggctgatctagggcagccggggtacgatggacactccgcacttcacgtagcggaggccgctgggaatctggccgtggtggccttcttgcagtcgttagagggggcagtgggagcccaggcaccctgccctgagccatcatgttttcaagaggtgcttccaggggtgtag

SEQ ID NO: 2376 - DNA, 1722 bp, synthetic construct
  misc_feature 1..1722: note = source = /note="Description of Artificial Sequence: Synthetic coding sequence"
  source 1..1722: mol_type = other DNA
atggcccgggccgtgggcccagaacggcggctcctagcagtgtatactgggggtaccatcgggatgcgctctgagcttggagtgctggtccctggtacagggctcgctgctatactccggaccctgcccatgtttcatgacgaggaacacgctagggcccgaggcctgtctgaagatactcttgtcctcccaccagcgagcaggaaccaaaggattttatacacagtcctcgaatgccagcccctgtttgacagcagtgacatgacaatcgctgagtgggtgtgtctggcgcaaactattaagcggcattatgaacagtatcatggctttgtggtgattcacggtacagatacaatggcatttgccgctagcatgttgtccttcatgcttgaaaacctgcaaaaaactgtgattctaaccggagcgcaggtccccattcacgccttatggagtgatgggcgggagaacctgttgggggcactgcttatggcagggcaatacgttattcctgaggtgtgtctgtttttccagaatcaactcttccgcggaaatagggcaacaaaggtggacgcccgtcgtttcgccgctttttgttctcctaatctactgcctttggcaaccgtcggggccgacattacgatcaaccgagaattggtgagaaaggtggacgggaaggccggactggtagtccacagcagtatggagcaggacgtagggcttctgcgcctctaccccggcatccccgctgcgctagtgcgcgcctttctgcaacccccccttaagggagtggtgatggaaacctttggctccggcaacggacccacaaagccagacctcttacaggaactccgggttgccactgagcgtggcctggtgatcgtcaactgcacccattgtttgcagggggctgtgactaccgattacgcagccgggatggccatggcaggagctggtgtgataagcggatttgacatgacaagcgaggccgctctggctaaactctcctacgttctggggcagcccgggctcagtctagacgtacggaaggaactgctcactaaagacctccgtggtgagatgacccctccatcagttgaggagcggagaccaagtcttcaaggcaatacacttggcgggggcgtgtcttggcttctttctctcagcggttctcaagaggccgacgcactgaggaatgccctggtgccttctcttgcttgcgccgcggcccacgcgggtgacgtcgaagccttacaagctctggtggaactcggttcagacctgggccttgtggactttaatggccagacccccctgcacgccgccgcgcgtgggggacacactgaagcagttacgatgctgctacaaaggggcgtcgacgtaaatacacgcgacacagacggattttcgccgctgctcctcgcagtcaggggtcgtcatcccggcgttatcggactgctccgggaggctggcgcatcactgtcaacacaggaactcgaggaagccggtacagaactctgtcgcctggcttatagagctgacctggaaggcctgcaggtatggtggcaggccggtgcagatctcggccagcctggttacgacggccacagcgctctgcacgtcgccgaagctgcgggcaatctagctgtcgtggctttcctccaatccctcgagggagcagttggggcccaggcgccctgcccagaagttctgcccggggtatag

SEQ ID NO: 2377 - DNA, 942 bp, synthetic construct
  misc_feature 1..942: note = source = /note="Description of Artificial Sequence: Synthetic coding sequence"
  source 1..942: mol_type = other DNA
atgacctcctgccacatcgccgaggaacacattcagaaggtggccatatttggcggcacccatgggaacgagttaaccggcgtatttctggttaagcactggctagaaaacggggctgagattcagcgcaccggcctcgaagtgaagccttttatcacaaacccccgtgccgtgaagaaatgcactagatacatcgactgtgatttgaacagaatcttcgacctcgaaaacctcggcaagaaaatgtctgaggatcttccgtatgaggtcagacgcgctcaagaaatcaatcacctgttcgggccaaaggactctgaggacagctacgatattatctttgatctgcacaacactaccagcaatatgggatgcacactgatccttgaagattcccggaataacttcctgattcagatgttccactatataaagacctccctagcccctctcccatgctacgtgtacttaatcgaacatccctcactgaagtatgccaccactagaagcattgcaaagtatccggtgggtatcgaggtagggccccagcctcagggtgttttgcgcgcggatattcttgaccaaatgagaaagatgattaagcatgctctcgatttcattcaccactttaatgagggcaaggagttccccccctgtgccattgaggtgtataaaatcattgagaaagtggactaccccagggatgagaatggagagatcgctgcaattattcaccccaacctgcaggaccaagactggaaaccccttcaccctggggatcccatgttcctcaccctggatggcaaaacaatcccactcggaggtgactgtacagtatatcctgtattcgtcaatgaggccgcttattacgagaagaaagaggcattcgcaaaaacgacaaagctgaccctcaacgcaaaatctattagatgctgcctacactag

SEQ ID NO: 2378 - DNA, 942 bp, synthetic construct
  misc_feature 1..942: note = source = /note="Description of Artificial Sequence: Synthetic coding sequence"
  source 1..942: mol_type = other DNA
atgacctcctgccacatagccgaggagcatattcagaaggtggccatcttcggcggtactcatggcaacgagcttaccggcgtgttcttagtgaagcactggttagagaacggggcagaaattcagagaaccggcctagaggtgaagcctttcatcacaaatccccgggctgtgaagaagtgcacccgatacattgactgtgacctcaacaggatctttgatctggagaacctgggtaagaaaatgagtgaagacttgccttacgaggttaggagggcccaggagattaaccatctgttcggacctaaggatagcgaggatagctatgatatcatttttgatttacataacacaactagcaacatggggtgcactttgatcctcgaagatagccgtaataacttcctgattcaaatgtttcattacattaagacaagtctggctccattgccatgttatgtctacttaatcgagcatccgtccttgaaatacgctaccacaaggtcaattgccaagtatcctgtgggcattgaggtggggcctcaacctcagggcgtactcagggcggacattctggatcagatgcgaaaaatgatcaagcacgcactcgactttatccatcactttaacgaaggcaaggaatttcctccatgcgcaatcgaggtttataaaatcatcgagaaggtggattaccctagagacgagaatggagagattgccgccatcatccaccccaatctacaggaccaggactggaagccattgcaccctggcgatcccatgtttctaaccctggacggaaaaactatccccctcgggggcgattgcactgtgtatcctgtcttcgtcaacgaggctgcctactacgagaagaaggaagccttcgctaaaaccactaaactaacactgaatgcaaaatccatcagatgctgtcttcattag

SEQ ID NO: 2379 - DNA, 3756 bp, synthetic construct
  misc_feature 1..3756: note = source = /note="Description of Artificial Sequence: Synthetic coding sequence"
  source 1..3756: mol_type = other DNA
atgtcaaccgaacgcgactctgagacaacgttcgacgaggactctcagcccaatgatgaagtggtcccctattctgacgacgagaccgaagatgagctcgatgatcagggatcagccgtagagcccgaacaaaaccgcgtcaacagggaggccgaagagaatagggaaccctttcgcaaagaatgtacatggcaggttaaggccaacgatcggaaatatcacgagcagccacatttcatgaacactaaattcctatgcatcaaggaaagtaagtacgcaaataacgccataaagacatacaagtacaatgcgttcactttcatacccatgaacctgtttgagcagtttaagagggcagccaatctgtacttcttggccctgttaatcctgcaagccgttcctcagatttcaacactcgcctggtatacgacactggtgcccctgctggtcgtcctgggagtgaccgccattaaagatctcgtggatgatgtggcccgacacaagatggacaaggaaatcaataatcgcacatgcgaggttataaaggatggtagatttaaagtggcaaagtggaaggagattcaagtgggtgatgtcatccggctgaaaaagaatgatttcgtgccagcggatattctgctcctgtctagcagcgagccaaattcgctttgctacgtagagactgcagaattggacggcgagaccaacttgaagtttaaaatgagcttggagattacagaccagtatctgcagagggaggatactcttgctacttttgatggctttatcgaatgcgaggaacctaataaccgcctggataaattcactggaacattgttctggagaaacaccagctttccattagatgctgataagatcttactgcggggttgcgttatccgcaacaccgacttctgtcacggtctcgtgatcttcgccggggccgataccaagatcatgaaaaacagtggtaaaaccagattcaaaagaactaagattgattacttaatgaactacatggtttacactatcttcgtggtactgatccttctctcagccggactcgccatcggccatgcctattgggaggctcaagtgggcaactcctcctggtatctatatgacggcgaggatgacacgcctagctaccgcggatttctgatcttctggggatatataatcgttctcaacacgatggtgcctatatccttgtatgttagtgttgaagtgatacggctgggacagtcacatttcattaactgggacctacagatgtactatgcagaaaaagacaccccggctaaggcccgcacgactaccctgaatgaacagctcgggcagattcactacatctttagcgacaagactggcactttgacacagaacattatgaccttcaaaaaatgttgcatcaatggccaaatttatggggatcaccgagatgcgagccaacacaaccacaacaagatcgagcaggtggacttttcatggaacacctacgcagacggaaaactggctttctacgaccactacctgatcgaacagatccagtcgggtaaagagccggaggtgagacagttcttctttcttctggctgtgtgtcatactgttatggtggacaggaccgatgggcaattgaattaccaggccgcgagtcccgacgaaggggcgctcgtgaatgcagcccgaaatttcggctttgcctttctggccaggacacagaatacaatcacaattagtgagctggggacagaacggacctataatgtccttgcaattcttgattttaattctgaccggaaacggatgagcattattgttcggacacctgagggtaatatcaagctctactgtaagggcgccgacacagtgatctacgagaggcttcaccgtatgaacccaaccaaacaagaaactcaagatgctttagacatttttgccaatgagactctgagaactctttgtctgtgctacaaagaaatcgaagagaaggagtttaccgagtggaacaagaagtttatggcggcgtcagtggcttcaaccaaccgagacgaggcgctggataaagtgtatgaggagattgaaaaggacctcattttactgggcgcgacagcaattgaggataagttgcaggatggggtacccgagaccatctcaaagctggctaaggccgacattaaaatttgggtcttgaccggagacaaaaaagagaccgctgaaaatatcggatttgcgtgtgaactcctcactgaggacacaactatctgttacggggaggacattaactcccttttacatgctcgaatggagaaccagcggaatagaggcggcgtttacgccaagttcgcacctccggttcaggagagcttcttcccaccaggaggaaatagagcactgatcatcactggttcttggctgaatgaaatcctcctggaaaagaagacaaaacggaataagattctcaagctgaaattccctagaaccgaggaggagagacgcatgaggacacagtcaaaacgacggttagaggccaagaaggagcagagacagaaaaattttgtggatctggcatgcgaatgctcggctgtgatttgttgccgggtgactcctaagcagaaagccatggttgtggaccttgtgaagcgctacaaaaaggcgataacactcgccataggcgacggtgccaatgacgtgaatatgatcaaaacagcccacatcggcgtggggatctcagggcaggaggggatgcaggctgtcatgtcatcagactactctttcgcccaatttaggtatttgcagcgcctgcttctggtgcatggtaggtggagttatatcagaatgtgcaaattcctgcggtatttcttctacaagaattttgcattcaccctggttcacttttggtactccttcttcaacggttacagtgcccagaccgcttatgaagactggtttattaccctttacaacgtgttgtacacaagtctgccagttctgctaatgggacttctggaccaggatgtgtccgataagctgtccctccgctttcctggactttacatcgtcgggcagcgcgatcttctgttcaactataagcgatttttcgtgtctctgttgcatggagtacttacgtccatgattctgttctttattcctttgggagcttatctacaaaccgtaggacaggacggcgaggccccatccgattatcagagcttcgccgtgactatcgcgagcgcccttgtcattaccgtgaatttccagatcggattggatacctcctactggacatttgtgaatgcgttctcaatattcggatctatcgccctgtattttggcatcatgttcgacttccacagcgcggggattcatgtgttgtttccatctgcattccaattcaccggaacggcttctaacgctctccgacagccctacatttggcttaccataatactggccgtcgcagtatgcctgctacctgttgtagctattagattcttgtccatgacgatctggccctccgagagtgacaaaattcagaagcaccggaaacgcctgaaagccgaggagcagtggcaaagaaggcagcaagtgtttcgtcggggtgtgagtacccggaggtctgcatatgccttctctcatcagagagggtatgccgatctaatttctagtggcagatctattcggaagaaacgctcacccttagacgccattgtggcagacggcaccgccgagtatcggcgaaccggcgatagctag

SEQ ID NO: 2380 - DNA, 3756 bp, synthetic construct
  misc_feature 1..3756: note = source = /note="Description of Artificial Sequence: Synthetic coding sequence"
  source 1..3756: mol_type = other DNA
atgtccaccgaaagggacagtgaaacgacttttgacgaagacagccagcccaatgatgaagtggtgccgtactcggacgacgaaacggaggacgagctcgacgaccaagggtctgctgtcgagcctgagcaaaatagagttaaccgggaggccgaggaaaaccgcgagccgttccgaaaggaatgtacatggcaagtgaaagcgaacgatagaaagtaccacgagcaaccccactttatgaataccaagttcctctgtattaaggagagcaagtatgccaacaacgccattaagacctataaatacaacgcattcacatttatccccatgaacctgtttgaacagtttaagcgtgcagccaacttgtacttcctggctctgctgatactgcaggccgtccctcagatatctaccctcgcatggtacacgacattggtcccactgctggtcgtgctcggagtgaccgctataaaggacctggttgacgacgtggcgcggcataaaatggataaagaaatcaataaccgaacatgtgaggtcatcaaggacggtaggttcaaggttgctaaatggaaggagatccaggtgggagacgttatccgattaaagaagaacgatttcgttcctgctgacatcctcctactctcaagcagcgaaccaaatagcctgtgttacgtggaaacagccgaattggacggcgaaactaacctcaagtttaaaatgagcctggaaatcacagaccaatacctccagcgggaggacacattggcaacattcgacggtttcattgagtgtgaggagccaaataaccgcctggataagttcactggcacactgttttggcggaatacaagctttccgctggacgccgacaagattctcctgcgcggctgcgtgatccgaaacactgacttttgtcacggattagtgattttcgctggagccgacacaaaaatcatgaaaaactcaggcaagacaagatttaaaagaactaaaattgattaccttatgaattatatggtatacacaatcttcgtggtgctgatcctgttgagcgcgggcttggctattgggcacgcctattgggaggcacaagttggaaactcctcatggtacctgtacgatggtgaggacgacactccaagctacagaggtttccttattttctggggttatattatagtgctgaatacaatggtacctatttctctctatgtgtctgtggaggtcattcggcttggtcagagccacttcattaattgggacttacaaatgtactatgccgaaaaggacacacccgcgaaggctcggaccacaacccttaatgagcagctcgggcaaatacattacatctttagcgacaagacaggcactctcactcaaaacataatgactttcaagaagtgttgtatcaacggccagatttacggtgatcaccgggatgcttcgcagcataaccataataaaattgagcaggtggacttcagctggaacacttatgccgacggaaaactcgctttctatgatcactatctaatcgagcaaatccagagcggaaaagaacccgaggtcagacaattttttttcctactcgccgtgtgccacaccgtgatggttgaccgcactgacggtcaactcaactaccaggccgcctcacctgatgagggcgctcttgtcaatgccgcaaggaacttcggatttgctttcctcgctcgaactcagaatacgattaccatcagcgaattgggaacggaacgcacttacaatgttctggccatcttggatttcaacagcgaccgcaagcgtatgtcaataatcgtcaggacacctgaaggaaacattaaattatattgtaaaggggccgatacagtcatctacgaacgcttgcaccggatgaatcctaccaagcaggagacacaggatgctctggacatcttcgccaatgagaccttgcgtactttgtgcctgtgctacaaggagatcgaggagaaggagtttacagagtggaacaaaaagtttatggcggccagtgttgctagcactaacagagatgaggccctagacaaggtctacgaagaaattgagaaggacttgattcttctgggggccacagctatcgaagacaagctccaagacggcgtccccgaaactatttctaagctcgccaaagccgatatcaagatctgggtgctcacaggagataaaaaagagacagctgaaaatatcgggtttgcgtgtgagctgctcacagaagacaccactatctgttacggagaggatatcaactctctacttcatgcaagaatggaaaatcaacgcaatagaggtggcgtttacgctaaattcgccccccctgttcaggagtccttttttccgcctggaggcaacagagctcttattattacagggtcctggttgaatgagatcctgttagaaaagaaaaccaagcggaataagatcctgaaacttaaatttcctcggacggaagaagagcgtcggatgaggacccagtctaagcgtagactcgaagccaagaaagaacagagacagaaaaattttgttgacctcgcttgcgagtgctccgccgttatctgctgccgggtgacccccaaacaaaaggccatggtcgtggacctggtcaaacgctataaaaaggctataaccctggctatcggggatggtgctaacgatgtcaatatgattaagactgcccacatcggggttggtatcagcggccaggagggtatgcaggccgtaatgtcttcggactactcattcgcccagttcaggtacctgcagcgcctgctgctagtgcacggaaggtggagctacatcaggatgtgtaagtttctccgatattttttttacaaaaattttgcctttacactggtccatttttggtatagtttctttaacggatatagcgcacaaacagcctatgaagactggtttattactctatacaacgttttgtacacttctctgcccgtcctcctgatgggcctgctggatcaggacgtcagcgataagctgagcctgcgattcccaggtctgtacattgtcggacaaagggacttgctgtttaattacaagcgcttctttgtcagcttgctgcacggggtcctgacatcaatgatacttttttttatacccctcggagcttatctccagacagtcggccaggatggagaagcgcccagcgactaccaatcttttgcggttacaatcgcctcggccctcgtgattacagtaaacttccagatcggcctggacacttcttactggacgttcgttaatgcattctcaatctttggttcgattgccttgtacttcggcatcatgttcgacttccactccgctgggatccacgtgttgttcccttcagcctttcaattcacaggcacagccagtaacgcccttagacagccctatatctggttgactattatcctcgcagtggcagtatgcctgttgccggttgtcgcaattaggtttctgagcatgaccatctggccatccgaaagcgataagatccagaagcacaggaagagactgaaggctgaggaacagtggcagagaaggcagcaggtgttcaggcgtggggtgagcactagaaggtctgcctatgctttttcccaccagcgcggctatgctgatctaatctcctccggacggtctattagaaagaaacggtctccactggacgccattgtggctgacggcaccgccgagtacaggcggacaggcgattcatag

SEQ ID NO: 2381 - DNA, 4398 bp, synthetic construct
  misc_feature 1..4398: note = source = /note="Description of Artificial Sequence: Synthetic coding sequence"
  source 1..4398: mol_type = other DNA
atgccggaacaggaacgtcagatcaccgccagggaaggggccagtcgtaaaatactctccaagctctccttaccaaccagggcatgggagccagcaatgaagaaaagcttcgcttttgataacgtaggctacgagggcggccttgacggactgggtccttcctcccaggtggcaactagtacagttcggattttgggaatgacatgtcagagttgcgtgaagagtatcgaggataggatcagtaacctgaagggaatcattagcatgaaagtatccctggagcaggggtcagccacagtgaagtacgtgccgtctgtcgtctgcctgcagcaagtttgccaccagataggagacatgggtttcgaggctagtatcgcagagggcaaagccgcctcatggccctctcggtctctacctgcacaggaagcggtggttaagttgagggtcgagggaatgacatgccaatcgtgtgtgagtagtatagaaggtaaggtgaggaagctgcagggcgtggtgcgggtgaaagtgtcactgagcaaccaggaggcggtcatcacataccaaccttaccttattcagcccgaggatctacgagaccatgttaatgatatgggctttgaggcagccatcaaatccaaagtggcgccactgtccttgggacccattgatatcgaacgactccaaagcacaaaccccaaaaggccactgagcagtgccaatcagaacttcaacaattccgaaaccctgggtcatcaggggtctcacgtcgttacactgcagttgcgaattgatggaatgcactgcaagagctgtgtcttgaatatcgaagaaaatatcggacagctcctgggcgtgcagtctattcaggtgagtcttgagaataaaacagcccaggtaaagtatgacccaagctgtactagccctgttgccctgcagcgagccattgaagctttaccgccagggaactttaaggtcagccttccagacggcgcagagggttccggcactgaccaccgttcatcaagtagtcatagcccagggagtccaccacggaaccaggtgcaggggacatgctccaccacactcatcgcaattgccggtatgacatgcgcttcgtgtgtgcattctatcgaagggatgatctcacagctagaaggcgttcagcagatttctgtgtccctggctgaaggaaccgctactgtgctctacaatccttccgtaatctcccccgaggagctcagggccgcaatcgaagatatgggatttgaggcgtcagttgtgagtgaaagctgtagcactaaccctctgggcaaccactccgccgggaacagcatggttcaaactacggacggtacaccaacctcggttcaggaggtggctccacatactggccgtctgccagccaatcacgccccagatatcctggcaaagtcgccccagtcaaccagggctgtcgccccacagaagtgcttcttgcaaatcaaaggaatgacctgcgcttcttgtgtgtccaatatagaacgcaacctccaaaaagaagcgggagtgctcagcgtgttggtagccttaatggcagggaaggccgaaattaagtacgaccctgaagtgatccagccactggaaatcgcgcagtttatccaggacctcgggtttgaagcagctgtcatggaggattacgcaggctcagatggcaatatcgagctgacgataacaggaatgacatgcgcctcctgtgtgcataacatagaatctaaactcacccggaccaatggcatcacctatgcttccgtggctctcgctacttcgaaggccctggtgaagttcgaccctgaaattataggtccaagggatatcatcaaaatcatagaggagattgggtttcatgccagtctcgctcaacggaaccctaatgcacaccacctggaccacaagatggaaattaaacagtggaagaaaagcttcctttgtagtctggtgtttggaatccctgtcatggcgctgatgatttacatgctgatccccagcaacgagccccaccagtcaatggtgcttgatcacaacataatcccaggtctgagcatcctcaatttgatcttctttatcctgtgtaccttcgtgcaactgcttggcggctggtacttctacgttcaagcctataagtcgcttcggcatcgctctgctaatatggacgtgttgatagtgttggccaccagtattgcttacgtttactcccttgtcatcctagttgtggccgttgcggaaaaggctgagcgaagtcctgtgaccttcttcgatacacctccgatgctgtttgtctttattgccctggggaggtggctggagcacttagcaaagagcaagaccagcgaggccctggccaagctgatgtccctccaagcaactgaggcaaccgtggttaccctcggcgaagataatttgataattcgggaggaacaggtcccaatggaattggtacagaggggcgacatcgtgaaagtcgttcccggaggtaaatttcccgttgacggcaaggtcctggaggggaacaccatggcagacgagtctttaattaccggcgaagccatgccagtaactaagaagcccggctccaccgtgattgctggttctataaatgcccacggcagcgtactcataaaagctacccatgtcggaaacgacactacactagcccagatagttaagctcgtcgaggaggcgcagatgtctaaagcgcccatccagcagctcgccgaccggttttctggatacttcgtcccatttattattatcatgtccactctaaccctagtagtgtggatcgtgatcggctttatcgacttcggcgtagtccagcgttattttcccaaccccaacaagcacatttcccagacagaagtgattattcggttcgcatttcaaacctccatcactgtgctatgcatagcatgtccgtgtagtcttggcctggccactcccacagccgtgatggtgggcaccggtgtcgcagcccagaacggaatcctcattaagggcggaaagccattagagatggcccacaagatcaagacagtcatgtttgataaaacaggcaccatcacccatggtgtaccacgagtgatgcgagtgttactcttaggggatgtagcgacacttccactgcgtaaagtactagcggtggttggcactgccgaagccagcagcgaacacccactgggagtggcagtcacaaagtactgtaaggaagaacttgggaccgaaactctgggctattgcaccgatttccaagccgttccaggctgcgggattgggtgtaaagttagcaacgtggagggcattctggcccattccgagagaccgctgtcagctccagccagtcacctaaatgaagccggttcactgcctgcagagaaggacgcagtcccccaaaccttcagtgtgctgatcgggaaccgggagtggctacgccgcaatggtcttaccatcagtagtgacgtttccgatgctatgacagaccatgagatgaaaggacaaacagccatacttgtggccatcgatggggtgttgtgcggtatgatcgctattgccgacgctgtgaaacaggaagccgctctcgcagtccacactttgcagtcaatgggtgtggacgtggtcctgatcaccggagacaatagaaagactgcacgggcaatcgcaacgcaggtgggcattaacaaggtgtttgcggaagttcttcccagtcacaaggtggcaaaggttcaagaactacagaataaaggcaaaaaagttgctatggtaggagatggcgtaaatgactcacccgctttagctcaggccgatatgggcgtagcaatcggcaccgggacagatgtggctattgaggcagcagacgttgtcttgatcaggaatgacctgcttgacgttgttgctagtatccatttgagcaaaagaaccgtccgccgcatacgaatcaatttagtgctggccctcatctataacctggttggcattcccatcgctgctggagtgttcatgcctattggcatcgtcctgcagccgtggatgggcagcgctgcgatggctgcgtcatcagtaagcgtagtgttgagcagccttcaattaaaatgttataagaaacccgatctcgagcggtacgaggcacaggcccatggtcacatgaaaccactcactgctagccaggtctccgtccacatcgggatggacgatcggtggagggacagccctcgggctaccccttgggaccaggtctcctatgtcagccaggtgagtctttcaagcttaacttcggacaagccaagtcgacactctgctgctgccgatgacgacggtgataagtggtcgctcctgctgaatgggcgggacgaggaacagtacatctag

SEQ ID NO: 2382 - DNA, 3777 bp, synthetic construct
  misc_feature 1..3777: note = source = /note="Description of Artificial Sequence: Synthetic coding sequence"
  source 1..3777: mol_type = other DNA
atgcctgaacaggagaggcaaattaccgcccgcgagggtgcctccagaaagattttatctaagctgtccctgcctacacgagcatgggagccagctatgaagaagtcttttgcatttgataatgtgggctacgagggaggcctcgacgggttagggccttcctcccaggtagccacaagtactgtgcggatcctcgggatgacctgccagagttgcgtgaagagtattgaggaccggatttcaaacctcaaaggcataatatcaatgaaagtgtcacttgagcagggaagcgccacagtgaagtacgttcctagtgtcgtctgtctgcaacaagtctgccaccagatcggcgatatgggctttgaagcatctattgctgaaggaaaggcagctagctggccatcgcgatcattacccgctcaagaagccgtggttaagctgcgcgttgaaggcatgacatgtcagtcttgtgtgtcctcaattgaaggaaaggtgaggaagttgcagggcgtggtaagagtcaaagtgagcctgagcaatcaggaggccgttattacttaccaaccatacctcatccagcctgaggacctccgtgatcatgtcaatgacatgggatttgaagcagccatcaaaagcaaggtggccccactcagccttgggcccattgacattgagagattgcagtccacaaatccaaagagacccctgtcgtctgctaatcaaaattttaacaactccgagaccctgggacaccaggggtcccacgtggtaaccctccagctgagaattgatggaatgcactgtaagtcatgcgtgctgaacattgaggaaaatatcggtcagctcctgggcgttcaaagcattcaggtgtcgctggagaataaaaccgctcaggtcaagtatgacccttcctgcacctcgcccgtggcactgcagagggcgattgaggctctacccccaggcaattttaaggtctccttgcccgatggtgctgaagggtcagggactgaccatcgaagctccagttctcacagtcccggcagtccccccaggaatcaggtgcagggtacctgttccaccactctgattgcgatagctgggatgacctgcgcctcctgtgtccactccatcgagggtatgattagccagctggaaggtgtccagcagatcagcgtgtctctcgcagaaggcaccgccactgtcctctataacccatctgtcatctcacctgaagaactacgggcagctatcgaagacatgggattcgaagcgtctgtagtgagtgaatcatgttcgaccaacccactcggtaaccattcagctggcaactcaatggttcagaccacggatggtaccccgacctctgttcaagaagtcgcccctcataccggtcgtctgcccgcaaaccacgcccccgatatcctcgctaagtctccgcagtctactcgagctgtggctccccagaagtgctttctgcagattaaaggcatgacttgcgctagctgtgtgagcaatattgagaggaacctgcagaaggaggccggcgtcctgagcgtgttagtcgcccttatggcaggaaaggccgaaattaagtacgatccggaggtgattcagcctctggagatcgcacagttcatccaggacttgggcttcgaggctgccgtgatggaggattacgcgggcagtgatggtaatattgagctcacaatcaccggtatgacttgtgcctcgtgtgtacacaatatcgagtctaaactgacacgcactaatggaataacctacgcctctgtcgctctggcaaccagcaaggctctcgttaagtttgaccctgagatcatcgggcctagggacattatcaagattattgagagcaagacttctgaggccctcgcaaaattaatgtctctgcaggccactgaggccactgtagtgacactgggcgaggacaacctgatcatcagagaagaacaagtacctatggaactcgtccagaggggggatatcgtgaaagtggtgcccggcggcaagtttcccgtcgatggaaaagttctggagggtaataccatggcggacgagagcctaatcactggcgaagcaatgccagtgactaaaaagcccgggtccaccgtgatcgccggttccatcaatgcccatgggtctgtgctcatcaaggccacccacgtcggcaatgacacaacattggcccagattgtcaagctcgtagaagaagcccaaatgagcaagaacccaaacaagcacatcagccaaactgaagtcatcattaggtttgcttttcaaacatctataactgtgctctgcatcgcatgtccatgttcccttggactggcgacaccgacagccgttatggtggggactggcgtcgccgctcagaatggcattctgataaaggggggaaaaccccttgagatggcacataaaatcaaaacggttatgtttgacaagactggcacaattacccatggcgtgcctagggtaatgagagtgctgctgctgggagacgtggccacacttccattaaggaaagtgttagccgtcgtgggaaccgccgaggccagttctgaacatcctctgggggtggctgttaccaaatactgcaaagaagaattgggaaccgaaacgctgggatactgcacagattttcaggccgtacctgggtgcggaataggatgtaaagtgtccaatgtggaaggcattttggcccactcagagaggcctctttccgcgccagcatcccacctcaacgaagcaggctccctgcccgccgaaaaggatgccgttccccagaccttctcggtgctgatcggcaatagagaatggctgcgaaggaacggtttgaccataagctccgatgtttcagatgctatgaccgatcatgagatgaagggtcaaacagctatactggtggcaattgacggagttctttgcggcatgatagccatcgccgacgctgtcaaacaggaagcggctctggccgtgcacacattacagtcaatgggggtggacgtcgtgttgatcaccggcgataatagaaaaactgcacgcgccatcgccacccaggtgggcatcaacaaggtattcgccgaagtgctgccctcacataaagtcgctaaggttcaagagcttcagaataagggtaagaaggtggctatggtgggcgacggggtgaacgatagcccggcattggcgcaggctgacatgggagtcgccattggaacagggactgacgtcgccatcgaagcagcggatgttgttttaatccggaacgatcttcttgacgttgtggccagcattcacctctcaaagcgcaccgtgaggcgtatccggattaatttagtgttggcactgatctataatttggtgggcatacccatagcagcaggcgtttttatgcccattggcatagttctgcagccgtggatgggatccgctgccatggccgcctcctcagtttcggtcgtcttatcatccctgcagctaaagtgttataaaaagcctgacctggaaagatatgaggcccaggcgcatggacacatgaaacccctgactgcctcgcaggtgtccgttcatatcgggatggatgaccggtggcgtgatagcccccgtgccactccatgggatcaggtgtcatatgtctcacaggtgagcttgagctcactcacctcagacaaaccaagcagacactccgctgccgccgacgatgacggagataagtggtctttattgctgaacggaagggatgaagagcaatatatctag

SEQ ID NO: 2383 - DNA, 4065 bp, synthetic construct
  misc_feature 1..4065: note = source = /note="Description of Artificial Sequence: Synthetic coding sequence"
  source 1..4065: mol_type = other DNA
atgcctgagcaggagcgtcagatcactgctagggagggcgcctcccgcaagatattgagcaaattatcactgcccacccgcgcttgggagcccgctatgaagaagtcctttgccttcgacaatgtaggctatgaggggggactggacggcctgggtcccagtagtcaggtagccacaagcactgtgagaattctcggcatgacctgccagtcctgtgtgaagtccatagaagatcgaatctccaatcttaaaggtatcatcagcatgaaggtgagcttggaacaaggtagcgctaccgtgaagtacgtgccctctgtcgtgtgcttacagcaggtctgtcaccaaatcggcgacatggggttcgaggcctcaatcgctgaggggaaagcagccagttggccatcaaggagcctgcccgctcaagaagcggtggtaaagcttagggtggaaggtatgacctgccagagttgtgtttcgtcaattgagggaaaagtgcggaagttgcaaggtgtggttcgcgtgaaagtatcactttctaaccaggaagccgtgatcacctaccagccgtaccttattcagccggaggacttaagagaccacgttaatgacatgggattcgaagccgctatcaagtctaaggtagctcccctgtcactgggccccattgacatcgagcgcctgcagtctacgaatccaaaacgccccctcagctcagcgaatcagaatttcaacaatagcgaaactctgggtcaccaaggaagccacgtagtcacactgcagttgaggatagacggaatgcattgcatgatcagccagttggagggcgtgcagcagattagcgtcagcctggccgaaggcacggcaacagtgctgtataatccctcggtgatctcacccgaagagctgcgagccgcaatcgaggacatgggatttgaagcatcagtcgtttctgagagctgctctacaaaccctctcggaaaccactcggccgggaattctatggtgcagactacagatgggactcctacctccgtccaggaggtggcacctcacacaggtcggctcccggcaaatcacgccccggatatcctggctaaatccccccagtcaactcgggccgtggccccccagaaatgctttctgcaaatcaagggcatgacgtgcgcatcttgtgtgagcaacatagagcggaacctccaaaaagaagccggagtcctgtcagtgctggtggcccttatggccggtaaagcagaaataaagtatgaccccgaagtaattcagcctctggaaatcgctcaatttatacaggacctcggattcgaggccgcagttatggaggactacgctgggtccgatggaaacatcgagctcaccatcaccggcatgacctgcgcgtcttgcgtacacaatattgagtctaaacttacacggaccaatgggatcacgtacgcatccgtagcgctggctacttctaaggccctcgttaagttcgatccagagattataggccctcgagacatcattaaaatcatcgaagagatcggctttcatgcatcactggctcagaggaaccccaacgcccatcaccttgatcacaagatggaaatcaagcagtggaagaagagtttcctgtgctcgctagtgttcggcattcccgtaatggccctgatgatttacatgctgatcccgagtaacgaacctcatcaaagcatggttcttgatcataatatcatccctggtttgagtatactgaatctgattttttttattttatgtacctttgtccagctcctggggggctggtatttctatgtgcaggcctataagtctctcagacaccgttcagccaacatggatgtgttaattgtattggccacctctattgcgtacgtttacagtttggtcatattggtggtggcagtggcagagaaggcggagcgctcaccggtgaccttcttcgatacccctccaatgttatttgtgttcattgccctgggcagatggctcgaacatttggccaagtcaaaaacctctgaggcactcgcgaagcttatgtcgctgcaggccaccgaggctaccgtcgtgaccttgggggaagataaccttattattcgggaagagcaggttcccatggagctggtgcaaaggggagatatagtgaaggttgtgcccggaggaaagttcccagtcgacgggaaggttttggaaggcaatactatggctgacgagtccctcatcaccggggaggcaatgcccgtaaccaagaagccaggcagcaccgttatcgctggctctatcaatgcgcacggaagtgtgctgatcaaggctacccacgtcggaaacgatacaaccttagcccagatagtgaagcttgtcgaggaagcacagatgtccaaggcccccatccagcagcttgccgaccgattcagcggctatttcgtcccatttattattataatgtccactctgactctcgtagtgtggatcgtgattggctttatcgatttcggcgtagtgcagcggtattttcctaatccgaacaagcacatttctcagactgaggtgatcattagattcgcatttcaaacttcaattacggtgctgtgcattgcttgcccctgttccctaggactcgccactcctacggccgtcatggttggtaccggcgtagccgcgcaaaacggcatcttaatcaaaggcgggaaaccgcttgaaatggctcacaagatcaagacggtgatgtttgataagactgggaccatcacacatggagtgccccgggttatgcgggtacttcttctcggcgatgtcgctaccttacctctgcggaaagtgttggcagtggtggggaccgcagaggcatccagtgagcaccccttgggggttgccgtcactaaatattgtaaggaggaactcgggaccgagacccttggttactgtactgactttcaggctgtccctggatgcggcataggctgcaaagtgagtaatgtagaaggcatcctcgcccactcggaaagacccctctccgccccagcttctcacctgaatgaggcaggcagcctgccagcagaaaaggatgctgtgccccagactttcagcgtcctgattggaaaccgggagtggctcaggagaaacggtcttaccattagctctgacgttagtgatgccatgacagaccacgagatgaagggccagacggcaattctagtcgccatagacggcgttctttgcgggatgatagctattgccgacgcagttaaacaagaggccgccctggccgtccacaccctgcagtctatgggcgtggatgtggtcctgattactggtgacaaccggaaaactgcacgcgccattgccacacaggttggcataaataaagtctttgccgaggtgctgccaagtcataaagttgccaaggtccaggagctgcaaaataagggtaagaaagtggcaatggtcggagatggcgttaacgactcacccgcactggctcaagctgacatgggcgttgccattgggaccggcactgatgtcgctatagaggctgcagatgtggtgctgatccggaatgatctgctggacgttgtcgcatctatacatctgagcaaaagaacagtgcgtagaatacggattaatctagtcctggcgttaatttataatctcgtaggcataccgatcgctgccggtgtgtttatgcccattggaattgtcctgcagccgtggatgggctccgccgcgatggccgcatcatccgtaagcgtcgtcttatcttccctccagctgaagtgctataaaaaacccgacctcgaacgctatgaggcccaggctcacggtcatatgaagccactcaccgccagccaggtctccgtgcacataggcatggatgacaggtggagggactcaccaagggcaaccccatgggaccaggttagttacgtgagtcaggtctctttgtcaagcctgacaagtgataagccatcccggcactcggcggcggcggacgatgatggggataagtggagtctgctgctgaacggtcgagatgaagagcagtatatatag

SEQ ID NO: 2384 - DNA, 3108 bp, synthetic construct
  misc_feature 1..3108: note = source = /note="Description of Artificial Sequence: Synthetic coding sequence"
  source 1..3108: mol_type = other DNA
atgcctgagcaggaacgccagatcactgcccgcgagggcgctagtcgaaagatactctcaaagttgtcactgcccacccgcgcctgggagcctgcaatgaaaaaatccttcgctttcgacaatgttggctatgagggggggctggacggactcgggccatcctctcaggtcgccaccagtaccgttaggatcctgggaatgacatgccaaagctgtgtgaaatctattgaggataggatctcgaatctgaaaggcatcatcagcatgaaggtgtctttagagcagggcagtgcaactgtgaaatatgtccccagtgtggtatgtctgcagcaagtctgccaccagatcggggatatgggtttcgaagcatccatagcagagggcaaggccgcctcatggccttcaaggtcactacctgcccaggaagctgtggttaaactacgagtcgaaggcatgacctgtcagtcgtgtgtgagcagtattgaaggtaaagtgcgaaaactgcagggggtggtgcgggtgaaagtgtctttatccaatcaggaggccgtgattacataccagccctaccttattcaacctgaagatttacgagatcatgttaacgacatgggcttcgaagccgcgattaagagcaaagtggcaccgttatccctaggcccgattgacatcgaaagacttcaatcaacgaatcctaagagaccgctctcttccgccaaccagaactttaataacagcgaaacacttggccaccagggatcacatgtggtcacactccaacttcggatcgacgggatgcactgcaagtcctgcgtgcttaatatcgaagagaacattggtcagttactcggagtccagagtatacaagtgtccctggagaacaagacagcacaggtgaaatacgacccatcttgtacctcacccgtcgcccttcagcgggccatcgaggctttgcctcctggcaacttcaaggtcagcctgcccgacggcgctgaaggctctggcactgatcatagatcgagcagcagccatagccccggcagcccgccacggaaccaggtgcagggaacatgttccaccacccttatcgctattgcaggtatgacctgtgcgagctgcgttcacagcatagagggcatgattagccagcttgagggcgtacagcagattagcgtatcactggcagagggtaccgctaccgtgttatacaaccccagtgtcatctctcccgaagagctgagagccgccatcgaggatatgggttttgaagccagtgtcgtgtctggagaagcaatgcctgtcacaaaaaaacctgggagcactgtgatagctgggtcaataaatgctcatgggtccgtgttgatcaaagcaacccacgtaggaaatgacactacactagcacagatagtcaagttggtggaagaggcccagatgtctaaggcacctatacagcagcttgccgatcgcttctcaggatatttcgtgccatttattattatcatgtctactttgacattggtggtctggatagttatcggtttcatcgatttcggtgtagtgcaacgctacttcccaaatccgaataaacacattagccagacagaagtgatcattagattcgcctttcagacttcaatcacagtgctctgtattgcttgtccatgcagcctcgggcttgcgactcccaccgccgttatggtcggtaccggagtggctgctcaaaatgggattctgatcaaggggggcaagcccctcgagatggcccacaaaataaaaacagttatgttcgataaaactgggacgataactcacggagtgcctcgagtaatgcgggtgctcctacttggggatgtggctaccttgccgctcagaaaggtgttagcagtggtgggcactgcagaggctagctccgagcatccactgggcgtggcagttacaaaatattgtaaggaagaactcggtaccgagacacttggttactgcaccgattttcaggctgtccctggttgtgggattggatgtaaggtgtctaacgtggagggtatcctggcccacagcgagcgccccctgtccgctccagcttcccatcttaacgaggcgggctctcttcctgcagagaaagacgcagttccgcagactttctctgtcctcatcggcaatagagaatggctgcgcaggaacgggcttacgatttcctctgacgtctctgatgctatgactgaccatgaaatgaaggggcagacagcaatcctagtcgctatagacggggttctgtgtggtatgatcgccattgctgacgcggtgaagcaagaggcagccctggctgttcacactcttcagtcaatgggagttgacgttgtgttaattactggggataacaggaaaacagcccgagccatcgccactcaggtggggattaacaaggtgtttgcagaagtcttaccatcccacaaagtcgctaaggtgcaagagctgcagaataaggggaagaaggtagcaatggtgggtgatggcgtgaatgatagtcccgccctggcccaggctgatatgggggtggcaatcggaaccggaacagacgtggcgatcgaagcagcagatgtggtgctcatccgcaatgatctgctggacgtggttgcgtcaatccatctgtctaaaagaaccgtacgtagaatcagaattaatctggttctggctttgatctataacttagttggcataccaatcgcagccggagtctttatgcccattggaattgtgctccagccctggatgggctctgcagctatggccgcttcaagtgtctctgtggtgctgtcctcgttgcaattgaagtgctataagaagcctgacctcgaaagatatgaggctcaggcgcacgggcacatgaaaccactgacggcatcccaggtgtctgtgcatatcggaatggacgatcgttggcgtgattccccacgagcaaccccatgggatcaggtgtcttatgtctcacaggtgagtctttctagcctgacttccgataaaccctcccggcacagcgcagccgcagatgacgacggagacaagtggtctctcctactcaatggcagagatgaagagcagtatatttag

SEQ ID NO: 2385 - DNA, 2031 bp, synthetic construct
  misc_feature 1..2031: note = source = /note="Description of Artificial Sequence: Synthetic coding sequence"
  source 1..2031: mol_type = other DNA
atggatgtcctgattgttctggcgacttctattgcctatgtgtactccctggtcatacttgtggtcgccgttgccgagaaggctgaacgctctcccgtcaccttcttcgacactccaccgatgctgttcgtcttcattgccctcggccgatggttggagcaccttgccaaatccaaaaccagtgaggctctggcgaagctcatgtctttacaggctaccgaggcaacagtcgtgaccctcggggaagacaacctaatcattagggaagaacaggtgcccatggagctggtacagcggggtgacattgtcaaggtggtgcccggaggcaagtttcccgtggatggcaaggtacttgagggaaatacaatggccgatgaatccttgatcacaggggaggccatgcccgtgacaaagaagccgggttccactgtgatcgcaggcagtattaatgcccacggctccgtgctgattaaagccacccatgtgggtaacgacacaacactcgcccagattgtgaagctggtggaggaagcccagatgtctaaagcaccgatccaacaactggccgacagattctcaggatatttcgttcctttcatcatcataatgtcaactctgacactggttgtctggattgtgatcggatttattgatttcggcgtcgttcagcgttatttcccaaatccaaataagcatataagccagactgaggtaattatacgcttcgccttccagacatccattaccgtattgtgcatcgcctgcccctgctctctgggtctcgcgacgcccacagctgtcatggtgggcaccggcgtcgccgcacaaaacggaatactcatcaaaggtgggaaaccgctcgagatggctcacaaggaactgggtactgagactctgggatactgtaccgattttcaggccgtgcccggttgtggcatcggatgcaaagtctccaacgttgagggcatccttgctcactccgagcggccactgagcgcccccgcctcgcatctgaatgaagcaggttccttgcccgccgagaaagatgcggtccctcagactttcagtgtgcttattggcaaccgggagtggctgagacgaaacggcctaactatttcgtccgacgtgagtgacgctatgaccgaccacgagatgaaggggcagacagccattctggtcgctatcgatggcgtgctatgcgggatgatcgccatagcggatgctgtgaagcaggaggcagctctggccgtgcatacacttcagtcaatgggcgtcgacgtggttcttataaccggcgacaacaggaagacagcaagggccatcgcaacccaggttggcatcaataaagtatttgccgaggttcttcctagccacaaggttgccaaagttcaggagctgcagaataagggcaagaaggtagccatggtgggagacggcgtgaatgatagcccagctcttgcacaggctgatatgggcgttgctatcggaactggaactgacgtggctatagaagctgcggacgtggttttgatccggaacgatctgttagacgtggtcgccagcatacacctgagtaagcgtaccgtcaggcggatcagaattaacctggtgctggccctgatatacaatttggtgggaattcccatagcggctggcgtgtttatgcctataggaatcgtcctccagccatggatgggatctgctgctatggcggcttcttctgtaagcgtcgtgctcagcagtctgcaactcaagtgctataagaagccggacctggagcgatatgaggctcaggctcacggccatatgaagcccttgactgcatcacaggtatccgtccacatcggaatggacgaccggtggagagactctcctcgcgccactccctgggaccaggtaagttatgtctctcaggtatcactatcttctctgacatccgacaaaccctccagacattctgcggcagcagacgacgacggtgataaatggagcctgctcctcaacggcagggacgaggagcagtacatatag

SEQ ID NO: 2386 - DNA, 4203 bp, synthetic construct
  misc_feature 1..4203: note = source = /note="Description of Artificial Sequence: Synthetic coding sequence"
  source 1..4203: mol_type = other DNA
atgcccgagcaggagcggcagatcaccgcgcgcgagggcgccagtcgaaagatcctttcaaaactaagtctccctaccagagcttgggagccagcgatgaagaaatctttcgcctttgacaatgtgggctacgagggcggactggacggactgggccctagtagccaggtggctacctccaccgttcgtatcctgggcatgacctgccagagctgtgttaagtccatcgaagacagaatctcaaacctgaaaggcattatcagtatgaaagtgtcgttggagcaggggagcgcgaccgtgaagtacgtgcccagcgtcgtatgtctccagcaggtgtgccatcaaatcggagatatggggtttgaggctagcatcgccgaaggaaaagcggcctcttggcccagccgaagcctgccagcacaggaggcggtcgtcaagctgcgcgtagagggcatgacctgccagtcctgcgttagctctatagagggtaaagtccggaagcttcagggagttgtacgtgtcaaggtgtcgctttctaaccaagaagcggttatcacttatcagccttatctcatccagccggaagacctgagagatcatgtaaatgatatgggttttgaagccgctattaaatcaaaagtcgcccctctcagtttaggcccaattgatatcgaacgtctccaatccaccaatccaaagaggccactgagctctgctaatcagaacttcaacaattcagagactttaggacaccagggctctcatgttgtgactctgcaactgcggattgacggcatgcactgcaagtcatgtgtactgaatattgaggagaacatcgggcagcttttgggggttcagtctattcaggtctccctggaaaataaaaccgctcaagtgaaatacgacccttcgtgtaccagtccggttgcgttacaacgcgccatagaggctctacctcctggtaactttaaagtttctctgccagacggggcagaggggtctggcacagaccacaggtccagctcctctcactcccctggctccccaccgaggaatcaggtccaaggcacttgctcaactacactgatagccatcgcaggcatgacatgtgctagttgtgtacatagcattgagggcatgatatcccaactggagggcgtgcagcagatctccgtatctctagcagagggcaccgccacagtcttatataatccatctgtgattagtcctgaggagttgcgcgcagctattgaagacatggggttcgaggcctcagtggtttccgagagctgcagtacgaatccactgggcaaccactcagctggtaattctatggtgcagacaaccgatggcacgcctacgtctgtgcaagaagttgcgccacacactgggcgactgcctgccaaccacgcccccgacattctggcaaagtcaccccaaagcacaagggccgtggcaccacagaaatgctttctccagattaaaggaatgacttgtgcctcttgtgtgagtaacattgagcgaaatttgcagaaggaagctggggtgttgtcagtgctggtagccttgatggccggcaaagccgagatcaaatacgatcccgaggtgatccagcctctggagatagctcaatttattcaagacctgggtttcgaagccgctgtgatggaggattacgccggctccgacgggaacatcgagcttaccattaccggcatgacctgtgccagttgtgtgcataacattgagtctaagctgacccggactaatggtattacgtatgcctctgtggccttggccaccagtaaggcgctggtgaaattcgacccagagatcatcggtcctagggacattatcaaaataatcgaagagatagggttccacgcttcactggcccagaggaacccaaacgcacaccatcttgaccacaagatggagattaaacagtggaaaaaatcttttctgtgtagcctggtattcgggatacccgtcatggctctcatgatttacatgttaatcccaagtaacgaacctcaccaatccatggtcttggaccataatatcatacccggtcttagcatccttaacctgattttctttattttgtgcacattcgtccaactgctcgggggttggtatttttacgtccaggcctacaagtcgctccgccaccgatctgctaacatggatgtgcttattgtgctggctacctccattgcgtacgtgtactccctggtcattctcgtagtggcggtggctgagaaagctgaacggagccctgtcacctttttcgacacaccacccatgctcttcgtttttatcgctctagggcgttggttggaacatctggctaaatccaagaccagcgaggccctggccaagttaatgtctttgcaagccaccgaagctaccgtggtcactctgggcgaagataacttgataatcagggaggagcaggtcccgatggaactggtacagcgcggggatatcgtaaaggtggttcccggggggaaatttcccgtcgacggcaaagttttagaggggaacacaatggccgatgagtcccttatcaccggggaagccatgcccgttacaaagaagcctggttccactgttatagcaggaagtattaacgcccatggctcagtcctgattaaggcaactcatgtaggcaatgacacaaccctggctcagatcgtgaaactagtggaagaagcccagatgtcaaaggcccctattcagcagctggccgacaggttctcaggatacttcgtgcctttcattatcattatgagcactttgaccctggtggtttggatagtaatcggcttcattgatttcggagtggtgcagcgatatttccctatcaaaactgtgatgttcgataaaactgggacaatcacacacggagtgcccagagttatgcgcgtgctgctgcttggcgatgtggccacgctgccattaaggaaagttctggccgtggttggcaccgcagaggcctctagtgagcatcccctgggggtggccgtgactaaatactgcaaggaggagctgggcacagaaacacttggctattgcacggactttcaggctgtcccaggttgcggtattggttgcaaagtgtcaaatgtggaaggaattctggcacactccgagagacccctctccgccccggccagccatctgaacgaagctggatcgcttcctgcggaaaaggatgccgtgccacagacattctcggtactgatcggaaacagagagtggctccgccgaaacgggttgacaatatccagtgatgtgtcagacgcaatgacggaccatgagatgaaaggccagacagcgatcctcgtggctattgatggggtgctgtgtggtatgatcgcaatcgcagacgccgtcaaacaggaagccgccctggctgtgcatactctgcaatccatgggagtggacgttgtcctgattacaggagataaccgtaagaccgccagggctatcgcaacccaggtgggcataaataaagtgttcgctgaggtgctgccaagccataaggtggctaaggtgcaggaactacagaataaaggtaagaaggtggccatggtaggagacggagtgaacgactcccctgctttggcacaggcagatatgggagtcgctatcgggaccgggaccgacgtggccattgaagctgcagatgttgttctgataaggaacgacctgcttgacgttgtcgctagtatccacttaagcaagcggaccgtgagacgtatacgcataaacttagttttggccctgatttacaacctggtggggatacctatcgccgcaggagtctttatgcccattggcattgttctacagccatggatgggttcagcagctatggccgcctcatccgtatctgtcgtcctgagctcactccagctgaaatgttataagaagcctgatctggaaaggtacgaggcccaggctcacggccatatgaaaccacttacagcaagccaagtctccgtacacattgggatggacgacagatggcgggactcaccccgtgccaccccctgggatcaggtgagttacgtctcacaggtaagcttgtcctccttaacttcagacaaaccgtccaggcactccgcagcagccgacgacgacggcgacaaatggtcccttctgctcaacggtcgcgatgaagagcaatatatatag

SEQ ID NO: 2387 - DNA, 4164 bp, synthetic construct
  misc_feature 1..4164: note = source = /note="Description of Artificial Sequence: Synthetic coding sequence"
  source 1..4164: mol_type = other DNA
atgcccgaacaggagagacagataacggctcgagaaggggcttccagaaaaatcctgtctaagctcagtcttcctacgagggcctgggagccagctatgaaaaagtcttttgccttcgacaatgtgggctatgagggtgggctggacgggcttgggcccagcagccaggtggcaacgtccaccgtaaggatcttgggaatgacctgccagtcatgcgtgaagtccatcgaggatcgaatctctaacctcaaaggcattatctctatgaaggtgtccctggagcagggatccgctacagtgaagtatgttccttccgtggtctgtctccagcaggtgtgccaccaaatcggagacatgggattcgaggcttctatcgccgagggaaaggccgcttcctggcccagtcgctcactccccgcccaagaagccgtcgtcaaattgagagtcgagggaatgacttgccagtcctgcgtgtcctccatcgagggaaaagtgcgaaagctccagggtgttgttcgggtgaaagtgagtttgtcgaatcaggaagcagttatcacctaccaaccgtatttgattcagcctgaagacttacgcgaccatgttaacgatatgggttttgaggcagctatcaagagcaaagtggcacctctgtccttgggaccaattgatatcgaacgcctgcaatccacgaaccccaaacgacccctgtcctccgcaaatcagaatttcaataattccgaaacgctgggccatcaaggtagtcatgttgtgaccctccagctcaggattgatggcatgcattgtaagagctgtgtcctcaacattgaggagaatatcggacagttgctgggggttcagtcgattcaagtgagtctggaaaacaagacagcacaagttaagtacgatccatcatgcacaagcccggtggccctgcagagagcaattgaggcactgcccccagggaacttcaaggtgagcttgccggacggcgctgagggatcagggaccgatcacaggagctcaagtagccatagcccaggtagcccgccgaggaaccaggtgcaagggacctgctcgactacgctgatcgccatcgctggaatgacatgtgccagctgcgtccattctatcgaagggatgatttcccagctagaaggggtgcagcaaatttccgtgagcctggctgagggtactgcgactgtgttgtacaatccctccgtcatcagtccagaggaactgagggcagctattgaagacatgggttttgaggcgtctgtagtttctgagagctgctctactaaccccctgggtaatcattctgccggcaatagcatggtacagaccacagacggaactcctacctctgtccaggaagttgctccacatacagggcgcctgccagcaaatcatgcccccgatatcctggccaaatcaccccagtcaactagggcggttgcaccgcagaaatgcttcttgcagatcaaggggatgacatgcgcctcctgcgtgtcgaacatagaacgtaatctgcaaaaggaagctggagtcctgtccgtgttggtagcgttgatggccggtaaggctgaaataaaatacgatcccgaggtgatccagccccttgagatcgcccagttcatccaggatctaggtttcgaagcagcagtgatggaagattatgcaggcagcgacgggaacatagaactcactatcaccggtatgacatgcgcaagctgtgtgcacaatatagagagcaagctgaccaggaccaacggcattacatacgcttcagtcgctctggctacaagcaaggccctagtcaaattcgatccagaaataattggccctcgagacattatcaaaatcattgaggagattggattccatgctagcctggcccagcggaaccctaatgcccaccacctggaccacaagatggagattaagcagtggaagaagtccttcctgtgttctctggtcttcggcatacctgtgatggcgctgatgatatatatgctgattccatccaacgaaccacaccaatccatggtgctcgatcataacatcatccctggcctatccatcctgaacctaatattcttcatcctctgcacatttgttcagtccaaaacgagcgaggcactagctaagctgatgagcttacaggccacagaggcaactgtggtcactctcggcgaggacaaccttatcattagagaggagcaagtgcccatggaactcgtccaacggggtgatattgtgaaggttgtgcctggcggaaagttccctgtcgatggaaaggtactggaagggaataccatggctgacgagagcttgatcacgggagaagcgatgcctgtgactaagaagcccggctccacagtgatcgcaggatccatcaatgcacatggaagtgtgctgattaaggccacacacgtgggcaatgatactaccctagctcagattgtgaagctggtggaggaagcacaaatgtctaaggctccaatccaacagctggccgatagattttcggggtactttgtacctttcatcattatcatgtctaccctgacactggttgtttggatcgtgataggattcatcgacttcggagtagtccagcggtacttcccaaacccaaacaaacacattagccaaaccgaggtgataatccgcttcgcttttcaaacgtcaatcaccgtactgtgcatcgcatgtccatgctcactgggtctcgcaactcctacagccgtgatggtgggtaccggggtcgctgctcagaacgggattctgattaagggcggaaagccgctggagatggcacacaagatcaagaccgtgatgtttgataaaacgggcactattacacatggagtgcctagagtcatgagggttctgttactgggtgatgtggccactctcccactgcgaaaggtgctggcggtggtcggtactgcggaagcatcctcggagcacccgctgggcgtggcagtgaccaaatattgcaaggaggagctcggaaccgagactcttggatactgcacagacttccaagccgtacctggctgtgggatcggatgcaaagtatctaatgtcgaggggatcttggctcactccgagcgccccctgtcagcacccgcctcccacctcaacgaagcaggctctcttcctgccgaaaaggatgctgtgcctcagaccttttcagttcttattggcaatcgcgaatggctgcgccgcaacgggctgactatatccagcgatgtgtctgacgctatgaccgatcacgaaatgaagggacagacagcgattctggtggcgatcgatggtgtcctgtgcggcatgatagccattgcggatgccgtgaaacaagaagcagctctcgccgttcacactttacagagtatgggtgtcgacgtcgtgctgatcacaggggataacagaaagactgctagagcaatagctactcaagtagggattaataaagttttcgcagaggtgctcccgagtcataaggtggccaaagttcaggagttacagaataagggcaagaaggtcgcaatggtgggcgacggcgtgaacgactcacctgcccttgctcaagccgacatgggagtggccatcggcaccggcaccgacgttgcaatagaggccgctgatgtggtgctgataagaaatgacctgttggacgtggtcgcaagcatccacctctctaaaagaaccgttcggcggatccgcattaacctggtgttggccctcatatacaatctggtgggaatccctatcgccgcaggcgtctttatgcccattggaatcgtgctgcagccttggatggggtcagctgccatggcggctagctctgtctccgtggtactgagtagcctgcaacttaaatgttacaaaaagccggatcttgagcgttacgaggcccaggcacatgggcacatgaagccactgacggcatcccaggtgtccgttcatatcggaatggacgatagatggcgtgatagccctagggccacgccttgggaccaggtcagttatgtgagccaagtgtcactctcgagcctgaccagtgataaaccttcccgtcattctgccgccgccgacgatgatggcgacaaatggagcctccttctgaatggcagagatgaggaacaatatatctag

SEQ ID NO: 2388 - DNA, 1587 bp, synthetic construct
  misc_feature 1..1587: note = source = /note="Description of Artificial Sequence: Synthetic coding sequence"
  source 1..1587: mol_type = other DNA
atgaagaagagtttcgcttttgataatgtaggatacgaagggggcctggacggcctgggcccgtcaagccaggtagctacctcaaccgtgcggatactgggcatgacttgtcagagttgcgtcaagagcatcgaggacagaatttcaaacctgaaggggattatctcaatgaaggtctcgctcgaacagggcagcgccaccgtaaagtacgttccaagtgttgtttgcctgcagcaagtttgtcaccagattggtgacatgggatttgaagcaagtatcgccgaggggaaggcagcaagttggccaagccgatccctgccggctcaggaagccgtcgtgaagctgcgcgtcgagggcatgacatgtcaaagctgcgtgtcttccatcgagggtaaggttcggaaactgcagggagtggtgcgagtcaaggtctccctgtccaaccaggaggcagtgatcacctatcaaccttacctgattcaacctgaagatctcagggatcatgttaatgatatgggtttcgaggccgccatcaagtcaaaggtagcccctctctccctcggcccaatcgatattgagagactgcagtcgacaaatccaaagcgaccgctttcatcagcgaatcagaactttaacaactctgagacattaggtcaccaagggtcccacgtcgtaacgctacagctgcgaattgatggcatgcactgcaagtcctgcgtacttaacatcgaggagaacattggccagctgttaggcgtgcagtccatccaggtcagcctggaaaataaaaccgcccaggtgaagtacgaccccagctgtacatccccggtagcgttacaacgggccattgaagctctacctcctggcaactttaaggtgtcccttcctgacggggcagagggaagcggaacagaccaccgctcgagtagttcacatagccccggatccccgcctaggaatcaggtgcagggaacctgctcaacaaccttgatagctatcgctggtatgacctgtgcttcctgcgtacattcaattgaaggtatgatttctcagctggagggtgttcagcagatcagcgtaagcttggccgaaggcaccgcgaccgtcctgtacaatccatccgtgattagtcctgaggagctacgtgcagcaatagaagatatggggttcgaggccagcgtggtgagcgagagctgtagtactaatcctctggggaaccattccgctgggaactctatggtacagactaccgatggtacaccaacttccgtgcaggaagtcgccccccacaccggtagattgcccgctaaccacgcacctgacatcctcgcaaaatccccacagtcaaccagggccgttgccccacagaagtgtttcctccagattaaagggatgacctgcgccagttgtgtaagcaacattgagaggaacttacaaaaggaagctgcccctaggtgggtcgtgcttttgaggtcaggactgcagatatcagagacacaggtctcccagcacggccgggcacaccggccaggccacaagcattgcctttgcctgttcagcggccaccccggagggtgctgcgggtag

SEQ ID NO: 2389 - DNA, 3966 bp, synthetic construct
  misc_feature 1..3966: note = source = /note="Description of Artificial Sequence: Synthetic coding sequence"
  source 1..3966: mol_type = other DNA
atgtcagattctgtcattctgcgatctattaagaagttcggcgaggaaaacgacggctttgagtcggataagagctataacaacgataagaagtcccgattgcaggacgagaagaaaggcgatggcgtccgcgtgggtttcttccagctcttcaggttttccagttccaccgacatctggttgatgttcgtaggctctttgtgcgcatttctgcacggcatcgcccagcccggagtacttctgatcttcggaacgatgaccgatgtgttcatcgattatgatgtcgaactgcaggaactgcagattcctggaaaggcctgtgtcaataatacaatcgtctggacgaattcctctctcaatcagaacatgacaaacgggacacgttgtggactgctgaacatcgagagtgaaatgatcaagttcgctagctactatgccgggattgcggtcgcagtgcttatcaccggctacattcagatctgcttctgggtcatcgctgcagctaggcagattcagaagatgaggaagttttacttcaggaggatcatgcgcatggaaattgggtggtttgattgcaacagtgtcggagagctcaatacaagattttccgatgacatcaacaaaattaatgatgctatcgctgatcagatggccctgttcatccaaaggatgacgtcaaccatctgcggcttcctgctgggcttctttcgaggctggaagcttacgctggtcatcatatctgtcagccctctcatcggcattggagccgccacgatcgggttgagcgtctccaaatttacggattatgaactcaaggcatatgccaaagctggcgttgttgcggacgaagtaatctcaagcatgcgaacagtcgccgcatttggaggcgagaagcgggaggtagagcgatacgagaaaaacctggtgtttgcccagcgttggggcatccggaagggcatcgtcatgggcttcttcactggcttcgtatggtgtctgatcttcctgtgctatgccctcgccttctggtacggaagtactctcgttctggacgagggtgagtacaccccaggaaccctagtgcagatctttctgagcgttattgtaggtgcattgaacctgggcaacgctagcccatgcctggaagcattcgccaccgggcgagccgcagcaacgagcatttttgagactatagataggaaacctatcatcgattgcatgtctgaggatgggtacaaactggatagaattaagggtgagatcgagttccataatgtgacctttcactatcctagtcgaccagaggttaaaatcctgaatgatttgaatatggtcatcaaacccggggaaatgaccgctctggtgggcccgagcggcgccggcaagagcactgcccttcaattgatccagcggttttacgatccatgtgaaggaatggtcacggtagatggacatgatatccgcagcttgaatattcaatggctcagggaccagataggcattgtggagcaggagcctgtcctcttctctacaaccatcgccgagaatataagatacggccgggaggatgcaacgatggaagacatcgtacaggccgctaaagaggccaatgcctataacttcatcatggacctgccacaacagttcgatacgctggtcggcgagggaggggggcaaatgtcaggcgggcagaagcagagggtagcgatcgctcgcgccctcattcgtaacccaaaaatattgctcttggacatggccactagtgcgctggataatgaatcggaggccatggtgcaggaggtactgtctaagatacagcacggccacacaataatctctgtggcccacagattgtctaccgtaagagcagccgatactattatcggcttcgaacacggaactgcggtagagagaggcactcacgaggagctgcttgaacggaagggagtctatttcaccctggtgactctccagtctcagggaaaccaggctttaaacgaagaagatattaaggacgccacggaagacgatatgctggcgcgcaccttcagtagaggttcctaccaagattccctgcgtgcaagcattcggcagcggagcaaaagccagttatcttatttggtccacgaaccacctctcgctgttgttgaccataagagtacatacgaggaagatcggaaggacaaggatattcccgtccaagaggaggttgaacctgcaccagtccgccgtattttgaagtttagtgctcctgaatggccctacatgttggtgggatccgtgggcgccgcagtcaacggcacagtaactcccctgtacgcctttcttttctctcagattctgggaacattctctattcccgataaggaggagcagcgaagccagattaacggcgtttgccttcttttcgtggccatggggtgtgtcagtctgttcacccaattcctacagggctacgcctttgcaaagagcggcgagctcctaacaaagagacttcgcaagttcggatttagggccatgttggggcaggacatcgcctggttcgacgatctcaggaatagtccaggagctctgacaacgcgcttagccactgacgcatcccaggttcagggtgccgccggatcacagattgggatgattgtcaactcctttacaaacgtgactgttgcgatgattatcgccttctccttttcctggaaattaagcctggtcatcctgtgtttcttcccattcctggccctgtccggagccacccagacacgaatgttaaccggattcgcgtcacgagacaagcaggccctcgagatggtggggcagattaccaacgaggctctttccaatatcaggacagtcgccggcattggcaaagagcgcagatttattgaagcgctcgaaaccgaattggaaaaaccgtttaaaactgccatacaaaaggctaacatctatggcttttgctttgcgttcgcacagtgcatcatgttcatcgccaactctgcatcctacaggtatggtggttacctgatatccaatgaagggctccatttctcttatgtgttcagagtcatctcagctgtcgtactgagtgccactgccttaggccgggcttttagctacacaccaagctacgcaaaagccaagatctccgctgcccggttttttcaactgctggataggcagccaccaatctcagtgtataacaccgccggggagaaatgggacaattttcagggtaagatcgattttgttgactgtaaattcacatacccaagtcgacccgactctcaggtgctaaacggactgagcgtcagcatatcgcctggccaaacactggcctttgtgggtagtagtggttgcgggaagagtacctccattcagttgctggaacgattttatgacccagaccaggggaaggtgatgattgatggccacgatagtaagaaagtaaatgtacagttcctccggagcaacatcgggattgtgtcacaggagccggtgctatttgcctgcagtattatggataatattaaatatggtgataacaccaaagagatcccaatggagcgtgttatagccgcggccaagcaggcacagttgcacgatttcgtcatgagtctgccagagaagtacgagacgaacgtcgggtcacagggatcacagttgagcaggggagagaaacagaggattgccattgcacgggctatcgtacgggaccctaagattctcctgctggacgaagctacaagcgcactggataccgagagcgaaaagaccgtccaggtggcattggataaagcacgcgaaggccggacatgcatcgtgattgcacaccgtttatccaccatccaaaatgcagatatcattgcggttatggctcagggggtggtgatcgagaaagggactcacgaagaattgatggctcaaaaaggggcctactacaagctggttacaacaggatctccaattagttag

SEQ ID NO: 2390 - DNA, 3861 bp, synthetic construct
  misc_feature 1..3861: note = source = /note="Description of Artificial Sequence: Synthetic coding sequence"
  source 1..3861: mol_type = other DNA
atggacttggaagcggccaagaatggcaccgcttggcgacccaccagtgccgaaggtgatttcgagttgggaatctcatccaaacagaagaggaaaaaaaccaaaactgtcaagatgataggagtactgactctgtttcggtatagcgactggcaggacaagttattcatgtctctcgggaccatcatggccatagcccacggaagtggccttccactgatgatgatagtgttcggagagatgacagataagtttgtggatactgcagggaacttctcctttcctgtgaatttttcgctcagtctcttgaaccctggaaaaatcctggaggaggaaatgaccaggtacgcatattactacagcggactgggcgccggcgtgctcgtggcggcctatatccaagtctcattctggactttagcggcaggccggcagattcggaagatacgccagaagttcttccacgccattctcagacaggagatcgggtggtttgacattaacgataccactgagcttaataccaggcttactgacgacatcagcaagatttctgagggcatcggggacaaggtggggatgttcttccaggccgtggcgactttcttcgctggctttatcgtggggtttattaggggctggaaactcaccttagtgattatggccatctctccaatcctgggtctttcggccgctgtgtgggcgaagatcttgtcagctttttctgataaggagctggccgcttatgccaaggccggtgctgtggccgaagaggcccttggtgcgatccgtaccgtgattgcgtttggcggacagaacaaggagcttgagagataccaaaaacacctggagaatgcaaaagagattggtatcaaaaaggcaatctcggcaaatattagcatgggaatcgcattcttactgatctacgcgtcctacgcactcgccttctggtatgggagtacactggtcatttccaaggagtacacaattggtaatgctatgaccgtctttttctctatactcattggggccttctccgtcggccaggccgcaccatgcattgacgctttcgccaacgccaggggtgcggcttacgtaatttttgatatcatcgacaataaccctaaaattgattcattttccgagcgcggacataaaccggatagcattaaaggaaatctcgagtttaatgatgttcatttctcgtatccctcacgtgcaaatgtgaagattctcaaggggctgaatctcaaagtgcagtctgggcaaaccgtagctcttgtgggttccagtggctgcggaaaatcaaccaccgtccaactcatccagcgcctgtatgatcctgatgagggaacaattaacattgatggccaggacataaggaacttcaacgtgaactatctaagggagattatcggggtcgtttcccaggagcccgtccttttttcaacaaccattgccgaaaatatctgttacggtagggggaacgtgaccatggatgagatcaagaaggccgtcaaggaagcgaacgcttacgagttcatcatgaaactgcctcagaagtttgataccctggtgggagaaaggggcgcccaattgtcaggaggacagaagcaacgcattgctattgcacgcgctctcgtacgaaaccccaagatcttgctcttggacgaagccacctcagccctggacaccgagagcgaggccgaggttcaggcagccctggacaaagccagggagggccggaccacaatcgtgattgcccaccggctgagcaccgtccggaacgcggacgtgatcgccggcttcgaggatggcgtgattgtggagcaagggtctcattcggagctaatgaagaaggagggagtgtatttcaagctggtgaatatgcagacctccgggagtcagatccaaagcgaagagttcgaactgaatgacgaaaaggccgccacacgaatggcccctaatggctggaaaagccggttatttaggcattctacacaaaaaaatttgaaaaactcccaaatgtgccagaagagtctggacgtagagactgacgggcttgaggccaacgtgccaccggtgtccttcctgaaagtcctcaagcttaataaaactgaatggccatactttgtggtcgggaccgtgtgcgcaattgctaatggcggtctgcagcccgctttttccgtcatcttttctgaaattatagccatctttggccctggcgacgacgcagttaagcaacagaagtgcaacatcttttcactgatttttctttttctgggaataatttccttctttaccttctttcttcaaggatttacatttggtaaggcaggcgagatcctgacaaggagattgcgctccatggcttttaaggctatgctgcggcaagacatgtcctggttcgacgaccacaaaaactctaccggagcccttagcacccgattggccactgacgccgctcaggttcagggtgctacggggactagattggccctgattgctcagaatatagccaatttagggactggaattatcatttcttttatctacggctggcagctgacgcttctgttactcgcggttgtgcccatcatcgccgttagcggaatcgttgaaatgaaactgctcgccggcaatgcaaaacgcgataagaaggagctggaggcagccggaaaaattgcaacagaggccatagaaaatatccggaccgtggtgtccttaacccaagagcggaagttcgagagcatgtatgtggagaagctgtacggaccatataggaattccgttcagaaggctcacatctatggtataactttttctatctcacaggcatttatgtatttcagctacgctgggtgttttcggttcggggcctaccttattgtgaatggtcatatgcgctttagagatgttatattagttttctcagctattgtttttggtgccgtggctcttggacatgcctcctcctttgctccggattacgctaaggccaagctctccgccgcacacctgttcatgttgttcgagagacagcccctgatagattcttacagtgaggagggtctgaaacccgacaagtttgaaggcaacattacatttaatgaagtggtcttcaattatcctacacgggccaatgttccagtcttgcaaggactttccctcgaagttaaaaagggccagactttagccctcgtaggcagctccggctgtggaaagtcaacagtggtgcagctgctcgaacgtttttatgacccactggctggcactgttttcgtcgattttggtttccagctcctggacggacaggaggccaaaaagctgaatgtccagtggcttagggctcagttgggaatcgtttcccaggagccaattctatttgattgcagcatcgcagagaacatagcctatggggataatagtagagtcgtctcacaggacgagatcgtgtctgctgcgaaggcggccaacatacaccctttcatcgaaactcttccccataaatatgagacacgagttggagacaaaggaacccagttgtcagggggccagaaacagcggatagctattgcccgtgctttgatcaggcagccgcaaattttgctgcttgacgaagcaacttcagcacttgacaccgaaagcgaaaaagttgtacaggaggctctcgacaaggcaagggagggccgtacctgcattgtgatcgcacaccgcctgagcacaattcagaatgcagatctgatcgtcgttttccaaaatggaagagtaaaggaacacggaacacaccagcagctgttggctcaaaaggggatttatttttctatggtatctgttcaggctggcacccagaatctatag

SEQ ID NO: 2391 - DNA, 3699 bp, synthetic construct
  misc_feature 1..3699: note = source = /note="Description of Artificial Sequence: Synthetic coding sequence"
  source 1..3699: mol_type = other DNA
atggaccttgaggccgctaagaatggaactgcatggcggcctaccagtgctgagggcgactttgaattggggatttcaagcaagcaaaaaagaaaaaagacaaaaactgtaaagatgatcggtgtcctgaccctctttcgctattcagactggcaggacaagttgtttatgtccctgggcactattatggcaatagcacatggctctggccttcccttgatgatgattgtatttggcgaaatgaccgacaagtttgtagacacggcagggaatttctcttttcctgtcaatttctcactgtcgctgctcaaccctggcaaaattcttgaagaggaaatgactcggtacgcttattactatagcggactgggcgctggagtcctggtagccgcatatattcaagtgagcttctggaccctggcagctggcagacagatcaggaaaatccgtcagaaattttttcacgccatcttacgtcaagagatcggctggttcgatattaatgatactaccgagctcaacacgagacttacagacgatatttcgaagatcagtgagggaatcggagataaagtcggaatgtttttccaggctgtcgccacctttttcgcaggttttatcgtgggatttatccgggggtggaagctgaccctggtgattatggcaatcagtccgattctagggctgagcgccgctgtgtgggcgaaaatcctgagcgcatttagcgacaaagagttagcagcctatgccaaagccggagccgtggccgaggaggctctgggcgccatcagaaccgtgatcgctttcgggggacagaataaggagctggaacgctaccaaaagcacttggaaaatgcgaaggaaattggtattaagaaggccatttccgccaatatcagcatgggaatcgccttcctgctaatctacgcttcctatgcccttgcattttggtatggatcaacactggtgatatccaaggagtacactatcggtaacgccatgacagtcttcttcagcatactaattggggcttttagcgtagggcaggctgccccctgcatagatgcattcgccaatgctcgaggggccgcctacgttatcttcgacattattgacaacaatcctaagatcgatagtttctctgagcggggtcataagcctgattctattaaagggaatctcgagtttaacgacgtccattttagttaccccagccgcgccaatgttaagatattgaagggcctgaacctcaaagtgcagagtggtcagactgtcgcacttgtgggatcatcaggctgtggtaaatcaacgaccgtccaactgatccagcgcctgtatgaccccgacgagggcacgattaacattgacgggcaggatatacgcaattttaatgtgaactatctccgggaaattatcggcgtggtgtcccaggagcctgtgctcttctccacgacgatcgccgaaaatatatgctatggtcgcggcaacgtgacaatggacgagattaaaaaagcagtcaaggaagccaatgcctacgaatttatcatgaagttgccccaaaagttcgatacactggtaggagaaagaggggctcagcttagcggaggccagaaacaacggattgccatcgctagagccttggtgcggaatccgaagatcctgctgctggatgaggctacaagtgccctggatacagagagtgaagcagaggttcaggcagctctggacaaagccagggaagggcgcacaactatcgtgattgcccaccggctcagtaccgttcgcaatgccgacgtgattgctggcttcgaggacggagttatagtagagcagggcagtcactcggagctgatgaaaaaagaaggcgtgtactttaagctcgttaacatgcagacgtcgggttcgcaaatacagtcagaggagtttgagcttaatgacgaaaaggcagctactcggatggctcctaacggctggaaaagtcgcctgtttcggcacagtacacaaaagaacctgaagaattctcagatgtgtcaaaagtccctggacgtagaaaccgatgggctagaggcgaatgttccacctgtgtcctttctaaaggtgctaaaattgaacaaaaccgaatggccgtacttcgttgtgggcacagtctgcgctatcgctaacggtgggctgcagcccgcattctctgtcatcttttccgagatcatcgcaatctttgggcccggtgacgatgcagtcaaacagcagaagtgtaatattttttcccttatttttctatttctgggaatcatcagtttctttacattcttcctgcagggtttcactttcggaaaagccggggaaatcctaaccaggcgactcaggtctatggccttcaaggctatgttaagacaggatatgagctggtttgacgaccacaagaattctaccggggccctgagcactaggctggccacggacgccgctcaggtccagggcgcaacaggcacaagactggcccttattgcccagaacatcgccaaccttggaacaggcattatcatctctttcatctatggttggcaacttacccttttgctattagccgtcgtgccgattattgcagtttcaggtattgtggagatgaaactcctggcgggaaatgcaaaaagggataagaaggaactcgaggctgcaggcaagattgcaacagaagcgattgaaaacatcaggacagtggtgagcctgacgcaggagcggaagttcgagagcatgtatgtggaaaaactgtatgggccttacagggtgttcagcgctatcgtgtttggtgcggtggctctgggccacgcgagttcgttcgcaccggattatgctaaggcaaagctgagcgctgcccacctctttatgctttttgagcggcagcctctgatagactcctatagcgaagaaggcctgaaacccgataaattcgagggaaacataacgttcaacgaggtggtttttaattacccaactcgagccaatgtccccgtactacagggcctctcacttgaagtcaagaaaggacagacgctggcacttgtgggatcttcagggtgcggtaagagcacggtggtgcaactcctagaacggttttatgacccactggcagggacggtgctcctagacgggcaggaggccaaaaagcttaacgtgcaatggctgcgggctcagttagggatcgtctcccaggaacccatcctgtttgactgttccatagccgagaatattgcctacggcgacaattcccgcgtggtgtcacaggatgagattgtgtcagccgccaaggccgccaacattcatcctttcatcgagaccctgccgcacaagtacgagactagagtgggggacaagggcacccagctgagcggaggccagaaacagagaatcgccattgctagggcactgatccggcagcctcagattctactcctagacgaggcaacttctgccctggacacagaatcggagaaggttgtgcaagaagctctggacaaggcccgagaaggccgcacttgtatcgtgatagcacacagactctcaaccatccaaaatgccgatttgattgtcgttttccaaaatggtcgggtgaaggaacatggcacacatcagcagttgctcgctcagaaaggaatctactttagcatggtgtctgtgcaagcgggaacccagaatctctag

SEQ ID NO: 2392 - DNA, 3840 bp, synthetic construct
  misc_feature 1..3840: note = source = /note="Description of Artificial Sequence: Synthetic coding sequence"
  source 1..3840: mol_type = other DNA
atggatttggaggctgccaaaaatggtacggcctggagaccaacgagcgccgagggcgacttcgagttgggaatctcttcaaagcagaaaagaaaaaagactaagacagtaaagatgattggtgtcctgactctattccgatactctgattggcaggacaagctgttcatgtcactggggactattatggctatcgcacacggcagcggtctgccacttatgatgattgttttcggagagatgactgataagttcgtggacaccgccggaaatttctctttcccagtgaacttcagtctgagtctgctgaaccctggcaagattctggaggaggaaatgacgagatatgcctactactacagcgggttgggtgctggagtgcttgtggctgcatacattcaggtatcattttggactctcgctgccggcagacagatcaggaagataagacagaaattttttcacgcaatactgcggcaggagatcggctggttcgacattaatgataccactgaattgaataccaggctaactgacgatataagtaagatttccgaaggtataggcgataaagtaggtatgttctttcaagccgttgccaccttcttcgcgggcttcatagtggggtttattcgtggctggaagcttacattggtgatcatggcgatcagccctatccttgggctgagtgccgctgtgtgggcaaaaattctgagcgcatttagtgacaaggaattggctgcttatgcaaaggccggcgcagttgccgaggaggctttgggagccattcgaaccgttattgcatttggcggccaaaataaggagctggaacgataccagaaacatctggaaaacgcaaaggaaattgggatcaagaaagccatctctgctaatatctcaatgggcattgccttcctcctcatttatgcgagctatgctctcgcattttggtatggatctactctggtaatctctaaagaatataccattggcaatgccatgactgtctttttctccatcctaattggcgcctttagtgtaggtcaggccgccccttgcatagatgctttcgctaatgctcgaggagccgcttacgtcatttttgacatcatcgacaataacccgaaaatagactcattctctgagaggggacataaacccgacagtattaaggggaatctggagtttaatgacgtgcacttctcctacccgtcaagagcaaacgttaaaatcctgaaaggcctgaacttaaaggtacagagcggacagaccgtagccctcgtaggcagttcagggtgtggcaagagcactacggtgcagctgatccagagactgtacgacccagatgagggcacaattaacatcgatggacaggacatccggaacttcaatgtgaactacctcagagagattatcggcgtcgtgagccaggagcctgtccttttttccacaaccatcgctgaaaacatctgctacggccgaggcaacgtgaccatggatgagatcaaaaaagcggtgaaggaagctaatgcctacgagttcatcatgaagctgcctcagaagttcgacacacttgtcggcgaaaggggagctcagctgtccggtgggcagaagcagcgtatcgcaattgctagggccctggtgcggaatcccaagatccttctacttgatgaagcaaccagtgctcttgatactgaatcggaggcggaggtgcaggccgccctggacaaggctcgggaggggcgtaccacgattgttatcgcccaccgattatcaacagtccggaatgcggacgtaatcgccggattcgaggatggcgtaatcgtggagcaggggagtcactctgagcttatgaagaaagagggagtgtactttaaactcgtgaacatgcagacatctggttcccaaatccaatcagaggaattcgagctcaatgatgaaaaagccgccacccgcatggctccgaatggctggaaaagccgattgttccggcacagtacccagaaaaatctcaagaattctcaaatgtgccagaagagtttggatgtcgagacggatgggttggaggccaacgtgccaccagtcagcttcctgaaggttttgaagctgaacaagaccgagtggccctatttcgtagtcgggaccgtatgcgccatcgctaatggcgggctgcagcctgccttctctgtgatcttcagtgagattatcgctatcttcggcccaggggacgacgctgttaagcaacaaaagtgcaacatcttctcattgattttcctgttcctgggtatcatttctttctttactttttttctgcagggcttcacattcggcaaggcaggtgaaatactgactcgacgcctgcggtctatggcattcaaggcgatgttaagacaggacatgagctggtttgatgatcacaaaaattccaccggagccctgtccacaaggctggcgaccgacgcagcacaagtccagggggccacggggacacggctggccttgattgcacagaacattgctaacttaggcaccggcatcatcatcagtttcatttacgggtggcagttgaccctcctgcttctggctgtggtgcctattatcgcagtatcaggaattgtggagatgaaactcctggctggtaacgcaaaacgggacaagaaagaactggaagccgctggcaagatcgccaccgaggctatcgaaaacatccgtaccgtggtcagcctgacacaggagaggaagtttgaatccatgtatgtcgagaaactgtacgggccatatagaaacagtgtgcagaaagcacatatctacggtatcaccttttcaatctcccaggctttcatgtattttagctatgcggggtgcttccgattcggcgcatacctcatcgtcaacgggcacatgcgttttagagatgtgattctggtcttcagcgcgatagtgtttggggccgttgccctggggcacgcttcctcttttgctcctgattatgctaaggcaaagctctccgcagcacatctgtttatgctgtttgaacgccagcccctaatagatagctattccgaagaggggcttaagccagacaagtttgaaggcaacatcaccttcaacgaggttgtgttcaattatccaacccgtgccaatgtgcccgtactgcaaggcctgagcttggaggtgaaaaagggccaaactctggcgcttgttggctctagtggttgtgggaagtccaccgtggtacaattgctcgaaaggttttacgacccgcttgccggcaccgtgctgctggatgggcaggaggccaaaaagctgaatgtacagtggttacgtgctcagttgggtatagtctcccaggaacccattctcttcgactgcagtatcgccgagaatatcgcctacggcgataattctagagtcgtgtcccaggacgaaatagtttccgccgccaaagccgcaaatattcaccccttcattgagactctgcctcataagtatgaaacacgtgttggcgataaggggacacaactgagcggaggccaaaagcaacgcattgccatcgcccgagcactcatacggcagccccaaatactgttgctggacgaagcaacatctgcactagatacagaaagcgagaaggtggtgcaagaggcactcgataaggcgcgcgaaggtaggacctgtatcgtcatcgcacaccgtctgagcactattcaaaacgcagacctcattgtcgtttttcagaacggaagagtcaaagagcacggtactcaccagcagctgctcgctcagaaaggaatttacttcagcatggtgagcgttcaggctggtactcaaaacctctag

SEQ ID NO: 2393 - DNA, 186 bp, synthetic construct
  misc_feature 1..186: note = source = /note="Description of Artificial Sequence: Synthetic coding sequence"
  source 1..186: mol_type = other DNA
atggatctggaggcagccaaaaacggtacggcttggcgacctactagcgctgaaggggacttcgaactgggaatttcctcaaaacaaaaacgaaagaaaaccaagaccgtaaaaatgataggggtcctgactctgtttcgctattccgattggcaggacaagttgttcatgtcactcggcacatag

SEQ ID NO: 2394 - DNA, 3699 bp, synthetic construct
  misc_feature 1..3699: note = source = /note="Description of Artificial Sequence: Synthetic coding sequence"
  source 1..3699: mol_type = other DNA
atggaccttgaagccgccaaaaacgggaccgcctggcggcccacttccgccgagggagattttgaacttggaatcagcagtaagcaaaaacgaaaaaaaacgaagacggtgaaaatgatcggagtgctgacactgtttcggtatagcgattggcaggacaagctgtttatgagtttaggaacgataatggccatcgcccatggcagtggcttaccactgatgatgatagtattcggagagatgaccgacaaattcgtggacaccgctggaaacttctcatttcccgtgaacttttctttgtccttacttaacccagggaaaatactggaggaggagatgacacgctacgcttactactatagcgggctgggcgctggcgtgctcgtcgctgcatacatccaggtgtccttttggacgctcgcagctggacgccagattaggaaaatccgccagaaattcttccacgcaatcctgagacaagaaattgggtggttcgacatcaatgataccaccgaactgaacaccagactgaccgacgacattagtaagatttccgaaggcatcggggataaagtggggatgtttttccaggcggttgccactttctttgccgggttcatcgtggggttcatccgaggctggaagcttactctggtgatcatggcgatatctccaattttaggactttcagcagccgtatgggccaaaattctatcagctttctccgataaagagcttgcagcctatgccaaagcaggcgctgtcgcagaagaagcattaggtgcaatcaggacagtaattgcattcggtggccagaacaaggaactggagcgataccagaagcatctggagaacgccaaggagatcggcattaagaaagccatcagcgctaatatcagcatgggaatagccttccttctcatctatgcttcctacgcgctggccttttggtacggctcaaccctcgtgatcagtaaggagtacacgatcggtaacgccatgactgtctttttctccatcttgattggtgctttcagcgtcgggcaggctgctccatgcattgacgccttcgcaaatgctcgtggcgccgcctacgttattttcgatattatagataacaaccccaagatcgattccttcagtgagaggggccataaacccgacagtattaagggcaacttagagtttaatgatgtgcacttttcttacccatctagagctaacgtgaagattctgaagggactgaacctcaaagtgcaaagcgggcagacagtggcgctagttggctcaagcggttgtgggaagagcaccacagtccagcttattcagcgcctgtatgatcccgatgagggcacaattaatatcgacgggcaagacattcggaactttaacgtgaattatctaagggagatcattggcgtggtctctcaagaacctgtgctgttttcaacaacaatcgccgaaaatatctgctacggacgcgggaacgtgacgatggatgaaataaaaaaagccgtcaaggaggctaatgcctatgagtttattatgaagctccctcagaaattcgacaccctagtgggggaaagaggggctcagctgagtggtggacagaagcagaggatagccattgccagagctcttgttaggaacccgaaaattttgctactcgatgaagccacaagcgccttggacactgagtctgaagctgaggtgcaggccgctctagataaagccagggagggacgcacgaccatcgtgatagcccaccgcctttccacagttcggaatgcggacgtgatcgccggattcgaagatggtgtaatcgtggagcagggatctcatagcgaattgatgaagaaagaaggagtctatttcaagctcgtgaacatgcagacctcaggctcccagatccagtctgaagagttcgaactgaatgatgaaaaggccgccacccgtatggctcccaacgggtggaaatcccggctttttaggcactctacgcaaaagaatcttaagaacagccagatgtgccaaaagtccctcgatgtcgaaacagacggcttagaagcaaacgtgcctccagtgtcatttcttaaggttctaaagctgaacaaaaccgagtggccttactttgtcgtgggcactgtgtgtgctatcgccaatggtggcctgcagcccgcctttagcgtcatcttttcggagattatcgccatcttcggacctggggatgatgccgtgaaacaacaaaaatgcaacattttctctctgatatttctgtttcttggaataatctctttttttaccttttttctgcaaggcttcaccttcggaaaagcaggcgagatcctgacgaggaggctgcgaagcatggcattcaaagctatgctccgtcaggatatgtcctggtttgatgaccacaagaactcaacgggcgctctgtcgacaaggttggcaactgacgcagctcaagttcagggagcaactggcacacgcttggctttgatagcccaaaatatcgcaaacttgggcacagggatcatcatatcatttatctacggatggcagttgacactgctgctgttagctgtggtgcctatcatagccgtctcaggtattgtggagatgaaattgctggccggtaacgccaaaagagacaaaaaggaattggaggcagccggcaagattgccactgaagcgatcgagaatattcgtacagtggttagcctgacacaggagcgtaagtttgaaagtatgtatgtcgagaagctatacgggccttatcgggtgttcagcgccatcgtctttggagcagttgccttgggccacgcttcttcattcgcccctgactacgcaaaggcgaagctatctgccgctcacctgtttatgctcttcgagagacagcctctgatagactcttattccgaagaaggcctaaagcctgacaagttcgagggaaatattacatttaatgaggtggtctttaattatcccaccagagctaatgtacccgtgctgcaagggctctcactggaggtaaagaaaggacagactttagccctggtagggagctctgggtgcgggaagagcactgtcgtccagctcctggaacgattctatgaccctctggccgggacagttcttctggatgggcaagaagcaaagaaactgaacgtgcagtggctgagggcacagcttggaatcgtgtcccaagaaccgatcctattcgactgttcaatcgcagaaaacattgcctatggagataattcgagggtagtgtcgcaggatgagattgtgagcgctgctaaagccgcaaacatccacccctttattgagacactgccccacaagtacgagacccgtgttggggacaaaggaacccaacttagcggtgggcaaaaacagcggatcgccatcgcccgcgcattgatccgacagcctcagatcctgctgctcgacgaggcaacctctgcactcgacactgaatctgaaaaggtcgtgcaggaagcacttgacaaggcacgcgagggcaggacatgtattgtcattgcccacagactgtccaccatccaaaatgccgatctaatagtggtcttccagaatggacgagtcaaggagcatggcacccatcagcagctactggcccaaaaaggcatatacttcagcatggtctccgttcaggctggcactcagaacctctag

SEQ ID NO: 2395 - DNA, 3840 bp, synthetic construct
  misc_feature 1..3840: note = source = /note="Description of Artificial Sequence: Synthetic coding sequence"
  source 1..3840: mol_type = other DNA
atggatctggaggctgcaaagaacggcacagcctggcggcccacctcagccgagggcgactttgaacttggtatctcaagcaagcagaagcgaaagaaaaccaagacagtgaagatgatcggggttctaactctgttccgctactcagattggcaagataagctcttcatgtctctgggaacaatcatggccatcgcccacgggtctggcttacccttaatgatgatagtgttcggagaaatgaccgacaaatttgtggatacagctggaaatttctctttccctgtgaactttagcttgagcctacttaatcccggcaaaattctcgaggaagaaatgacacgctacgcatactactacagcggtctgggggccggcgtgctcgtcgcagcatatattcaggtgagtttctggactcttgcagccggacggcagattcggaagatacgacaaaaattctttcatgccatccttaggcaggagatcggatggtttgacattaacgataccaccgagctgaacacaagattgacggacgatatcagcaagatatcggagggtatcggagacaaggttggaatgttttttcaggcggtggcaacgtttttcgcaggcttcatcgtggggtttatccgggggtggaagctgactctggtgattatggcaatctctccaatcctgggactgagcgccgctgtgtgggccaagattcttagcgctttcagcgacaaggagctggcagcttacgcaaaggcaggagccgtcgccgaggaggccctcggggccattcggacagttatcgcttttgggggccagaataaagagctcgaacgataccagaagcatctggaaaatgctaaggaaattgggataaagaaagcgatctcggccaacatatccatgggcattgctttcctactcatttacgccagctacgcgctggcattctggtacgggtcaactctggttataagcaaggagtacaccataggaaacgccatgaccgtgttcttctcaatcctgatcggagcattttcagtcgggcaggcagcgccttgtatcgacgcattcgccaatgccagaggagcggcgtatgtgatatttgacattattgataacaaccccaaaatcgattcattcagtgagagaggtcacaaaccagacagcatcaagggcaaccttgagtttaacgatgtgcatttttcatacccctcccgggccaacgtgaagattctgaagggtctgaacctaaaagtccagagcgggcagaccgtagctcttgtgggctccagcggctgtggcaaatccactacagttcagttgattcagagactgtacgaccccgatgagggaacaattaatatcgacggccaagacatcaggaacttcaatgtcaattacctgagagaaattatcggggtcgtgagccaagaaccagttctgttctctactaccatagctgaaaatatttgctacggtcgagggaatgtgaccatggacgaaattaagaaggccgtgaaggaggcgaatgcctatgaattcataatgaaactgccccagaaatttgataccctggtcggagagcggggggctcagctgagcggtggccaaaagcagaggatagcaattgctcgggccctcgtcagaaaccctaagattctgctgctagacgaggctacttctgctttagacacagaaagtgaggcggaggtgcaggcggcactggacaaggcccgggagggacgaaccacaattgtgatagcccatagactgtccaccgtgcgcaatgcggatgtgatagccggctttgaggatggcgtgattgtcgaacagggcagtcacagcgagctgatgaagaaagagggagtttattttaagctcgttaacatgcagacatcagggtcccaaatccaatcagaggaatttgagttaaatgacgagaaggcagccacaaggatggcccctaatggatggaaaagccgactatttcggcattcgacccagaagaacctaaagaactctcaaatgtgccagaaatccctcgacgtcgagacagatggactggaagcgaacgtgccaccagtttcatttctaaaagtcttgaaacttaataagaccgagtggccatatttcgtggttggaaccgtgtgtgctatagcaaacggagggcttcagcccgctttctcggtgatcttcagcgaaatcattgcaatcttcgggcccggggacgatgctgtgaagcagcagaaatgcaacatcttttccctgatttttctatttctgggcataattagctttttcaccttttttctgcaggggtttactttcgggaaagcgggcgaaattctgactcgcaggttgcggtccatggccttcaaggctatgcttcgccaggacatgtcctggtttgacgatcacaagaacagcactggcgctttgtccacccgattagccacagacgccgcacaggtccagggggccaccggtaccaggctggccctcattgcccagaatatcgccaacctgggcaccggtattatcatttcattcatctacggctggcagctcacccttttgctgctcgcagtggtccccatcatcgcagttagtggcatcgttgaaatgaaactcctggccggaaacgccaaaagggacaaaaaggagctggaagctgctggaaaaatcgccacagaggctatcgagaatattagaactgtggtcagcctgacccaagagcgtaaatttgagtccatgtatgtggagaaactgtacgggccatataggaactctgtgcagaaggcccacatctatggaatcacattcagtatctctcaggcctttatgtacttttcctacgccggatgttttcggtttggggcttatctcattgtgaatggccacatgagatttagagacgttatattggtgttctcggccatcgttttcggggccgtcgcattagggcacgcgagttcattcgccccagattacgccaaggccaagctctccgcggcccatctgttcatgctgttcgaacgccagcctctgatagactcctacagtgaagaaggtttgaagccagataaattcgaaggcaacattacattcaacgaggtagtgttcaattatcctacccgcgctaacgttcctgtgctccaaggcctaagcctggaagtgaaaaagggccagacccttgccctcgtgggaagctctggttgcggcaaatcaacagtcgtccagctgctggaacggttttatgatccactagcaggcaccgtgcttctagatggccaagaggccaagaaattgaatgtccagtggttgcgagcccagctcgggatcgtgtcacaagagcccattctctttgattgtagcattgcggaaaatatagcctatggggacaactcccgtgtggtgtcacaggacgagatcgttagcgctgctaaagctgccaatatacatcccttcattgagaccctgccgcacaaatatgagaccagagtgggcgataaaggtacacagctttctgggggacagaaacaacgaatcgctattgcgagggccctgattagacagccccagattttgctcctggatgaagccacttctgccctggacactgaatctgagaaagtggtgcaggaggccctggacaaggcgagagaaggccgtacttgtatcgtcatcgcccaccggctgagtactattcagaacgcagacctgattgtggtcttccagaacggtcgggtcaaagagcacggcactcatcagcagttgctcgctcagaaaggtatttatttttctatggtgagcgtacaggcaggaacccagaatctgtag

SEQ ID NO: 2396 - DNA, 1464 bp, synthetic construct
  misc_feature 1..1464: note = source = /note="Description of Artificial Sequence: Synthetic coding sequence"
  source 1..1464: mol_type = other DNA
atgcgagaaaacatggcccgcggcccctgcaatgcccctcgatgggcatctctcatggtcctggtcgcgatcgggaccgccgttacagcagcagtaaacccaggtgtggtggttagaatttcccagaaggggctggattacgctagccagcagggcaccgctgctctgcaaaaagaattgaagaggattaagatccccgattacagcgactcctttaagattaaacatttggggaagggccattattccttctatagtatggacataagggaatttcagttacctagcagccagatctcaatggtccccaacgtcggcttgaaattctccatctccaacgcgaacataaagataagtgggaaatggaaagcacagaagaggttcttaaagatgtctgggaacttcgatctctcaatcgagggtatgagcattagcgccgatcttaaattgggcagcaatcccacttcgggcaagccgacgataacatgtagctcctgttcctcccacatcaactcggttcacgtccacataagcaaatcgaaagttggctggctcattcaactttttcacaagaaaattgaatccgctctgcggaacaagatgaactcccaggtgtgcgagaaggtgactaactctgtgtctagtgaattacagccgtacttccagacactccccgtgatgactaaaattgattctgtcgctggaatcaattacggactggtggctccgcccgccacaactgcagaaacacttgatgtgcagatgaagggtgaattttattctgaaaatcaccacaaccccccgccctttgccccccctgtgatggaattcccggcggcccacgacagaatggtgtatctggggctgagcgattattttttcaataccgcgggcttggtgtatcaggaggccggagtattaaagatgaccctaagagacgatatgatccctaaggagagtaagtttcgcctgacaaccaagttcttcggtacatttttgcccgaggtggcgaagaagttccccaacatgaaaatacagattcacgtttccgccagcacacctccgcacctgagcgtgcagccgacaggtttaacgttctatccagcagttgacgttcaggcatttgcagttttgcccaatagtagcctggcaagtctgttcctgattggaatgcacaccactgggagtatggaggtgagcgcagagtcgaaccgcttggtcggcgaactcaagctagaccgcctgttgctggagctcaagcatagtaatattggacccttccctgttgaactgcttcaggatattatgaactacatcgtccctatcctcgtcctccctcgcgtgaacgagaaactccaaaagggctttcccctgcccactccagctagagtgcagctctacaacgtggtgttgcagcctcatcaaaatttccttctgttcggtgccgacgtagtctataaatag

SEQ ID NO: 2397 - DNA, 1449 bp, synthetic construct
  misc_feature 1..1449: note = source = /note="Description of Artificial Sequence: Synthetic coding sequence"
  source 1..1449: mol_type = other DNA
atggatgagggtatcccccatctgcaggagcggcagttgcttgaacatcgggatttcatcggcttggactatagtagtttatacatgtgcaagcccaaaaggagcatgaaaagagatgacacgaaggacacctacaagctaccccacaggttaatcgagaaaaaaagacgggatcggattaatgagtgtattgcacagcttaaagacttgctccctgaacatctgaagctgacaaccctgggacatcttgagaaggcggttgtccttgagctgacgctcaagcatctgaaggcactgacggccctgaccgagcaacagcatcagaaaatcatcgccctccagaacggggagcggtcgctgaagagccccatccaatcagacctggatgcctttcattcaggcttccaaacatgtgcaaaagaagtgctgcaatatcttagccgattcgagtcttggactcctcgggaaccccgctgcgttcagctcattaaccacctccacgccgtagccactcagtttctacccaccccccaattattaacacagcaggtgcccctgtcaaagggtacaggagcccccagcgcagcaggtagtgcagccgcaccatgcctggaaagagcgggacaaaagctggagcccttggcgtactgcgttcccgtcatccaaagaacccagccatccgctgagctggccgctgagaacgatactgataccgattctggttacggaggcgaggctgaggctagacctgaccgagaaaagggcaaaggggctggcgctagcagagtaaccattaagcaagaacctcccggagaggactctcctgccccgaagaggatgaaactggattctcgaggtggcggttccgggggtggcccaggcggaggagccgctgcggcggccgctgccctgctcgggcctgaccctgctgcagcggcagcgctcctgcgccctgacgcagccctcctttcgtctcttgtagcgttcggcggcggcggcggagccccattcccccagcccgcggctgccgcagctcctttctgcctcccgttttgttttctcagtccctctgccgccgccgcttacgtgcagccattcctggacaagtcgggattggagaagtatttataccccgctgccgccgccgctcctttccctctactatatccaggaatccctgcccccgccgcggcagctgccgccgccgccgccgctgctgccgcagctgccgcgttcccatgccttagcagcgtgttgtcccccccccccgagaaagccggcgctgctgctgctacattgctgccacatgaagtggctccccttggagctcctcacccacagcacccccatgggcgcactcatctgccctttgccggcccacgggagcctggcaaccccgaaagcagtgcccaggaggatccttctcagcccggtaaggaagctccctag

SEQ ID NO: 2398 - DNA, 1113 bp, synthetic construct
  misc_feature 1..1113: note = source = /note="Description of Artificial Sequence: Synthetic coding sequence"
  source 1..1113: mol_type = other DNA
atggatgaaggaattcctcacctgcaggaacgtcagctattagagcatagggattttattggtcttgactatagctccctgtacatgtgcaaacctaaacgctctatgaaacgggatgatacaaaggacacctataagctaccccacaggctgatcgaaaaaaagcggcgcgaccgtattaatgaatgtatagcccagctgaaagacttgctacccgagcacttaaagctgactaccctgggacacctcgagaaagcagtcgtgctggagctgaccttaaagcacctcaaggcactgaccgctttgacggaacagcaacaccaaaagatcatcgctttacagaacggggagcgcagcctgaaatcccctatccagtctgatctagacgccttccattcgggcttccagacctgcgccaaggaagtacttcagtatctcagccgcttcgaatcatggacacctcgagagcccagatgcgtgcagcttataaaccacttgcatgcagtcgccacgcaatttctccctacgccccaactcctaacccagcaagtgcctttatctaaaggcactggggcccccagcgccgccggaagcgcagctgcaccctgtcttgaacgggctggacagaagcttgaaccacttgcctattgtgtcccagttatacagcgtacacagccgagcgctgaactagcagccgagaatgacacagatacagatagtgggtacggcggagaggccgaagcacgacccgacagggagaaggggaagggtgccggggcttccagagtgacaattaaacaggaacctccaggcgaggacagcccacctcccccacctcggagccctgcttgcccaaggtgctgtaggcctctccctaggcggagggcgcctcctccaaggcctagttgccggacccggtggagaccgttagggagacgcaccccctcgacacgaacagcggcccctacttgtcctagtcccggcccggcctcaaggggcacacgcagggccttgcttaggaaaattccgaggtcccaggaaagaaaactgcctgagtcactgcgtcctgaagggcggcgctttaagcagtcagagaaactcaaatatccctag

SEQ ID NO: 2399 - DNA, 1191 bp, synthetic construct
  misc_feature 1..1191: note = source = /note="Description of Artificial Sequence: Synthetic coding sequence"
  source 1..1191: mol_type = other DNA
atggtggcaggcactaggtgtctcttggccctgcttctgcctcaagttctcttaggcggcgcagctggtttggttcccgagctgggacgcagaaaatttgcagcggccagcagtggcagacctagttcccagccgagtgatgaggtgctgtctgaatttgagctgaggctgctgagcatgtttggcctcaagcagcgtcctactcctagtcgagacgccgtggtgcctccatacatgctcgatctgtatcggaggcactctggccagcccgggagccccgcaccagaccaccggctcgagagagctgcctcaagagctaatacagtccggtcctttcaccacgaagaaagcttggaagagctgccagaaaccagcggtaagactactagacgcttcttcttcaacctgtcttccatccccaccgaggaattcataacgtccgcagaactccaggtcttccgcgagcagatgcaggatgccctcgggaataactctagcttccaccaccgcattaatatttatgagataataaaacctgccaccgcgaacagcaagtttccggtgactcgacttttggataccagacttgtgaaccagaatgcatcaaggtgggagagtttcgacgtcacccctgccgttatgcggtggactgcgcagggacacgcaaaccacgggtttgtggtggaagtagcacatctggaggagaagcagggcgtgtccaaacggcacgtgcggatctcacggagtctgcaccaggatgagcattcctggagccagatcagacccttgctggtcacgttcgggcacgatggaaagggacatccactgcacaagagggaaaaacggcaggcgaaacacaagcagaggaagcggctcaaatcctcctgcaaacggcatcctctgtacgttgacttctccgatgtggggtggaatgactggatcgtggcgccgccgggttatcatgcattttactgtcacggggaatgcccattccctcttgctgatcatctcaacagcactaatcatgcaattgtccagacgctggtgaattccgtgaattctaagatccccaaagcatgctgtgtgccgaccgagctgtcagccatatcaatgctgtacttggatgaaaatgagaaggtcgtgctgaagaattaccaggacatggtagtggaagggtgcggctgcagatag

SEQ ID NO: 2400 - DNA, 1296 bp, synthetic construct
  misc_feature 1..1296: note = source = /note="Description of Artificial Sequence: Synthetic coding sequence"
  source 1..1296: mol_type = other DNA
atgcacgtgaggtccctgagagcagcagcaccccacagcttcgtggcgctttgggcaccattgttcctcctccgttccgcacttgcggacttctccctggacaatgaggtgcattcttcgtttatacaccgacgcctccgttcccaggagcgccgggagatgcaaagagaaattcttagtattcttggcctgccacacagaccccggccacacctgcagggaaagcacaactctgccccgatgttcatgttagatctatataacgctatggctgtagaagagggcgggggtcctgggggacaagggttttcgtatccatacaaggcagtcttctccacccaaggaccaccactcgcctctctgcaggacagtcacttcctgacagacgccgacatggtcatgtcctttgttaacctggtggaacacgataaagaattcttccatccccggtaccatcaccgcgaatttcgttttgatctctcgaagattcctgaaggggaggcagtgactgcagcggagtttcgcatttacaaagactacattagggagcgctttgataacgaaacatttaggatcagcgtgtatcaagttctccaggagcacctaggccgagagtctgatctgttcctgctggattccagaacactctgggccagcgaggaggggtggttggtgtttgacataactgccacctccaaccactgggttgtgaacccaagacacaacctgggtcttcagctcagcgtcgaaaccctggacggacagagcataaatcctaaattagcagggctcattgggaggcatggacctcagaacaagcagcccttcatggttgccttctttaaagctactgaagttcacttcaggtccatcagatctaccggttctaagcaacgctcccagaaccgcagcaaaacccctaaaaatcaggaggcactaagaatggcaaacgttgccgaaaacagctctagcgatcagcgccaagcctgcaaaaagcacgaactttacgtgagctttagggacctcggctggcaggattggattatcgcaccagagggatacgctgcttactattgcgagggtgaatgcgcatttccactgaatagttacatgaatgctacgaatcacgctatcgtccagacactcgtacacttcataaaccccgagaccgtacctaagccatgttgtgccccaacacagctgaacgcaatttctgtgctatatttcgacgatagcagtaacgtcatcctaaagaaatatcggaatatggtggtgagggcctgtggctgccactag

SEQ ID NO: 2401 - DNA, 1098 bp, synthetic construct
  misc_feature 1..1098: note = source = /note="Description of Artificial Sequence: Synthetic coding sequence"
  source 1..1098: mol_type = other DNA
atgcatgtgaggtctctgagggccgccgccccccactcatttgtcgccctgtgggccccgctgttcctgctccgatccgcccttgcagactttagcctggacaatgaggtgcacagcagttttatccatagaagactgcggtctcaggagcggagagagatgcaacgcgaaattttaagcattctggggctgccacacaggcctcgcccccacctacagggaaagcataatagcgcgcccatgttcatgctcgatctgtacaacgccatggccgtagaggaagggggcgggccagggggccagggattctcatatccctataaggccgtcttttctactcaggggccaccacttgcctcactccaagactcccacttcctaacagatgccgatatggtaatgtccttcgtgaacttggtggagcacgataaggagttcttccatccacgttatcatcatcgcgagttccggtttgacctgagcaagatacccgagggcgaggctgtgaccgcggctgagtttaggatctataaggactatatccgagagcggtttgataatgaaacattccggattagcgtttatcaagtgttacaggagcatttgggaagggaatctgacctattcttgttagatagcaggacgctctgggctagcgaagaaggctggcttgtgttcgacatcaccgccacgtcaaatcactgggtcgtgaacccaaggcataatttggggcttcagctgtccgtcgagactttggatgaaaatagctccagcgaccaacgtcaggcttgcaagaaacatgagctgtacgtgtcattccgtgatcttgggtggcaagactggattattgcacctgagggctatgccgcttactactgcgagggcgaatgtgctttcccgctaaatagttatatgaacgctactaaccacgccatcgttcagacacttgtgcactttatcaatcccgaaaccgtccctaaaccatgttgtgcccccacccagctgaatgctatatccgtgctttatttcgacgactcttccaacgtaatcctgaagaagtatcgcaacatggtcgtgcgagcctgcggttgtcattag

SEQ ID NO: 2402 - DNA, 1656 bp, synthetic construct
  misc_feature 1..1656: note = source = /note="Description of Artificial Sequence: Synthetic coding sequence"
  source 1..1656: mol_type = other DNA
atggcaggtgacctgagtgctgggttcttcatggaagagctgaacacctataggcagaaacaaggggtggtgctcaaatatcaagagctgccaaatagcggacctccacacgatcggcgttttacgttccaagtgatcatcgacggccgcgaatttccagaaggggagggacggtccaaaaaggaggccaagaatgccgccgcgaagctagctgtcgaaattttaaacaaagaaaagaaggcggtgtcgccacttctgctgacaacgaccaacagcagtgaaggactgagcatggggaattacatcgggctgataaatcggatcgcccaaaagaaaagactcacagtgaactacgagcagtgtgcttctggcgtacatggccctgaagggttccactacaagtgcaagatgggccagaaagaatacagcatcggcacaggctcaactaagcaggaagctaagcagttggctgcaaagctagcttatttgcagatcctctctgaagagacttccgtgaaatcagactaccttagttcaggctctttcgccaccacctgtgagtctcagagcaactctctcgtgacatccacacttgcaagcgaaagttcctccgagggagattttagcgccgatacaagcgagattaatagcaatagcgattctctgaacagcagcagcttactgatgaacgggctccgcaacaatcagcggaaggccaagaggagccttgcaccacgctttgacctaccggacatgaaggaaactaaatataccgtggacaaacgtttcggaatggatttcaaagagattgaactcatcgggagtggcgggttcggccaggtgtttaaggcaaagcaccggatagatggaaaaacatacgtcattaaacgtgtgaagtacaacaatgaaaaagctgaacgggaggtaaaggctctcgccaagctagaccacgttaatatcgttcactataacggctgctgggatggcttcgattatgatccagagacttcagatgactctctggaatctagtgattacgatccagaaaatagcaaaaatagcagccgcagcaaaaccaaatgccttttcatccagatggaattttgcgacaagggcaccctagagcagtggattgagaaacgacgaggcgagaagctggacaaggtgcttgcattggagctatttgaacaaattacgaaaggagtggattatatccactccaagaagctcatccacagggatcttaaaccctcaaatatcttcctcgtggacaccaagcaggtgaaaatcggcgattttggcttagtgacctctctcaagaacgatggcaagcgcacacggtcaaaaggcaccctgcgctacatgagccccgagcagatctcttctcaggactacggaaaggaagtggacctctatgcgctgggcctgatccttgccgagctgcttcacgtgtgcgatacagccttcgaaaccagtaagttttttactgacctgcgggacggcattatatctgatatcttcgataagaaggaaaaaactctactgcagaaattgctcagcaagaagccagaggacagacccaacacatctgagatcctaagaactttaactgtgtggaaaaagtctcccgagaagaacgagcggcatacatgttag

SEQ ID NO: 2403 - DNA, 366 bp, synthetic construct
  misc_feature 1..366: note = source = /note="Description of Artificial Sequence: Synthetic coding sequence"
  source 1..366: mol_type = other DNA
atgaccaggatcctcacagccttcaaggttgtcaggaccctgaaaaccggcttcggtttcaccaacgtgaccgcccaccagaagtggaagtttagccggccagggatcagactgcttagtgtcaaggcccagacagcacatatcgttttagaggatggcactaagatgaaaggttacagtttcgggcacccctcctccgtggcgggagaagtcgtctttaacacgggcctagggggctatccggaggctataacagacccagcgtataagggacagatactcaccatggccaatccaattatcgggaacggtggagcacctgacacaactgctttggacgaattgggtctgtctaagtatctgtag

SEQ ID NO: 2404 - DNA, 4521 bp, synthetic construct
  misc_feature 1..4521: note = source = /note="Description of Artificial Sequence: Synthetic coding sequence"
  source 1..4521: mol_type = other DNA
atgccccagataataaaaatgacaagaatattaaccgcatttaaggtagtccgtacactcaagactgggtttggttttacaaatgttacagctcaccaaaaatggaagttcagcaggcctgggattcggttgctgagtgttaaagcccaaacagcacatattgtgctggaagacggtactaaaatgaagggatactcttttggccacccatccagcgttgcaggtgaagtggtgttcaatactggcttgggggggtacccagaggcgatcaccgacccagcttacaaaggccaaattctcaccatggcaaatcctatcataggaaatggcggagcccctgataccaccgccctcgacgaacttgggctgtccaaatacctggaatcaaatggcatcaaagtttctgggctgctagtattggactatagcaaagattataatcactggctggctactaaatcactggggcagtggctacaggaagagaaagtgccagcaatttacggtgtggatacccgtatgctgaccaaaatcattcgcgataagggtaccatgcttggcaagatcgaattcgaaggtcagcctgtggacttcgtggaccccaacaagcagaatctcattgctgaggtgtccaccaaagacgtcaaggtttacgggaaggggaatcccacaaaagtcgttgccgtagactgtggaattaagaataatgtgatccggctactggtaaagcgaggtgccgaagttcacctggtcccttggaaccacgatttcaccaaaatggagtacgacgggatcctgatagccgggggccctgggaatcccgcgctggccgagcccctgatccagaatgtgaggaaaattctcgaatcggacagaaaggagcccctgttcggcatctctactggaaacctgattaccggactggcagccggagccaagacttataaaatgagcatggccaacagaggacagaaccagcctgtcctgaatattactaataaacaggccttcattacagctcagaatcatggctacgctctggataatacactcccggctggctggaagccactgttcgtaaatgttaatgatcagaccaatgagggtatcatgcacgagagcaaaccctttttcgctgtgcagttccaccccgaagtcactcccggccccatcgatactgagtacctctttgactcattcttctcactcatcaagaagggcaaggccaccaccattactagtgttctgccgaagcccgcgttggtagcgagccgggttgaagtgagtaaagtgctgatactgggctccgggggactcagcattggtcaggctggtgagttcgattacagcggcagtcaagctgtgaaagcaatgaaggaggaaaacgtgaaaacggttctgatgaaccccaacatagcaagcgttcagaccaacgaggttggccttaagcaggctgacacggtctactttcttccaattacaccccagtttgtgacagaggtaataaaggctgagcaacccgatggactgattttgggcatgggaggccaaacggcgctgaactgtggcgttgaattattcaaaagaggcgttctcaaagagtatggcgtgaaagtgctcggaacgtccgttgaaagtatcatggccaccgaagacagacagctcttttccgataagctgaatgaaataaacgaaaaaattgctccctccttcgctgtggaatctatcgaagacgctctcaaagccgctgacactatcgggtaccccgtgatgattaggtcagcttacgcgctcggtggcttaggaagcgggatctgtcccaatcgggagactctgatggatctctcaactaaagcttttgctatgacgaatcaaatactggtcgagaaatcagtgactggatggaaagagattgaatatgaggtggtgcgtgacgctgatgataactgtgtaaccgtgtgcaacatggagaacgttgatgcgatgggggtccatactggggatagcgtggtagtggcacccgcgcagaccctgagcaatgctgaattccagatgttgagacgaacaagcataaatgtagtccgccatcttggtattgtcggcgaatgtaatatccaatttgcgctgcaccccacctcaatggagtattgcattatcgaagtaaatgcaaggctctcaagaagctccgccctcgccagcaaagccaccggttatccattggcctttatcgcagccaagatcgccctgggcatcccactaccggaaataaaaaacgtggtgtccggaaagacatcggcatgctttgaaccctcacttgattacatggttactaaaatcccacgatgggacctggacagatttcatgggacttcaagtcgcatcgggagctctatgaagagcgtgggggaggtcatggctatcggccggacctttgaagagagcttccagaaggctttacggatgtgccatccgtccatcgagggtttcaccccacgcctacccatgaataaagaatggccatctaacctcgatcttcgaaaggaattgtcagagccatcatccacccgcatatatgccattgccaaggcgattgacgataacatgtctctcgacgagatagaaaagctgacctatatagacaagtggtttctgtacaaaatgcgtgacatccttaacatggagaaaactcttaaggggctgaattctgaatcaatgactgaggaaacactcaaacgggccaaggaaatcggatttagtgacaagcaaataagcaaatgtctcggcctgacagaggcacagacccgagaactgcggcttaaaaaaaacatccatccttgggtgaagcagatcgatactctggccgctgagtatccaagcgtgacaaactacctgtatgttacttacaacggccaggaacatgatgtgaacttcgatgaccacggtatgatggtgctcggttgtggcccgtaccatattgggtcaagtgtagaattcgactggtgcgctgtctcttccattaggaccctgcgacagttggggaaaaagactgtggtggtcaactgtaaccctgagaccgtctctactgatttcgacgagtgtgataagctgtactttgaagagctctcgttagagcgcatcctcgatatttaccatcaggaggcctgcggtggctgcattatctccgtcggtggacagataccgaacaatctggccgtgcctctatataaaaacggtgtgaagatcatggggacttccccacttcagatcgacagggcggaggatcgaagtatttttagcgcagtcctcgacgagctgaaagtggctcaggcaccctggaaagctgtaaacaccctaaatgaagccctggagttcgccaagagcgtggactacccttgccttcttaggccttcttatgtactgtccggcagcgccatgaacgtcgtgttcagtgaagatgaaatgaagaagttccttgaggaggcgaccagggtgagccaggagcaccccgtcgtactgacgaaatttgtagaaggcgcaagggaggtcgagatggatgccgtgggcaaggatggaagggtcatcagccacgccatctccgaacacgtggaagatgccggggtgcacagcggagatgcaacattgatgctgccgactcagaccatctcgcaaggggctattgagaaggtgaaggacgcaaccagaaagatcgccaaggcctttgccatcagcggaccttttaatgtacaatttctggttaagggaaacgatgtcctggtcatagagtgcaacttaagagcctcacggtcctttcctttcgtctcgaaaaccctgggagtagacttcattgatgtggcgacgaaagttatgatcggagaaaatgtggatgaaaagcatctgccaaccttggatcaccctataatccctgctgattatgtggctatcaaggcccccatgttttcctggcccagattgcgggacgctgaccccattctgaggtgcgagatggcctcaacgggcgaggtcgcctgttttggcgagggtattcatacagcattcctcaaagccatgttatccaccggattcaagattcctcaaaagggcattctcattggaattcagcagagttttcgaccacgctttctgggcgtggctgagcagttgcataacgagggctttaaactcttcgcaaccgaagctacctccgattggttgaatgctaacaacgtacctgctacccccgtagcttggccttcacaggaagggcagaatccatccctgagcagcatcaggaagcttatccgagacggctctatagatctcgtgattaacttgcccaacaataataccaagtttgtccacgacaactatgtcatccgacgcaccgccgttgattcgggaatcccactgcttacgaacttccaggtgacgaaattgtttgccgaagccgttcagaagtcccgcaaagttgactcgaagagcctgttccactacaggcaatatagtgccggaaaggctgcatag

SEQ ID NO: 2405 - DNA, 3150 bp, synthetic construct
  misc_feature 1..3150: note = source = /note="Description of Artificial Sequence: Synthetic coding sequence"
  source 1..3150: mol_type = other DNA
atgaaagaggagaatgtcaagacggtcctgatgaatcccaacattgcttccgtccaaacaaatgaagtgggccttaaacaggccgatacagtctattttctgcctatcacccctcagtttgtcaccgaggtgatcaaagcagaacagccggacgggttgatcttaggcatgggcggccagaccgcgctcaactgcggggtggagctgtttaagagaggggtcctcaaagagtacggggtgaaggtgttggggacatctgttgagtcaattatggctacagaggacagacagctgttctccgacaagctgaacgagattaatgagaagattgcaccgtcttttgccgtcgagtcgattgaggacgcattgaaggccgcggacacaattgggtatccagttatgattcgatccgcctatgccctgggtggactggggtctgggatttgtcccaatcgcgagacactgatggacctgagcaccaaagccttcgctatgaccaaccaaatacttgtggaaaagagtgttaccgggtggaaagagatcgagtatgaagtcgtccgcgacgcagatgacaattgcgtgactgtgtgtaacatggaaaacgtggacgccatgggcgtccacacgggcgactctgttgtcgtcgctcctgctcagaccctcagtaatgccgagttccagatgctgaggcggacctccataaacgtggtgaggcacctggggatcgtcggcgaatgcaatatccagttcgctcttcaccccacctcgatggagtactgcatcatcgaagttaatgcccgcctgagtcggtcatccgctctggcgagcaaagcaactggataccctctagctttcatagcggcaaaaatcgcactagggatacccctgcccgagatcaagaatgtggtttcagggaaaactagcgcctgttttgagcctagtctggactatatggtgacgaagatcccccgctgggatttagatcggttccatggtacatcatccagaattggaagtagtatgaagagcgttggcgaggtaatggctattggccggaccttcgaagaatcctttcagaaggccctacgaatgtgtcacccaagtatcgagggctttactcccagactgcctatgaataaggagtggccttccaacctggacttgcggaaggaactctccgaaccatcttctaccaggatttacgcaatagccaaggcaatagacgacaatatgtcactcgatgagatcgaaaagttgacctatatagataaatggtttctttataagatgcgggacattttgaacatggagaagacactcaagggtctaaattctgaatctatgaccgaggagaccctgaagcgcgccaaggagatcggcttcagcgacaagcaaatctctaaatgtcttggacttactgaggcacaaacccgggagctgaggctgaaaaagaatatacacccctgggttaagcagattgatacacttgccgctgagtaccccagcgtcaccaactatctgtatgtgacttacaacggtcaggagcatgacgtaaatttcgatgaccacggcatgatggtgttgggctgcggaccctaccacattgggagctccgtggagttcgattggtgtgcagtctcatccattaggactcttcgtcagctcgggaaaaagacagtcgtggtaaattgtaaccccgagacagtcagtaccgatttcgacgagtgcgataagttgtactttgaggagctgtcactggagagaatcctagatatctaccatcaggaagcctgcggggggtgtatcatctccgtcggcggccaaatccctaataacttggcagtccccctgtacaaaaacggggtgaaaatcatgggaacttcccccctgcaaatcgacagagccgaggaccggagcatcttttcggctgtgttggacgagctgaaagtggcgcaggccccctggaaagccgtgaacacactaaacgaagcacttgaatttgcaaagagtgttgattatccttgcttgcttcgcccctcttatgttcttagcggatcggccatgaacgtggtgttcagtgaagacgagatgaaaaaatttctggaggaggcgactcgggtctctcaggaacatcctgtcgtcctgactaagttcgtggagggagccagggaggtcgagatggatgccgttggcaaggacggccgagtgattagtcacgccatatccgagcacgtagaggacgcgggcgttcactccggcgacgctaccctgatgctgcccacacagaccatcagccagggtgccatcgagaaagtgaaagatgcaaccaggaagatcgccaaagcattcgctatcagcgggccattcaacgtccagtttttggtcaagggaaacgacgtgcttgtcatcgagtgtaacctgcgagctagccggtcatttccgtttgtgtcaaagacactaggggttgatttcattgacgttgccaccaaggttatgataggggagaatgtggacgagaaacatttgccaacacttgatcacccaatcatcccagccgattacgtggcaattaaggcacccatgttctcatggcctagattgagagatgctgaccctatactgcgatgcgagatggcctccacaggtgaggtggcttgctttggagaagggattcatacagcctttcttaaagccatgttaagcacggggtttaagattccacagaagggcattctcatagggattcagcagtcattccgcccgcgcttccttggggtggcggagcaattacataacgaaggctttaagctcttcgcgaccgaggcgacaagcgattggctgaacgccaacaacgttcctgctaccccagtggcatggccatctcaggagggacaaaatccttctctgtcttcgatccgcaaactgatccgcgatgggtccatcgatttggtgattaatctgccaaacaacaacaccaaattcgtgcatgataactacgtaataagaaggacagccgtagactcaggcataccgcttctgacaaactttcaggttacgaaactttttgctgaggcggtgcagaagtcccggaaggtggattccaagtctctgttccattatcgccaatattctgctggaaaggcagcatag

SEQ ID NO: 2406 - DNA, 366 bp, synthetic construct
  misc_feature 1..366: note = source = /note="Description of Artificial Sequence: Synthetic coding sequence"
  source 1..366: mol_type = other DNA
atgactcgcatacttacagcattcaaggtcgtgcgaacactgaagactggtttcgggtttacgaatgtcaccgctcatcagaagtggaagttcagccgaccaggaattcgcctgctatccgtaaaggcgcaaacggcccacatcgtactcgaggacgggactaaaatgaagggatactctttcggtcacccaagcagcgtggctggagaggtagtcttcaacacaggccttggaggctaccctgaagccataactgatcccgcctacaagggccagatactcaccatggcaaatccaataattgggaatggcggcgcccccgacactaccgccttggacgagttaggtctgagcaaatacctgtag

SEQ ID NO: 2407 - DNA, 1542 bp, synthetic construct
  misc_feature 1..1542: note = source = /note="Description of Artificial Sequence: Synthetic coding sequence"
  source 1..1542: mol_type = other DNA
atgacacgtatcctgactgcgttcaaggtggtgcgcacgctcaaaactggattcggattcaccaacgtgaccgcacaccaaaagtggaagttcagccgtccgggtatcagactgctgtccgttaaggctcagactgcacacattgttttggaggatggcaccaagatgaagggctattcttttggacacccttcttcagtcgcgggcgaggtggtgttcaataccggactgggagggtatcccgaggctattacggaccccgcttataaaggtcagatccttactatggccaatccaattattggtaacggcggcgcgcccgataccacagcattggacgagttgggactcagtaagtacctcgagagtaacggcattaaagtgtcaggactgctggtgttggactattcaaaagactataaccactggcttgcaacaaagtctctcggccagtggctacaggaagagaaggtgcccgccatttatggagttgatactcggatgctcaccaagataattcgggataaaggcacgatgttgggtaaaattgagttcgaaggacaacccgtggattttgtggatcccaacaagcaaaacctaattgcggaagtctcgacaaaagatgtcaaagtgtatggcaagggcaatcccacaaaggtggtcgctgtggattgtggcattaagaataatgttattcgactgcttgtcaaaaggggtgctgaagtacacctcgtcccctggaatcatgatttcaccaagatggaatatgatggcatccttatagctggcggtcccggtaatccagccctcgccgagccattgatccagaacgtgcgaaaaattctagaaagtgataggaaggagcccctgttcgggatctctaccggaaatctgatcacaggcctggcagccggggctaagacttacaagatgagtatggcaaatcgtggccaaaaccagcctgtcctaaacatcacaaataaacaggcctttatcaccgcgcagaaccatggttatgccctcgacaatacccttccggctgggtggaagcctctcttcgttaacgttaacgaccagacaaatgaaggaatcatgcacgaaagcaagccgttttttgcggtgcagtttcatcctgaggtgacgcccggaccaattgacaccgagtacctgttcgattcatttttctctctcatcaagaaggggaaagccaccactattacatccgttttgcctaagcctgcccttgtggccagccgcgttgaggtgagcaaggtgctgatattgggctcaggcggtctcagcatcgggcaggctggggagttcgactactctgggtcccaggccgtgaaggctatgaaggaagagaatgtcaagactgtgctcatgaacccgaacatagccagtgtgcagaccaatgaagtaggtttgaagcaggccgataccgtgtacttcctgccgattacaccccagttcgtcaccgaggttataaaagctgaacagcccgacggtcttatcctgggtatgggagcacgccagttgtag

SEQ ID NO: 2408 - DNA, 4527 bp, synthetic construct
  misc_feature 1..4527: note = source = /note="Description of Artificial Sequence: Synthetic coding sequence"
  source 1..4527: mol_type = other DNA
agacccagaccacagataatcaaaatgacacgcatcttaactgcgttcaaggttgtgaggacactgaagactgggtttggtttcacaaacgttactgcccaccagaaatggaagttttccaggcccggaatacgactcctcagcgtgaaagcccaaaccgcccatattgtactggaagatgggactaagatgaagggttactcctttggacacccaagctccgttgcgggcgaagttgtttttaacacaggattgggaggctaccctgaggctataacagaccccgcctataaggggcagatactgacaatggcaaaccctatcattggaaatgggggtgctccagataccaccgccctggatgagctcggcctctctaagtacctggaatccaatggcattaaggtgagtggactgctagtgttggactacagtaaagactacaaccactggcttgctacaaaatctctgggccagtggttgcaggaagagaaggtaccagcaatttatggggtggatactcggatgctgacaaagattattagggataaaggcactatgttgggaaagattgaattcgaagggcagcctgtggactttgtggaccccaataaacagaacctcattgccgaagtgtcaactaaggacgtgaaagtatacggaaaaggtaaccctaccaaagtggtggccgttgattgcggcattaaaaacaatgtgattcggctgcttgtcaaaaggggcgctgaagtgcatctggtaccctggaatcatgacttcacgaaaatggaatacgacggtatcctcatagccggcggaccgggcaatccggctctggctgaaccactcatccagaatgtccggaaaatcctcgaatctgatcgtaaggaacccctgtttgggatctccacagggaatctgattaccggactcgccgccggcgccaagacctacaagatgtctatggccaaccgcggacagaatcagcctgtgctgaatatcaccaacaaacaagctttcataaccgcccaaaatcacggctatgctctggataacaccttgcccgcaggctggaagccgctgttcgtgaacgtgaatgaccaaactaatgagggcatcatgcacgagtctaagccgttcttcgccgtccagttccaccccgaggtcacacccgggccaatagatactgaataccttttcgactccttttttagcttgattaaaaaagggaaggccaccacaataacatcagtccttccaaagcccgcgcttgtcgcaagtagagttgaggtcagtaaggtactgatactagggtctgggggcctaagcatagggcaggctggggaattcgattatagtggttcccaggcagttaaagcgatgaaggaagaaaacgtgaagactgttctcatgaacccgaatattgcctcagtacagaccaacgaggtgggcttgaaacaggcagataccgtctatttcctgccaatcacaccacagtttgtaactgaagtgatcaaggccgagcagccagatggtctgatcctggggatgggcggtcaaactgcattaaactgcggggtcgaactattcaaaaggggcgttctgaaggaatacggtgtgaaggttttgggcacttctgtcgaatccatcatggccaccgaagataggcagctattctctgataaactcaatgagattaatgagaagatcgcccccagctttgctgtcgaaagcatcgaagacgccttgaaggccgccgacaccataggatatcctgtgatgatcaggtctgcgtatgccttgggggggttgggatcaggaatttgtcctaatcgcgagactctgatggatctctccacaaaagcattcgccatgaccaatcagatcctggtcgaaaaatcagttaccgggtggaaggagatcgagtatgaggtggtccgggacgccgacgataactgcgtcacggtgtgcaatatggagaacgtcgatgctatgggagtccatacaggagattctgtggtggtagctccagctcagacactgtccaatgctgaattccagatgctcagaagaacctctattaacgttgtcaggcatttggggatcgtgggagagtgcaatattcagttcgccctgcaccccacaagcatggagtattgtatcatagaggtgaatgccaggttgtccaggagttccgcgctagcctcaaaagccaccggatatccattggcatttattgctgccaaaatcgctctcggtattcccctgccggaaataaaaaatgtggtgtccggaaaaacctccgcttgctttgaaccttccctcgactatatggtgacaaaaatcccaagatgggatctcgataggttccatggaacatctagtcgaatcggctccagcatgaagagcgtcggtgaggtgatggccatcggtaggacattcgaagagagcttccagaaggccctccggatgtgccatccgtctatcgagggtttcacgccccgactgcccatgaataaggaatggcccagtaatctcgaccttcggaaggagctgagcgagccctcttctactcggatctatgccattgcaaaggcaatcgacgacaatatgagcctcgatgagatcgaaaagcttacatatattgataagtggtttctttataagatgagagacatcctgaacatggaaaaaacactcaagggcttgaactccgaatctatgaccgaagaaaccctaaaaagagcaaaagagattggcttcagcgataagcagatctctaaatgtttaggattgacagaagctcagacccgcgagctgcgcctgaagaagaatatccacccatgggtcaagcaaatcgacactctggcagcagaatatcccagtgttaccaattacctctatgtgacctacaatggacaggaacacgatgttaattttgacgaccatggcatgatggtgctgggatgcggcccttatcacatcggatccagcgttgaattcgactggtgcgccgtgagctccattcgtacgctgcgccaactcggaaagaagaccgtcgttgtgaattgcaaccccgaaaccgtgtcgactgactttgacgagtgcgataaattgtactttgaagagctgtcactggaacgcattctggacatctaccatcaagaggcatgcggggggtgtatcatcagcgtaggtggccagattcccaataacttggctgtaccgctgtataagaatggtgttaagataatgggcacttccccccttcagattgacagagccgaagatcgatcaattttttccgcggtgttagacgaacttaaggtggcccaggctccttggaaggccgtgaacacgctcaacgaagctctagagttcgcaaaaagcgttgactacccctgcctgctgcgaccctcctacgtcctgtccggaagtgccatgaatgtggtcttcagcgaggatgagatgaagaagttcctcgaggaggcaacacgcgtctctcaagaacaccccgtggtcctgactaagttcgttgagggagccagggaagtcgaaatggatgccgttggcaaggatggccgcgtgattagtcatgcaatcagcgagcatgtggaggatgctggcgtccattcgggcgacgccacgctgatgctgcccacccagacaatctcacagggagccatcgagaaagtgaaggatgcgacacgcaaaatagctaaagccttcgccatctccgggcctttcaatgttcagtttttagtgaagggaaacgatgttcttgtgatagagtgcaatctcagagccagcagatcattccccttcgtaagtaagacactgggcgtggactttatcgatgttgctactaaggttatgatcggagaaaacgtggacgagaagcatctgcccacacttgaccaccccatcattccagccgattatgttgctattaaggctcccatgttttcctggcccagactgagagatgccgatccaatcttgcgttgcgaaatggcttcgactggagaggtggcttgctttggtgagggaatccatacggcttttcttaaagcgatgctaagcacgggatttaagattcctcaaaaagggatactaataggtatccagcagagctttcggcctcgcttcctcggtgtagcagagcagctccacaatgagggtttcaaactgttcgcaaccgaggccacatctgactggttaaatgctaacaacgtgcctgcgacaccagtggcttggccgagtcaggagggccagaatccctctctctcatctatcagaaagctgataagagacggctcaattgacctcgtgataaatctacctaacaacaacaccaagtttgtgcacgacaactacgtcatcagaaggacagccgtggacagtggaattcctctgctgaccaacttccaggtgaccaagttgttcgcagaggctgtgcagaaatccaggaaggtggattccaaatcattgtttcactatcggcagtatagtgccggtaaagcggcatag

SEQ ID NO: 2409 - DNA, 213 bp, synthetic construct
  misc_feature 1..213: note = source = /note="Description of Artificial Sequence: Synthetic coding sequence"
  source 1..213: mol_type = other DNA
atgacgcggattcttaccgcctttaaagtggtgagaaccctgaagaccggctttggatttacaaatgttaccgcccaccagaagtggaagttttcacggcctggtattagactgctctcagtgaaggcgcaaaccgcacacatcgtgctagaagacagggatgcagacactcctgcgccgctgctgaatcagcccgaaccccatgtgatctag

SEQ ID NO: 2410 - DNA, 606 bp, synthetic construct
  misc_feature 1..606: note = source = /note="Description of Artificial Sequence: Synthetic coding sequence"
  source 1..606: mol_type = other DNA
atgagccggcgggaggggtccctggaagatccacagacggacagctctgtgagcctgttgccccacctggaggctaaaatccgccaaacccacagcctagcccacctcctcactaagtatgccgagcagcttctccaagagtacgtccagctgcagggcgatccctttgggttaccaagtttctccccaccaagattgccagtggccggtctctcagcacctgccccgagtcacgccggactgcccgtacatgagcggctgagactcgacgccgcggccctcgccgcacttccaccacttctggacgccgtgtgcaggcggcaagctgagctgaaccccagagctcctaggctgttgcgtagattggaagacgccgctcggcaggccagggctcttggcgccgcggtcgaggctctgctcgccgctctgggcgccgctaataggggtccccgtgctgagccacccgccgccaccgcatctgccgctagcgccacaggtgtgttccccgccaaggtcctggggctgcgggtatgtggcctgtacagagaatggctcagccgtaccgagggtgatctgggtcagcttctgccaggagggtcagcctag

SEQ ID NO: 2411 - DNA, 603 bp, synthetic construct
  misc_feature 1..603: note = source = /note="Description of Artificial Sequence: Synthetic coding sequence"
  source 1..603: mol_type = other DNA
atgagccgaagggagggctctttggacccacagaccgacagctctgtttctcttctgcctcaccttgaggcgaagataagacagacacactctttggcccacctcctcacaaagtacgccgaacagctactgcaggaatacgttcaattgcaaggagacccgtttggtctcccgagttttagcccgcctaggcttccagttgccgggcttagcgccccagccccgagccacgccggacttccagtccacgaaagacttaggctggacgccgccgcattggccgctcttccccccctgttggacgcggtgtgccggcgccaggccgaactcaacccaagagcaccacgcttgctgagacggcttgaagacgctgctcggcaagcaagggccttgggggccgctgttgaggcactgttagccgcactgggcgcggcaaacaggggacctcgggccgagccaccagcagctactgcatccgcagcctcagctaccggagtatttccggcaaaagtccttggactccgagtgtgtgggctgtatcgcgagtggctgagcagaaccgagggtgatcttggccaattactgcccggcgggtctgcgtag

SEQ ID NO: 2412 - DNA, 513 bp, synthetic construct
  misc_feature 1..513: note = source = /note="Description of Artificial Sequence: Synthetic coding sequence"
  source 1..513: mol_type = other DNA
atgaagacgcagcgggacggtcactccctggggaggtggtcacttgtgttgctcttgctaggactcgtaatgccccttgctataatcgctcaagttttgtcctataaagaggctgtacttcgggccatcgacggaataaaccaaagaagctctgacgcgaacctataccgcctgcttgacttggaccctagaccgaccatggacggggatcctgacacccctaaaccagtgagcttcaccgtgaaggagacagtatgccctcgaaccacacaacagagtcctgaagactgtgacttcaagaaggacggtctggttaagaggtgtatgggaaccgtcacactgaaccaggcccggggttccttcgatatttcttgtgataaggacaacaagcggtttgctctgctgggagatttctttcggaaaagtaaggagaagataggcaaagagtttaagaggatcgtccagcgaatcaaagactttctgcggaacctggtgccgagaactgagagttag

SEQ ID NO: 2413 - DNA, 1692 bp, synthetic construct
  misc_feature 1..1692: note = source = /note="Description of Artificial Sequence: Synthetic coding sequence"
  source 1..1692: mol_type = other DNA
gcttgttgctgtggaggcggttgcacgtgttgcggttgcacatgcacaactggttgttgcaccacttgcacatgctgtgcttgcgcctgcacgacaggaactactaccggtgctggggcctgttgtactggtgggtgcgccgctggagggacgggctgcgggggtgcgggctgttgctgcacatgctgcgcgggagctgcaggtacagggtgcggcggcacctgcgccgctggatgcggagggtgtgccggttgcggtggggcaggagcctgcggcggctgtggagccggatgttgcgccggcggcgctgcatgttgtacctgttgctgctgctgttgtggctgcgggacctgctgctgctgcgccgggtgcacaacgtgctgttgcgccggctgtgggaccggaggatgtgggggctgtggcggcgctgcttgctgttgttgctgtggaggcgccggcgcagcagcaggggccgccacagctgctgctggagcctgtaccggcggagccacagcatgtgccggggggacttgttgcgccacaactgcctgtggcacatgcgcgacaacatgcacggggtgcgccggcggctgctgcgccgcaacaacaaccgccaccggagctggtggcgctgcaacctgttgtgctgccggcgcaaccggcgcagctactacaactgggggcgccggatgcgccggcggagccggggccggcggctgttgtggcacaacgactgggacgtgcaccgggtgtgcggggaccggatgctgttgctgtgccggcggttgtaccggatgcacatgctgctgtgccgggtgcggatgtacaacatgttgttgtgcagcatgcgccggtgctgggggggcgtgctgcgcgacatgcactggagcgactggggctactacttgcgccacagcaggggggtgtgcatgcgccgctgcttgtgcaacaggggccgctgcaacaggggcctgtactaccacaggagccgccgggacaaccacttgttgtacgacatgtgcggctactgccgcggcggccgcgtgtgcaggcgcatgcgccgccaccgcaacaggaactacagccacctgcgcaggtgctacttgcgcggccgcctgcacttgctgtggcgcatgctgctgttgcgcagcctgcggagccggtgcaaccacttgttgcacgggtgccgccggcgctgcctgtaccggatgtggtgcgggaggcgccggtgggaccggtggtggatgttgtacgtgtacaacttgtgctggctgcggagcaggatgtaccgggggcgcctgtacgggttgtacctgttgttgtactggaggagccggctgcgcatgcggcgctggcaccacatgcgctgggggagccgcaggggggtgtacttgtgctggcggagccgcaggcgctgggggcgcaggcgctgggtgtgccggatgtgcagctggctgtggcggtgctgccacagctacttgtacctgtggcgccactgggtgtgctaccgcagccactgggtgcgcgggcacaacgggcgggacagggggcggcggctgttgcgctaccggcgcttgtggcggtggtggatgctgctgtgggggtgctgcctgcacctgtgcctgttgcgctggttgcaccacagctggctgcgctggctgtggttgcacctgtggcggctgcactggatag

SEQ ID NO: 2414 - DNA, 555 bp, synthetic construct
  misc_feature 1..555: note = source = /note="Description of Artificial Sequence: Synthetic coding sequence"
  source 1..555: mol_type = other DNA
atggccgaccacctgatgctggccgaaggttatcgattggtgcagagacctccatctgcggccgctgcacatggccctcacgcgctcagaaccctgccaccttatgcaggtcccggcctggatagtggcttgcgcccgaggggcgctcctctgggtcctccccccccacgccagcccggcgcgctggcctatggggcctttggaccacctagtagcttccaaccatttccagcggtgccacctcctgctgccggtatcgcccatctgcagccagtagccaccccctaccccggccgtgcagcagctcctccaaacgccccaggggggcctcctggcccacagcctgctcccagtgcagccgctcctcctccgcctgctcacgctctcggcggcatggacgccgaactcattgacgaagaggctctcacatccctcgaactcgagctgggccttcaccgagtgcgcgagctgccagagctgttccttggccagagcgagtttgattgcttcagcgatctgggatccgctccacctgccgggagcgtcagctgttag

SEQ ID NO: 2415 - DNA, 3198 bp, synthetic construct
  misc_feature 1..3198: note = source = /note="Description of Artificial Sequence: Synthetic coding sequence"
  source 1..3198: mol_type = other DNA
atgaaaatccttatcctcggaatcttccttttcctgtgtagcacccctgcttgggctaaggagaagcactactacatcgggatcatcgagactacctgggactacgcttctgaccacggtgagaaaaaacttattagtgtggacactgaacattctaacatttacctgcagaatggaccagacagaatcgggcggctctacaagaaagcattgtatttgcagtatacagatgaaacgttcaggacaacgatcgagaagccggtttggctgggcttcctgggccctatcataaaagccgaaaccggggataaagtatacgttcatctgaagaatctggccagtagaccgtacactttccacagccacggcataacctattataaggaacatgagggggccatctatccagacaacaccactgattttcagcgcgcagacgacaaggtgtatcctggcgaacaatacacatacatgctgctggcaaccgaggaacagtctccaggggaaggagatggaaactgtgttacacggatttatcactcacacatcgacgcccctaaggatatagccagtgggcttatcggaccccttatcatatgtaagaaagattcactggataaggaaaaggagaagcatatcgacagggagtttgtcgtaatgttcagcgtggttgatgaaaatttcagctggtacctagaggataacataaagacctattgtagcgagcccgaaaaggtcgacaaagacaatgaggatttccaagaaagtaacagaatgtactctgtcaatggatacacattcgggtccctccccggactgagcatgtgcgcagaggatagggtgaaatggtacctgtttggtatgggcaacgaggtagacgtacacgccgccttttttcacggtcaggctctgaccaataagaactacagaatcgatacaatcaacctctttcctgcaacactctttgacgcctacatggtggcccagaatcctggggaatggatgctgagttgccagaatttaaaccatctcaaggccggattacaggcgttttttcaggtacaggaatgcaataaaagcagcagtaaagacaatatacgcggcaagcacgttagacactattatattgccgcggaagagatcatctggaactacgccccgtccgggattgatatttttactaaggaaaaccttacggcaccggggtccgattccgcagtattttttgagcagggcaccacccggatcggcggcagctacaagaagttagtttatagagagtatactgatgcctctttcaccaatcgtaaggagcgcggccccgaagaggaacatcttgggatactgggtcccgttatctgggcagaggtgggcgataccattcgagtaaccttccataacaagggtgcgtaccctctgtcaattgagcctattggagtaaggttcaataagaacaacgaaggcacatattattctccaaactataatcctcaatcaaggagcgtgcccccatcggctagccatgtcgcccctacagagacattcacttacgagtggacagttcccaaggaagtggggcccacaaacgccgaccccgtgtgtctggccaaaatgtactattcagcagtcgagcccaccaaagacatttttactgggctaatagggcctatgaagatctgtaagaagggatccctccatgctaacggaaggcagaaagatgtcgacaaggagttctatctgttccccactgtgtttgacgaaaatgagtcactgctcctggaagataatatccgtatgttcactactgctcccgatcaggttgacaaagaagacgaagacttccaggagtctaataagatgcactctatgaatgggttcatgtatgggaatcagccagggctgactatgtgcaaaggagattctgtcgtctggtacttatttagcgccgggaatgaagcagatgtacatggcatctacttttcggggaacacctacctctggcgcggagaaaggcgtgatactgcgaatctgttcccacagacatctcttacgttgcacatgtggcccgacacagaagggacatttaatgtggagtgtctgacgacagaccactacaccggcggcatgaaacaaaagtacactgtgaaccagtgccggagacagtcggaggactctactttttatctgggcgagagaacctactacattgctgccgtggaggtcgaatgggattattctccccagcgggagtgggaaaaggagctgcatcacctgcaagagcagaatgtgtctaacgctttcctcgacaagggggagttctatatcgggagcaaatataaaaaggtggtgtataggcagtatactgacagcacattccgtgtcccggtggaacgaaaggcggaagaggagcacctaggtattcttgggccacaactccatgctgacgtgggagacaaggtgaagattattttcaaaaacatggctacaaggccctatagtatccacgcacacggtgttcagaccgaaagctcgacagtgacacctacccttccaggtgagacactgacatacgtgtggaaaattccagagcgctccggggccggaacagaggattccgcttgcataccctgggcatactatagcaccgtggaccaggtgaaagacctatattcagggctaattggacctcttatcgtctgtcggcggccttacctgaaggtgttcaatccacggaggaaactggagttcgcgcttctgttccttgtgttcgacgagaacgaatcgtggtatctggacgataacatcaagacatacagcgaccatccagagaaagtaaacaaggacgacgaagagttcatcgaaagcaacaagatgcacgcaattaatgggcgtatgttcgggaacctccagggtctgaccatgcacgtgggcgatgaagtcaactggtaccttatgggcatggggaacgagatagacttgcataccgtgcactttcacgggcactccttccagtacaaacaccgcggcgtgtatagcagtgacgtctttgatattttcccagggacataccagactttggagatgttcccgcggacacccggaatctggcttctacactgtcatgtgaccgatcatattcacgcggggatggagaccacctacactgtgcttcagaatgaggatacaaagtcggggtag

SEQ ID NO: 2416 - DNA, 603 bp, synthetic construct
  misc_feature 1..603: note = source = /note="Description of Artificial Sequence: Synthetic coding sequence"
  source 1..603: mol_type = other DNA
atggccttcaccgaacactctccacttacgcctcatcgccgtgacctctgttcacgttcgatatggctggcaaggaaaataagatccgacttaacggccctgacggaaagctatgtaaagcaccagggacttaacaaaaacattaatctggactccgccgatggcatgcccgtcgcctcgaccgatcagtggagtgagctcactgaagcagaaaggttgcaagagaatttgcaagcgtacagaacattccacgtgctgttggctcgcttgttggaggaccagcaggtgcactttacaccaacagagggggactttcaccaggccatccacactctcttgcttcaggtggccgcttttgcttatcagatcgaggaattgatgatcttgctagagtacaagattcctcggaacgaagctgacggcatgcccattaacgtgggcgatgggggactttttgaaaagaaactgtggggactcaaagtgttacaggagctgagccagtggacagttcggtccatccacgatctgcggttcatatcatcacatcaaaccggcattcccgcccggggcagccattatattgctaataacaagaaaatgtag

SEQ ID NO: 2417 - DNA, 1869 bp, synthetic construct
  misc_feature 1..1869: note = source = /note="Description of Artificial Sequence: Synthetic coding sequence"
  source 1..1869: mol_type = other DNA
atggctcatgtgagaggactacagcttcccgggtgtttagccctggcagccctttgcagcttagtccattcacagcatgtgttcctcgccccacagcaagcccgatctctgctgcagagagttcggcgagcaaacaccttcctcgaagaggtaaggaagggtaatctggagcgggaatgcgtggaggaaacatgctcctacgaggaggcctttgaggctctggaaagtagtacagccaccgacgttttttgggctaagtacacagcctgcgagaccgcccggaccccaagggataaactggcagcttgtctcgaaggtaactgtgccgagggattggggacgaattatagaggccatgttaacatcacccgcagcgggattgaatgccagctatggcgctctaggtatccccacaagcctgagatcaacagtaccacccatccgggcgccgatctgcaggagaacttctgtagaaaccctgatagctctactaccggtccatggtgctacaccacagaccccactgtaagacggcaggaatgttccatccctgtttgtggacaggaccaggtgactgtcgcaatgacccctaggtctgagggatccagcgtgaatttgtcccctcccttagagcagtgcgtcccggaccgaggccagcagtaccagggacgactcgcagttacaactcacggactgccctgcttggcatgggccagtgcacaggccaaggctctgagcaaacaccaggactttaacagtgcagttcagctggtggagaacttttgtaggaacccggacggagatgaagaaggagtttggtgctatgtagcgggaaaaccaggtgattttgggtactgcgacctgaattactgcgaggaagcagtggaggaggaaaccggggacgggctggatgaggactccgaccgggccatcgagggaaggacagctacctcagaatatcaaaccttcttcaaccctcggaccttcggctccggggaggcagactgtggacttcgccccctctttgagaagaaatccctagaggataaaaccgaacgcgagctgctcgagagctatatagatggcagaattgtggaagggtcggacgccgaaattggcatgtccccctggcaggtcatgctgttccgaaagtccccccaggagttgttgtgtggcgccagcctgatttctgatcggtgggtgcttacagccgcacactgtttattatatccaccatgggataagaacttcaccgagaacgacttgctggtccgcatcggcaaacacagccgcactaggtacgaacgtaatatagaaaagattagtatgctggagaaaatatatattcacccaaggtataactggcgcgaaaatctggatcgggatattgcactaatgaaactcaaaaaacccgtagcatttagcgattacattcatccagtctgtttacctgatagggagactgcagcgtcgctgttacaggccggatacaaggggagagtcacgggatggggcaacctgaaagaaacttggacggccaacgtgggaaagggccaaccctctgttctacaggtcgtgaatctgccgatcgtagaaagacccgtgtgcaaagattctacacggatacgaatcactgacaacatgttctgtgcagggtataagcccgacgaaggcaaaaggggtgacgcttgtgaaggagactctgggggacccttcgtgatgaagagcccattcaacaataggtggtatcaaatgggtatagtaagctggggggagggctgcgacagagatggaaaatacgggttctatactcatgtctttagattaaagaagtggatacagaaggttatcgaccaatttggggagtag

SEQ ID NO: 2418 - DNA, 195 bp, synthetic construct
  misc_feature 1..195: note = source = /note="Description of Artificial Sequence: Synthetic coding sequence"
  source 1..195: mol_type = other DNA
ttgcagggagaattcctgccccaaccaaggcagcaacatcacggtactttggtcctgcactacagaccccaccgtgaagaggccggcatgcagcatccatgtttatggccaggctcctcccattgttccgacgattccaccttgcgaagactacagtgcgagagcgtgacctctatcggcgccgtgtgcccctag

SEQ ID NO: 2419 - DNA, 1752 bp, synthetic construct
  misc_feature 1..1752: note = source = /note="Description of Artificial Sequence: Synthetic coding sequence"
  source 1..1752: mol_type = other DNA
atggcccatgtaaggggactgcagctgcccggctgcctggccctggcggccctctgtagcttggtacacagccaacacgtgttccttgctcctcaacaggccaggagtttactgcagagagtgcgaagggccaatacttttctcgaggaagtgcggaaaggaaacctggaaagggagtgcgttgaggaaacttgctcctacgaggaagccttcgaggccttggagagtagcacagctacagatgtattctgggctaagtatacggcctgtgagaccgctcggactcctagagataagctcgccgcttgtctggaggggaattgcgccgagggcttgggcacaaactaccgtggccatgtgaacatcactaggagcggaatcgaatgccagctgtggcgcagtcgctacccacacaagcccgaaatcaattccacaacccatccgggggcagatctccaagaaaacttctgcaggaaccctgactcctctactacaggcccttggtgttatacaacagaccctaccgtgcgacgtcaggaatgcagcattcctgtgtgtggccaggatcaagtgactgtggccatgacaccaaggtctgaagggtcttccgtgaatctaagtccccccctggaacagtgcgtccccgacaggggccagcagtaccagggtcgcttagccgttactacgcacggactgccttgtctcgcgtgggcatcagcgcaggcaaaggccctgtcaaaacaccaagactttaactcagccgtgcaactggtggaaaacttctgcagaaatccagacggcgatgaagaaggcgtgtggtgctacgtggccggaaagcctggagacttcggctactgcgacttaaactattgtgaggaggccgttgaagaagagacgggtgatggcctcgacgaggacagtgatcgggccatcgaaggccgtaccgccacctctgagtaccagacattcttcaatcctaggactttcggctctggggaagccgactgtggactgcggcctctctttgaaaaaaaaagccttgaagataaaacggaacgcgaactgctggaatcatacattgacggcagaatcgtggaggggagcgatgctgagattggcatgtccccgtggcaggtgatgcttttcagaaaaagtccccaggagctattatgcggcgcaagcctcatttctgaccgatgggtgctgacggctgcccattgtctactgtaccctccctgggataaaaattttacagagaatgatctgctggtacgcatcggaaaacattctagaacccggtatgagcgtaatatcgaaaaaatttccatgttggagaagatctatattcatccatccctcctgcaggctggatacaaggggcgcgtgacaggctgggggaatctgaaggaaacttggacagccaatgttggcaagggccagcccagtgtcttgcaggtggtcaatctccctattgtggagcgtcccgtttgcaaggactctactcgaattcgcatcacggataatatgttctgtgctggctacaaacccgatgaaggtaagcggggggatgcatgcgagggagactccggaggaccattcgtcatgaagtccccgtttaataaccgctggtaccagatggggatcgttagctggggcgaggggtgtgaccgagacggcaaatatggcttttacacgcatgtgtttaggctcaagaaatggatccagaaagtcatcgatcagttcggggagtag

SEQ ID NO: 2420 - DNA, 888 bp, synthetic construct
  misc_feature 1..888: note = source = /note="Description of Artificial Sequence: Synthetic coding sequence"
  source 1..888: mol_type = other DNA
atggagacacccgcctggccaagagttccacgtcctgagacagctgtggcccggactctgctcctgggctgggtgtttgcccaagtcgctggtgcttctggcaccacgaataccgtggccgcctataatttaacgtggaaaagcacgaatttcaagaccatactggaatgggagcctaaaccagtcaatcaggtgtatacagttcagattagcaccaaaagcggagactggaagtcaaagtgtttctacaccactgatactgaatgcgatcttaccgacgagattgtcaaggacgtgaaacagacatatctggcgagagtgtttagttatcccgctggtaatgtcgagagcacgggtagtgcaggggaaccactgtatgagaatagtcccgaattcaccccatacttggagaccaatctgggtcagccaaccatacagtcgtttgagcaggtaggcacaaaggtgaatgtgaccgtggaggatgaaagaacactggtacgacgcaacaataccttcctgtctctgcgagacgtgtttgggaaagacttgatctacacactttactattggaagtctagtagttccgggaaaaaaaccgccaagaccaatacaaatgagttcctgatcgacgttgataaaggcgaaaattattgtttctcagttcaagctgtgatccccagcaggaccgtcaatcggaagtctactgatagtccagtggagtgcatgggccaggaaaagggagaattccgcgaaattttctacatcatcggagccgtcgtgtttgtagtgatcatcctcgtgataatccttgctattagtctgcataagtgcaggaaagccggagtcggtcaaagctggaaggagaactctcctctaaacgtttcatag

SEQ ID NO: 2421 - DNA, 717 bp, synthetic construct
  misc_feature 1..717: note = source = /note="Description of Artificial Sequence: Synthetic coding sequence"
  source 1..717: mol_type = other DNA
atggagacacccgcatggccgagagttcccagacccgagactgctgtggccaggaccctgctcctcgggtgggtgttcgctcaggtggctggagcctcgggaactaccaacaccgtggctgcctataacctgacttggaaatcaactaacttcaagactatccttgaatgggaacccaagccagtaaaccaggtgtatacagtccagatctccaccaagagcggggattggaaatctaagtgcttctacacaactgacaccgaatgtgacttgacagacgagattgtgaaggacgtgaaacaaacctatctggcccgtgtgttctcttaccccgccggcaatgtggagagtacaggctccgcaggcgaacccttgtacgaaaattccccagagtttacaccctacctggaaaccaatctgggtcagccgacaatccagtcatttgagcaggttggaacaaaggtgaatgttaccgtagaggatgaacggacattggttagacgcaacaatacatttcttagtcttagggatgtatttgggaaagatctgatctacactctgtattactggaaatcaagctcaagcgggaaaaaatattcaacttcgttagaactgtggtacctgtggtccagtagtctgagctccagctggctgtatctgtacacatccgtggagagacaggaatgggggagagctgggcgcaggactccacactag

SEQ ID NO: 2422 - DNA, 3807 bp, synthetic construct
  misc_feature 1..3807: note = source = /note="Description of Artificial Sequence: Synthetic coding sequence"
  source 1..3807: mol_type = other DNA
atgatcgcagcaccagagatccccaccgatttcaacctccttcaggaatccgaaacccacttcagtagtgacaccgacttcgaagacatagaagggaagaatcagaagcaaggcaaaggaaagacctgcaaaaaggggaaaaaaggcccagcggagaaaggcaagggtggcaatggtggtggcaaacctcctagcggccccaaccggatgaatggccatcaccagcagaatggagtcgagaatatgatgctattcgaggtagtaaaaatgggtaagtcagccatgcagtcagtagtggacgactggatcgagtcttacaagcacgatcgtgacatcgcacttctggatttaattaacttcttcatacagtgcagcgggtgtaagggcgtagtgactgccgagatgttcaggcatatgcagaacagcgagataattcgcaaaatgactgaggagttcgacgaagatagcggggattaccccctcacaatggcaggtcctcagtggaaaaagttcaaaagttcattttgcgagtttattggcgtgttggtgaggcaatgccagtacagtattatatacgacgagtatatgatggatactgttatcagtctcctgacgggcttgtccgattcacaagtaagagcattccgccatactagcactcttgcagctatgaagctcatgacagctctggtgaacgtcgctttaaatctcagcatcaacatggataacacacagaggcagtacgaggcagaacggaataaaatgatcgggaagcgcgccaacgaacggcttgaattgctgctgcaaaagcgaaaagaattgcaagaaaatcaggatgagattgaaaatatgatgaacgccatttttaagggagtgtttgtccaccggtatagagatgctattgctgagattcgcgctatttgtattgaggagatcgggatctggatgaaaatgtactccgacgcatttctcaacgattcctacttgaagtatgtggggtggactatgcatgataagcagggggaagttcggctgaaatgtttgaccgccctgcagggactttattacaacaaagagcttaattccaagctggagcttttcacatccagattcaaagatcgtattgtgtctatgactctggataaagaatacgacgtggccgttcaggctattaagctcttgacactggtgctccagagctccgaagaggtgctgaccgccgaagattgcgagaatgtgtaccatctagtatacagtgcacaccgccctgtcgccgtcgctgcaggagagttcctgtacaagaagctgttcagtcgccgggatcctgaggaagacggtatgatgaagaggagaggccggcaggggccgaacgccaacctagtgaagaccctcgtctttttcttcctggaatctgaactgcatgaacacgcggcatatctggttgactcaatgtgggactgtgcaacggagttgctcaaggactgggaatgcatgaactcacttctcctggaggaacccctgtcaggcgaggaagcactgacggaccgtcaggaaagtgctcttatagagataatgctgtgtaccatccggcaggccgccgagtgtcacccccccgtaggaaggggtaccggaaaaagagtactgacagccaaagagaaaaaaactcagcttgatgacagaacaaagataacagagctatttgctgtggctctgcctcagctgctggccaaatacagtgtggatgccgaaaaggtgaccaatctgctgcagctcccccaatatttcgatctggaaatttataccacagggaggcttgagaagcatcttgacgccctcctgagacaaattcgcaatatcgtcgagaaacacactgacacagacgtcctagaagcatgcagcaagacttaccacgccctgtgcaatgaggagttcacaatttttaatagggttgatatctcccgcagccagctcattgacgagctggccgataagtttaaccggctgctcgaggactttctgcaggaaggcgaggagcccgatgaagacgacgcctaccaggtgctgtccacactgaaacgtatcactgcttttcacaacgcccacgacttgtctaagtgggacttatttgcttgtaattataagcttcttaaaaccgggattgaaaatggagacatgcccgagcagattgtgatccatgcactgcagtgtacccactacgttatcttatggcaactggccaagattacggagtcatccagcacaaaagaggatttgctgagactgaagaagcaaatgcgggtgttttgccagatatgccagcattacctcactaatgtaaataccactgtgaaagagcaagccttcaccatcctctgcgacattctgatgattttcagtcaccagataatgtctggaggccgagatatgttagagcctttggtgtatacccccgattccagcctgcagagcgagctgctgtcatttattctggatcatgtttttattgagcaggacgatgataacaactccgccgatgggcaacaagaggacgaagcatcgaagattgaagcactgcataaacgccggaacctgctggcagccttctgcaaactgatagtttataccgtggtggaaatgaataccgccgccgacattttcaagcagtatatgaagtattataatgattacggcgatatcatcaaagagaccatgtcaaagactaggcaaatagataagatccagtgcgcaaaaacactgattctgtccctccagcagctctttaatgaaatgattcaggagaacgggtacaactttgaccggtcctcaagcaccttcagtgggataaaagaactggcgagaaggttcgcccttacatttggcctggaccagctgaaaacaagagaggccatcgctatgctgcataaggatggtatcgagtttgccttcaaggagccaaacccacagggagaatctcaccctccactcaacctggccttcctggacatcctgtccgaatttagttcaaaattgctgagacaagacaagagaacggtgtacgtgtacctagagaaattcatgactttccagatgagcctgcggagggaagatgtttggctccctttgatgtcttaccggaatagcttactcgctggaggggatgacgacactatgtccgtcatcagcggtatatcttcacgcggcagcaccgtcaggagcaagaagagtaaacccagcaccggaaagaggaaggtagttgagggcatgcagctgagtcttactgaagaatcatcatcgtctgactccatgtggctgagtcgcgaacagacgctccatacacctgttatgatgcagacgccacagcttacaagtacaatcatgcgagagcctaaacgattaagacctgaagattcattcatgagcgtgtacccaatgcagaccgagcatcaccagacacctctcgattataatacccaggtgacctggatgttagctcagaggcagcaagaagaagcccgtcaacagcaagagagggcagccatgtcctatgtcaagctcaggactaatctgcaacacgccatcagaagaggcacctccctgatggaggatgatgaagagcctattgtggaagatgtgatgatgagtagtgaagggcgtattgaggatttgaacgagggaatggacttcgacaccatggacattgatcttccaccgagtaaaaatagaagagagagaaccgaactgaaaccggacttttttgaccccgcttctatcatggatgaaagtgtcctgggagtgtccatgttttag

SEQ ID NO: 2423 - DNA, 1272 bp, synthetic construct
  misc_feature 1..1272: note = source = /note="Description of Artificial Sequence: Synthetic coding sequence"
  source 1..1272: mol_type = other DNA
atgcaaagggtgaacatgatcatggccgagtcgcctgggctcatcaccatatgcctcttaggatacctgttgagcgccgaatgcaccgtgttcctcgaccacgagaatgcaaacaaaattctaaacaggcctaaaagatacaactctgggaaactggaggagtttgtgcaaggaaatttagagcgcgaatgcatggaggaaaagtgttctttcgaggaagccagggaagtgtttgaaaacacggaacgcacaaccgaattctggaagcagtatgtcgatgtcacttgcaatataaaaaatgggcgttgcgagcagttctgcaaaaactccgcggacaacaaggtcgtctgctcctgtacagagggttacagactggccgaaaaccagaagtcgtgtgagccagctgtgccctttccctgtgggagagtgagtgtttctcagacttctaaactcactagagcagaaacagttttccctgatgtagattatgtaaactcgacagaggccgagaccatcctggacaacataacacaaagcacacagagttttaacgattttacgcgcgtagtggggggcgaggatgccaagccgggacagtttccatggcaggtggtcctcaatggcaaagtggacgccttttgcggcggctcaatcgtaaacgaaaagtggatcgtgactgctgctcactgtgttgagaccggggtgaagatcacagtcgtagcgggggagcacaatatcgaggagaccgagcacacagagcagaagcgcaatgttatacgaatcattccccaccacaattataatgcggcaattaacaagtataaccacgacatcgccctgctggagctcgatgagcctctggtgctgaattcctacgttacgcccatctgcatagcggataaagagtatacaaacattttcttgaagtttggttccggatacgtatccggatgggggcgcgtgttccacaagggccgctctgccctggtgctgcagtacttgcgggtgcccttagtcgaccgcgccacctgcttgcgctcaacgaagttcacaatctataataacatgttctgtgcgggctttcacgagggcgggagagactcatgccagggtgactctggcgggccacacgtgacagaggtggagggtacctcattcctgactgggataatctcctggggtgaggaatgtgctatgaaaggtaagtacggcatctatacaaaggtatctcggtatgtcaactggattaaggaaaaaacaaagctaacctag

SEQ ID NO: 2424 - DNA, 6690 bp, synthetic construct
  misc_feature 1..6690: note = source = /note="Description of Artificial Sequence: Synthetic coding sequence"
  source 1..6690: mol_type = other DNA
atgttccctggttgccctcgcctctgggtactggtcgtactagggacttcctgggtggggtggggaagccagggaacggaagcagcacagctgaggcagttctacgtggctgcccagggcatcagttggtcctacagaccagaaccaactaacagttcattgaatctgtccgtcacatcttttaaaaaaatcgtgtatcgggaatatgaaccttatttcaaaaaggagaagccccaatccactatatcaggactcttggggcccactctttacgccgaggtgggggatatcattaaagtccacttcaagaataaggctgacaaacctctaagtatacaccctcaggggatccggtattctaagctgtcagagggcgccagctatttggaccatacctttcccgccgagaaaatggatgatgctgtcgctcccggtagagaatatacttacgagtggtcgatctcagaggacagcgggcccactcatgacgatcccccctgtctgacacacatctactacagccacgagaatcttattgaggactttaatagcggtctgatcggcccattactgatttgcaagaaggggactctcacagagggaggaacacagaagacatttgacaaacagatcgtgttgctcttcgccgtttttgacgaaagtaagagctggagccagagttcttctttgatgtacactgtgaacggatacgtgaacgggacaatgcctgatatcacagtctgtgctcatgatcatattagctggcacttactgggtatgagttctggtcccgaattgttttctatccattttaacggacaggttctggaacagaaccaccataaggtgtccgcaatcacgctggttagtgccacgtctaccacagctaatatgactgtaggccccgagggcaagtggattatatcttctcttacccctaagcacctccaagccggcatgcaggcttacattgatatcaagaactgtcctaagaagaccaggaaccttaagaagatcacacgagagcagagacggcacatgaaacgatgggaatattttattgcggcagaggaagtgatttgggactacgctcccgttatccctgcaaacatggataagaaatatcggtctcagcacctcgataactttagcaaccaaataggaaagcattacaagaaagtcatgtacacccagtatgaagacgagtcttttacgaagcataccgtgaacccaaatatgaaggaggatggaatccttggaccaattatccgtgctcaggtccgagatacccttaaaatcgtcttcaaaaatatggctagtagaccttattcaatatatccccatggagtcacgttttccccatatgaggatgaagtgaactcttcattcacctctgggcgaaacaacacaatgatcagggctgtacaacccggcgagacttacacttacaagtggaacatcctagaatttgatgaacccaccgagaacgatgcacagtgcctcaccaggccttactattctgacgtggacatcatgcgggatattgccagtggcttaattggcctgttactcatctgtaagagtagaagtttggaccgtcaggggattcaacgagcagcagatatcgagcagcaagcagtgtttgctgttttcgatgaaaataaaagctggtatctggaggataatattaacaaattttgcgagaatccagacgaggtcaaacgagatgaccccaagttttacgaatccaatataatgagcaactttactctgtctgccatcaacggctatgtacccgaatcgattaccactctaggattctgcttcgacgacaccgtacaatggcatttctgctcagtaggaacccagaacgaaatccttacaatacacttcaccggccacagcttcatctacgggaagcgacatgaggatacattgacactgttcccgatgcggggcgagagcgtgacggttaccatggacaacgtgggaacctggatgttaactagcatgaactcatcaccacgttctaagaaattgcgactgaaatttcgagacgtcaaatgcatcccagatgacgacgaagatagttacgagatcttcgagcctcctgaatctacggtcatggcgacaaggaagatgcatgataggctggagcctgaggatgaagagtccgatgccgactacgattatcagaacaggctcgctgccgccctgggaattcggtcctttaggaattcgtccctgaatcaggaagaggaggaatttaacctcacagctctggcactcgagaatgggaccgagtttgtctccagcaatacagatattattgttgggtctaattattccagcccaagtaacatttcaaagttcactgttaacaatctcgccgaacctcagaaagcgcctagccaccagcaggcaaccacggccggctctcccctgaggcatctgataggtaagaattccgttctaaactcttccacagcagaacattccagtccttacagtgaggatccgattgaggacccacttcaacctgacgtgaccgggatccgcttgctgtccttgggagcaggtgagttcaagtcacaggagcacgcaaagcacaaaggtcctaaggtagagagagatcaagccgcaaaacaccgttttagttggatgaaattgctcgctcacaaagtcggccgacacctgagtcaggataccggatcaccaagtggaatgcggccctgggaagacctgccctctcaggatactggttcccctagtaggatgcggccttggaaggacccgccctctgatctactcctgctgaagcaatccaacagcagcaagatattggtgggccgctggcacctggccagcgaaaagggtagctacgagattatccaggataccgacgaggacaccgccgtcaacaactggctcatcagcccccagaatgccagtcgggcctggggtgagtcaacccccctcgctaacaaacccgggaagcaaagtggacaccccaaattcccacgagttcgccacaagagtcttcaagtgcgccaggatggcggcaagtcccgcctcaagaagtcccagttccttatcaagacacggaagaagaaaaaagagaagcacacccatcacgcccctctgagtcctcgaacgtttcatcctctgcggtccgaggcatacaacacctttagcgagcgacgactgaagcactccctggtattgcataaaagcaatgagacaagtctacctaccgatttgaaccagacccttccctcgatggatttcggatggatagcctctctacctgatcataaccagaatagtagcaatgacaccgggcaggcaagttgccctcctggattgtaccagaccgttccacccgaagagcactatcagacatttcccatccaggaccctgatcagatgcattcaaccagcgacccaagccataggtcctccagtccggaactctcagagatgctcgagtacgatcggtcccataagagtttcccaaccgatatttcgcagatgagcccgtcatctgaacacgaggtgtggcaaaccgtgatcagccccgatctctctcaagtgactctgtcccctgagctctcgcagaccaacctgtccccagacctgagccatacaacgctgtccccagagctaatccagcggaacctgtctccagccctgggacagatgcctataagccccgaccttagtcatacaacactgtcgccagacctgagccatacaaccctgtctttggacttgtcacagacgaaccttagccctgagctgtcacagaccaacctgagcccagctctggggcaaatgccattgtcacctgatctttcccatactactctgagcctcgacttttcccagaccaacctctcccccgaactatctcatatgaccctgagccccgagctctcccaaactaacttatcacctgcattgggtcaaatgccaatatcccccgatctctctcataccacactctcgctggacttctcccaaactaatctgtctcccgagcttagtcagaccaatctgtctcctgcactcggccaaatgcccctgtctcccgatccatctcatactaccttgtctctggacctgtctcaaactaatttgagtcctgaactttcccagacaaatctgtcgcccgacctgtctgagatgccactgttcgccgatcttagccaaattccactaactccagacctagaccaaatgacattgagtccagaccttggggagaccgatctgtcgcctaactttggtcagatgtccctctcccctgacctttctcaggttacactgtcgcctgacattagcgacaccactctactgcccgatctgagccagatatccccgcctcctgatctggaccagatcttctatccatcggagtccagccagagtttgcttctacaggagttcaatgagagtttcccgtacccagacttagggcagatgccctcccccagctcacccaccctgaatgatacatttttgagcaaggagttcaatccacttgtgattgtaggactgagcaaagatggcacagactatatcgagatcattccaaaggaggaggtgcagagctctgaggacgactatgccgaaatcgactatgttccatatgacgatccgtacaaaactgacgtgagaaccaacataaatagctccagagatcccgacaacatcgctgcctggtacctgcgctctaataacgggaacagacggaactactacatcgcagccgaagaaatttcctgggattactcagagttcgtgcagagggagacagatatagaggacagtgatgatatacccgaggataccacctacaaaaaagttgtttttcgcaaatatctggatagcaccttcactaagagagatccacgcggcgagtacgaggaacatctggggattctcggtccaattatacgagccgaggtggacgatgtgattcaggtcaggttcaagaacttagcctctagaccctactccctgcatgcccatggtttgtcctatgaaaagtcctccgagggcaaaacttatgaggacgactcccccgagtggttcaaggaggataatgctgtgcagcccaactctagttacacttatgtgtggcacgctaccgagcggagtggccccgaatcccctggatcggcctgtcgcgcctgggcatattatagcgctgttaaccctgagaaggacatccacagcggactaatcgggcccctgcttatctgccagaagggcattctccataaggacagcaatatgccaatggacatgagggagtttgtcctcctgttcatgacttttgatgaaaagaagtcttggtactacgagaaaaagtcaaggagttcctggcgcctcacgtcatcagagatgaagaagtcccacgaattccacgccatcaatggcatgatttactcattacccggcctcaaaatgtacgaacaggaatgggtccggctacatctgctgaatatcggggggtcacaggatatccacgttgtgcatttccatgggcagacactcttagaaaacggaaacaaacagcatcagttaggggtgtggcctctgctgccaggatcattcaagacactggagatgaaagcctccaaaccaggctggtggctgctcaataccgaggttggtgaaaatcagagggcgggaatgcagactccattcctgatcatggatagggactgccgtatgcctatgggactaagcacgggtattatatccgattcgcagatcaaagcgtcagagtttttaggatattgggaaccccgactggcaagactgaataatggagggtcctacaacgcatggtcggtggagaagcttgctgctgagtttgcgagcaagccatggatccaagtcgacatgcagaaggaagtgattattacaggcatccaaacccaaggagccaagcattaccttaagagctgttacacaacagaattttacgtggcctattctagcaaccagatcaattggcagatcttcaaggggaacagtacacgaaatgttatgtattttaatggaaacagcgacgcaagcacaatcaaggaaaaccaattcgacccacctatagtcgctcgctatatacgaatctcaccaaccagggcctataaccggcctaccctcagactagagctgcagggctgtgaagtgaatgggtgttctacccctttaggtatggagaatgggaagattgaaaacaagcaaatcacagcctcctcctttaagaagagttggtggggcgattattgggaaccattccgggctaggctgaatgcacaaggacgagttaacgcgtggcaggccaaagcgaataataacaaacagtggttggagatcgacctgctcaaaattaagaagattacagctatcattacccaaggatgcaagtctctttcttctgagatgtatgtgaaatcatacaccatccactattcagaacagggagttgagtggaaaccgtatcgcctaaaatcctccatggtcgataaaatattcgagggtaatactaatacaaaaggccacgtgaagaacttttttaatccacccatcatcagccggtttattagggtcatccccaaaacttggaaccagtcgatagctctgaggcttgaacttttcggctgtgacatatattag

SEQ ID NO: 2425 - DNA, 6675 bp, synthetic construct
  misc_feature 1..6675: note = source = /note="Description of Artificial Sequence: Synthetic coding sequence"
  source 1..6675: mol_type = other DNA
atgtttcccgggtgcccgcgtttatgggtgctggtggtcttggggaccagctgggtgggctggggcagtcaagggaccgaggctgcgcagctgcgtcagttttacgtggctgctcagggtatatcatggagttatcgccccgagccaacaaacagtagcctgaacctgtctgttacatcgttcaagaaaatagtctatcgtgaatacgaaccctactttaagaaggaaaaaccacagtctacgattagtgggctgttaggccccacgctgtacgctgaggtaggagacataatcaaagtacatttcaaaaacaaggccgacaagccactttcgatccatccgcagggaatcagatattcaaaactgtctgagggagcatcttacctcgaccacacattccctgccgaaaaaatggatgacgcagtggcccccgggagagagtacacatacgagtggagcatatcggaggatagtggtccaacgcatgacgatcctccttgtcttacacacatatactattcccatgagaatctaattgaagatttcaatagcggcctgatcgggcccctgcttatttgtaaaaaaggcacgcttacagagggagggacccaaaagacctttgacaaacaaattgtgctcctcttcgcagtctttgacgagtcaaagtcctggagccaatctagctctctaatgtacaccgttaatgggtatgtgaatggcaccatgcccgatatcacagtttgtgcccacgatcacataagttggcatctgctgggtatgtcttctggacccgaattgttctctattcacttcaacggacaggtgttggagcaaaaccaccataaggtaagcgctataacactcgtcagtgcaacttcaaccacggcaaacatgaccgtcgggcccgagggcaaatggatcatttcaagcctgacccctaagcacctgcaagcgggcatgcaagcctatatcgacatcaaaaactgcccaaagaagactcgaaatttaaaaaagattacacgcgaacagagacggcacatgaagcggtgggagtactttattgcagccgaagaggtgatctgggactacgcaccagtgatccccgccaacatggataagaagtacagatcccagcatcttgacaatttttcgaaccagatcggcaagcattataaaaaggtcatgtacacccagtacgaagatgagagtttcactaagcacacggtaaacccaaatatgaaggaggatgggatcctgggacccattataagggctcaggtgcgggatacactcaaaatcgtttttaagaacatggctagtagaccctactcaatctacccgcatggcgtgactttcagtccatacgaagatgaggtgaatagctcgtttaccagtggacgtaacaatacaatgattagagccgtccagccgggcgagacctatacgtataaatggaatatcctcgaatttgatgagccaaccgaaaatgatgctcaatgcttgacccgcccctactacagtgacgtggatatcatgcgcgatattgccagcgggttaattggactcttactgatctgcaaaagccggagcctagatcgccagggcattcagagggccgcggatatcgagcagcaggcagtatttgccgtgttcgatgaaaataagagttggtaccttgaagacaatatcaacaagttttgcgagaatcctgatgaagtgaagcgggatgatcccaaattctacgaatcaaacattatgtccacaataaacgggtacgtgcccgagtcgattacaaccctgggattttgcttcgatgacacagtccagtggcatttctgtagcgtggggacgcagaacgaaatcttaaccatacactttaccggccacagcttcatttacggcaagcggcacgaggacactctcactttgttccctatgcgcggagagtcggtgaccgttacaatggataatgtggggacttggatgcttacctctatgaactccagcccacgctccaaaaaacttcggctgaagttccgcgacgtgaaatgcatccccgatgatgacgaagactcctatgagattttcgagcctccggaatccactgtaatggctacccgcaagatgcacgatcgtcttgaacctgaggacgaagagagcgacgccgactacgactaccaaaatcgcctggccgccgccctgggcattaggagtttcagaaattctagcctaaatcaggaagaggaagaattcaacctgactgccctggccctggagaatggaacagaattcgttagctctaatactgatatcatcgtggggtctaactattcatctccctcaaacatttccaagttcaccgtaaacaatctggccgaaccccagaaagccccatctcatcaacaagctactaccgctggatctcctctgaggcacctaatagggaagaacagcgttctgaattcaagcactgcagaacactcttctccctatagcgaagaccccatcgaagatcccctgcagcctgatgtaactgggattcgcctgctcagcctgggtgccggagaatttaagtctcaggagcatgctaaacacaagggccccaaagtggagagggaccaggcagccaaacatagattttcttggatgaaattgttggctcacaaggtcggccgccacctcagccaggacacaggctctccttcaggaatgagaccatgggaagatctcccttcgcaggacacagggtctcctagccgtatgcgaccctggaaggacccgccgtccgatctgctactgctaaaacaaagcaattcttctaagattctggttggaagatggcatctggcctcggagaaggggtcttacgagatcatccaggacactgatgaagacaccgctgttaataactggctaatctcgcctcagaatgcaagtcgtgcctggggcgagagcactcccctggctaacaagcccggcaagcagagtggtcatcccaagttcccgagagttagacataaaagccttcaagtaaggcaggacgggggtaaatcacgccttaaaaagtcccaattcctcataaagacacgtaaaaaaaaaaaggaaaaacatacccatcatgcccctctgagcccgaggacctttcacccgctcagatccgaggcttacaatactttttcagagagaaggcttaagcactctctggttctgcataagagtaatgagacctccctgccgactgatctcaaccagactctgccatctatggacttcggctggatcgcctcactcccggaccacaatcagaattctagtaatgataccggacaggcgtcctgtccccccgggctgtaccaaaccgtcccacccgaggaacattatcagacctttcctatacaggaccctgaccagatgcacagcacatccgaccccagccaccgttcttccagtcccgaactttcggaaatgttagagtacgaccgctcccataagtcttttcccacagatatttcacagatgagcccgagctccgaacacgaggtgtggcagactgttattagccctgacttgtctcaagtgactctgagccccgagcttagtcagaccaacctctctcctgatctgtcacacacaactctgtctcccgagctcattcagcggaatctgtcgcctgccctaggtcaaatgcctatcagcccagacctgtctcatactacactttcccccgacctgtcacacactacactctcattagacttgtcccaaactaacttgtccccagagctctcgcagactaatctctcaccagcgctggggcaaatgcccctctcacccgacttgtcccatacaacgttatctctggacttcagccagacaaatctgagtccagaattgagccacatgacattaagccctgagctctctcagactaatctgtctccagcactgggacagatgccaatcagtcctgatctgtcccatacaactctatcactcgacttttctcagacaaacctgtctcccgagcttagccagaccaatctcagccctgctttaggtcagatgccattatcaccggatccttctcacactactctgagtctggatctatcgcagaccaatcttagtcctgagttgagccagacaaacctcagcccagatttaagtgagatgccgctgttcgccgatctgagccagatcccattaaccccagacttagaccagatgactctcagccctgacctgggagaaaccgacctgagccctaacttcggccagatgagcctgagtccagatctatctcaggttactctgtctcctgatatctcagacacaacactactacctgacctgtctcagatttccccccctcccgacctggaccaaattttctacccatcagagtcttctcagtccctgctcctgcaggaatttaacgagagtttcccctatcctgatctgggacagatgccttcacctagctctccaaccctgaatgataccttcctttctaaggagtttaacccgctcgtaatcgtggggttgagtaaagatggcacggattatatcgaaataatacccaaggaggaggtccagagttcagaggatgattacgcggaaatagactatgtcccatatgacgatccctacaaaacggatgtacgaaccaatataaatagcagtagggatccggataatatcgcggcctggtatctccgttctaacaacggtaatcggcgaaattattacatagctgctgaggagatatcttgggattattctgaattcgtccagagggagaccgatattgaagatagcgacgatattcccgaggacacaacttacaagaaggtggttttcagaaagtacctggactcaactttcaccaagcgggatccacgtggggaatatgaggagcatttaggcatacttggacccatcattagggcagaggtggatgatgtgattcaggttcggttcaaaaatctagcttcacgcccgtatagccttcatgcccatggattatcgtatgaaaaatctagcgagggaaagacttatgaagacgactcccctgagtggttcaaagaagacaacgcagtgcaacccaacagcagctatacctacgtgtggcacgctaccgagcgctctggccccgagtcgcccgggagcgcgtgtcgcgcctgggcctactattctgcagttaatccggagaaagatattcacagtggcttgatcgggccactactgatttgccagaaaggaatcctgcataaagatagtaacatgccgatggacatgagggagtttgttctgctgttcatgacgtttgacgaaaagaaatcctggtactacgagaaaaagtccagatcaagctggcggctcacttcctctgagatgaaaaaaagccatgaattccatgccataaacggtatgatctactcgctgcctgggctaaaaatgtatgaacaggagtgggtgagactgcacctcttaaacatcggagggtctcaggacattcacgtcgtacatttccatggccagacactgctggagaatggaaacaagcagcatcagctgggcgtgtggccactgctaccaggaagtttcaagactttggagatgaaggccagtaagcccggctggtggctgctcaatacggaggtgggtgagaatcagagagcaggcatgcagaccccatttcttatcatggatcgcgactgtcgcatgccaatggggctgtccaccggtattatttcagacagtcagattaaggcatctgaattcctcggctattgggaacctcggctagcccgtcttaacaatgggggctcctataatgcttggtcagtggaaaagctggcagcggagtttgcctcaaagccatggatccaggtggatatgcagaaggaggtcattataaccggcattcagactcaaggcgcaaagcattacctgaagtcctgctacacgacagaattttacgtcgcttattctagcaaccagattaattggcagatttttaaaggtaattctacgcggaatgtcatgtattttaatgggaactcagacgcctctacgataaaagagaatcagtttgacccaccaatcgttgcccggtacatccggatcagtccaacccgcgcctacaaccgccctacgctgcgcttagagctccaaggttgtgaggtgaacggatgctctacaccgctgggtatggagaacggtaagattgaaaataagcaaattacagcttcgtcattcaagaagtcttggtggggggactactgggaaccttttcgggctagactaaacgcccaaggcagagtaaacgcctggcaggctaaggcgaataataacaaacagtggcttgaaatcgacctgctgaagatcaagaagattacagccataatcacacagggttgtaagtccttgagcagtgagatgtacgtgaagagttacaccattcattactcagaacagggcgtggagtggaaaccttataggctgaaatctagtatggtggataaaatctttgagggcaataccaacaccaagggtcatgtgaagaatttcttcaatccccctataatctcacgattcattcgcgttatccctaagacctggaaccaatctattgccctgcgactagaattatttggttgcgacatttactag

SEQ ID NO: 2426 - DNA, 999 bp, synthetic construct
  misc_feature 1..999: note = source = /note="Description of Artificial Sequence: Synthetic coding sequence"
  source 1..999: mol_type = other DNA
atggatgacgcagtggctcccggccgcgaatacacctatgagtggtccatctccgaggactcaggccccacacacgatgacccaccttgcctgacccatatttattatagccacgaaaacctcatcgaggacttcaattctggcctgataggaccgctactgatatgcaagaaaggcactctcactgaaggtggcacacagaaaacattcgataaacagattgtactgctcttcgcagtgtttgacgagtccaagtcatggagccagagcagttccctgatgtacacggtgaacggttatgtgaacggcacaatgcccgacatcaccgtgtgcgcacatgatcacatctcctggcacttgttaggaatgtcgagcgggcctgaactgttttctattcatttcaacggtcaagtgttggaacaaaatcaccacaaggtgtccgctatcacactggttagtgctactagcactaccgccaatatgactgtggggccagagggcaagtggatcatatcttctctgacacccaagcatctgcaggcagggatgcaggcgtacatcgatatcaagaactgtcccaaaaaaacaagaaatctgaaaaagattaccagagagcagagacgccatatgaaacggtgggagtattttattgcagcagaagaagttatttgggattatgcgcccgtgattcctgccaatatggataagaagtacagatcccagcacttggacaatttctccaaccagataggtaaacactataaaaaagtgatgtacactcaatacgaagacgaatccttcaccaagcataccgtgaatccaaatatgaaagaggatggaattcttgggcccataatccgcgcccaagtgagggacactctgaagatcgtgtttaagaacatggccagccgcccatattccatatacccacacggcgttactttttcaccctatgaagacgaggtgaactcgagcttcacatccggaacaaccccttag

SEQ ID NO: 2427 - DNA, 1335 bp, synthetic construct
  misc_feature 1..1335: note = source = /note="Description of Artificial Sequence: Synthetic coding sequence"
  source 1..1335: mol_type = other DNA
atggtgtcacaagccctgcggctgttgtgtttgctcctaggcctgcaggggtgcttagctgctgtcttcgtgacccaggaggaggcacacggcgtgctgcacaggagacgacgggcaaacgcctttctggaggagcttcggcccggcagcttagagagagaatgcaaggaagagcagtgctcgtttgaagaggcccgagagatcttcaaggacgccgaacgaactaaactattctggatatcctactcggatggtgaccagtgtgcatcgagcccctgccagaacggcggttcgtgcaaagatcagctccagagttacatttgcttctgtctgccagcattcgaaggaaggaactgcgaaacccacaaagacgatcagttgatctgtgtcaatgaaaatggaggctgcgagcagtattgctctgatcacaccggcaccaagaggtcgtgtcgctgtcatgagggctatagcctgttagcagatggcgttagttgcacgcctaccgtcgagtatccttgcggtaagattcctatcctcgaaaagaggaatgccagcaagccacagggaagaatcgtgggcggaaaggtgtgcccaaaaggggaatgcccttggcaggtactgctcctggtgaatggggctcaactgtgcggaggaaccttgataaataccatctgggtggtgtcagcagcccactgcttcgataaaatcaagaattggagaaacctaatagccgtgctaggggagcacgacctgtctgaacacgacggagacgagcagtccagacgcgtagcccaggtcatcattccgtcaacctacgtcccaggaaccaccaatcacgacatagccctgttgcgtttgcaccagcctgtcgtccttaccgaccacgtggttcccctttgcctccctgaaagaaccttttcagaacggacattggctttcgtgcgctttagtctggtgagcggctggggccagctcctggacagaggcgcaactgccctggaactcatggtcctgaatgttccacggctcatgacgcaggattgtttgcagcaaagtcggaaagtgggggacagtccaaacataacggagtacatgttttgcgccggctacagtgatggcagcaaagatagctgtaagggggatagcggaggcccccacgccacacactatcgggggacatggtatctgaccggtatcgtgtcctggggccagggttgcgccaccgttggacactttggagtgtacacaagagtgtcccagtacattgaatggctgcagaaactcatgagatccgagccacgaccaggggtgctgttgcgagccccttttccctag

SEQ ID NO: 2428 - DNA, 1401 bp, synthetic construct
  misc_feature 1..1401: note = source = /note="Description of Artificial Sequence: Synthetic coding sequence"
  source 1..1401: mol_type = other DNA
atggtgagccaggcactaaggctgctctgtctacttctcggtttgcaaggctgccttgccgccggcggcgtcgccaaagcgagtggtggggagacccgggatatgccgtggaagccagggccccaccgagtgtttgtgactcaggaagaggcccacggagttctccatcggcgccgacgtgcaaatgctttccttgaggaacttcgaccaggatccctggagcgcgaatgcaaggaggagcaatgttcctttgaggaggccagggagattttcaaagatgccgagcggaccaagcttttctggatctcctatagcgatggcgatcaatgcgcctcttccccttgtcagaacggcggttcttgcaaagaccagctgcagtcctatatctgtttttgcttgccggcattcgagggacgaaactgtgagacccataaagatgatcagctcatctgcgttaatgagaatggggggtgcgaacagtactgcagtgatcacacggggactaagagatcatgtaggtgccacgaaggttactctctcctcgcagacggggtgagttgcacaccaaccgtagaatatccgtgtgggaaaatacctatccttgagaagcggaacgcttcaaaaccacagggaagaatcgtgggaggaaaggtgtgccccaaaggggaatgtccatggcaagtgctgctgctggtgaacggagctcagttatgcggaggaacgctcattaacaccatctgggtagtgagcgcagcccattgttttgataaaattaagaattggcgcaatcttatcgctgtcctcggagaacacgatctgtccgagcatgatggagacgaacagtcaaggcgagtggcacaggtgatcatcccctccacatatgttcctggcacaaccaaccacgacatcgcgctgctgcgcctgcatcagcccgtcgtgctgacggaccatgtggtgcctctctgtctcccagaaagaacattctccgaaaggactctggcttttgtcaggttcagcctcgtatccggttgggggcagttactggatcggggcgcaacagcactggagttgatggtgctcaatgtcccacggctcatgacacaggactgtctacagcagagccgaaaggtgggggatagtcctaatattactgagtacatgttctgtgcaggatattcagatggctccaaggactcatgcaagggcgactctggggggccccacgcgacacactatcgtggaacgtggtatttaacaggcattgttagctggggccagggatgtgccaccgtggggcacttcggcgtatatactagagtttcgcagtatatcgaatggctccagaagctcatgcgatccgaaccaagacccggcgtgttgctccgggccccctttccttag

SEQ ID NO: 2429 - DNA, 1194 bp, synthetic construct
  misc_feature 1..1194: note = source = /note="Description of Artificial Sequence: Synthetic coding sequence"
  source 1..1194: mol_type = other DNA
atgggcaatgtgaatcgccagggacaacattgtcgtgactttattatggtatctcaggccctgcgactgctttgcctgttgctgggcctgcagggatgcttagctgctgacggggatcaatgtgcatctagcccatgtcagaacggaggatcatgcaaggaccagctgcaatcatatatttgcttctgcctgcctgctttcgaaggacggaactgtgagacccacaaagatgatcaactaatctgcgttaatgagaacggaggttgcgagcagtattgtagtgatcatacaggaactaagcggtcatgccgctgtcatgaagggtactccctactcgcggacggggtgagctgtacgccgacagtggagtacccgtgtggcaagattcctatcttggagaagcgcaatgcttcgaagccccaagggagaatagtcggcggaaaagtctgtccaaaaggggaatgcccttggcaagttctcctgttggtaaatggagcccagctttgtgggggcactctcattaacaccatctgggtagtctctgcagcccattgtttcgacaaaatcaaaaactggaggaaccttatagcagttttaggcgagcacgacttgtctgagcatgacggtgacgaacagtctcggcgcgtggcccaggtgatcattccttcaacttacgttcccgggaccaccaaccatgatatcgctttgctgcgactccaccagcctgtcgtgctaaccgaccatgtcgtgcccctgtgcttgccggaaagaaccttctccgaaagaacacttgctttcgtgcggttcagcctggtctcagggtggggacaactgctcgatagaggagctacggcactcgagttgatggtgttgaacgttcctagactgatgacacaggactgcctgcagcagtcccgaaaggtgggcgacagtccaaatattacagaatatatgttttgcgcaggttacagcgacggaagcaaggacagctgtaagggggactcagggggccctcatgccacccactatcgggggacttggtacctgactgggatcgtgagttggggtcaaggctgcgccaccgtgggacatttcggggtctacactcgcgtgagccagtatatcgagtggctccagaagctgatgaggagcgagccaagaccaggcgtgctgctcagagcccccttcccatag

SEQ ID NO: 2430 - DNA, 651 bp, synthetic construct
  misc_feature 1..651: note = source = /note="Description of Artificial Sequence: Synthetic coding sequence"
  source 1..651: mol_type = other DNA
atgcggatccaggatcccggcaaggtcttcttcgggaacgtggatagttctgggatcaagcacaatatatttaacccacctataatcgcccgatatatcagactgcaccccacccactactctatccgctcaacactccgcatggaactgatggggtgtgacctaaactcctgctcgatgcccttagggatggaaagtaaagccatttctgatgcacaaattaccgcgtccagctacttcactaacatgtttgcaacgtggagtccatccaaggctcggttgcacctgcagggcagatcaaacgcttggaggcctcaggtgaacaatccaaaagagtggttacaggtggactttcagaagactatgaaggtgactggcgtgactacacaaggtgtgaaatctctgctcacatcaatgtatgtgaaggagtttctcatcagctcctctcaggatgggcaccagtggacactcttctttcagaacggtaaggtgaaggtcttccaggggaatcaggatagctttaccccggtagtcaattccctggatcccccgctcttgactcgttatttgagaatccaccctcagagctgggtccaccagatcgccctgagaatggaagtgctgggatgcgaggcccaggatctttactag

SEQ ID NO: 2431 - DNA, 7056 bp, synthetic construct
  misc_feature 1..7056: note = source = /note="Description of Artificial Sequence: Synthetic coding sequence"
  source 1..7056: mol_type = other DNA
atgcagatcgaattgagcacttgttttttcctctgtctcctccgcttctgtttttctgccacgcgccggtattatctcggagccgttgagctttcctgggattacatgcagagcgacttgggcgagctgcctgtggacgcgcggtttccgcccagagtcccaaaatcatttcccttcaatacttccgtagtttacaagaagaccctctttgtcgagtttactgaccacctgttcaacattgccaagccacgtcccccctggatgggtctgctcggccccactatccaagccgaggtttatgacaccgtggtaatcaccctgaagaatatggcaagccatcctgttagcttacatgccgtgggcgtttcatattggaaagcctcagaaggagccgaatacgacgaccaaacctcccagcgcgagaaagaagacgataaggtcttccccggagggagccatacatatgtatggcaggtgttgaaagagaatggccccatggcctcagatcccctctgcctgacatacagctacctgtcccacgtggacctggtgaaagacctgaactccggtctgatcggcgccttactcgtctgtcgcgagggaagtttagcgaaggagaaaacccagacccttcacaaatttattctgctttttgccgtgttcgacgagggtaaatcctggcattccgagacgaagaattctcttatgcaagatagagatgcagctagcgccagggcctggccgaaaatgcacacggttaatggatacgtgaatcgcagtcttccagggctgatcgggtgtcataggaagtctgtatactggcacgtgatcgggatggggacaactcccgaggtgcatagcatcttcctagaaggtcatacattcctggtaaggaatcatcggcaagcatctctcgagatttccccaattaccttcctgacagcacaaaccctcctcatggatcttggacagttccttttattctgccacatcagctcacaccaacacgatgggatggaggcttacgtgaaggtcgactcatgccccgaggagccccaattgcggatgaaaaataacgaagaagccgaggattacgacgatgacctgaccgactccgaaatggatgttgtccgtttcgatgacgacaatagccctagctttattcaaatcagatccgttgcaaagaagcaccctaagacctgggtccactatatcgccgctgaggaggaagactgggattacgcacccctcgtcttggctcccgatgaccgcagctacaagtctcagtacttgaacaacggaccacagcgcataggcaggaagtataagaaagttcggtttatggcatatactgatgaaacattcaagacgcgggaggccatccagcatgagtctggcatccttggcccactgctctacggggaggtcggagacacactgttgattattttcaaaaatcaggcctctcgcccttacaacatttatccgcacggcattacagacgtgagacctctgtatagccgcaggcttcccaagggcgttaaacatttgaaggattttcccatcttgcctggcgagatctttaagtataaatggaccgtaactgtggaggacggcccaaccaagtcagatcccaggtgccttacccgctactacagttcgtttgtgaatatggaacgggacctcgcctccggcttgataggaccgcttcttatatgctataaagaatctgtggaccaacgcggcaatcagatcatgagcgacaaaaggaatgtcatccttttctccgtcttcgatgagaacagaagctggtacctcactgagaacatccagcgattcttgcctaacccagccggagtgcagctagaagatcccgaattccaggcctctaatatcatgcactccattaacggctatgtctttgattcattgcagctttccgtgtgtctccacgaggtcgcatactggtatattctgtctattggcgcccagactgattttcttagtgtctttttcagcgggtacacattcaaacacaagatggtgtatgaggatacactgacgctctttccattcagtggtgagactgtgttcatgtcaatggaaaaccctgggttatggatcttaggatgtcacaacagtgattttcggaataggggaatgaccgccctcctgaaagtaagtagctgcgacaagaatacgggggattattacgaagattcctacgaagatattagtgcatatctgttatctaaaaataatgccatcgaaccacgaagctttagccagaattcaaggcacccatcaaccagacaaaaacagtttaacgccacaactattcctgagaacgacattgagaaaactgatccctggtttgcccatcgcaccccgatgccaaaaatccagaatgtatcgtcttctgacctcttgatgctacttcggcagtcgccgacccctcatggactgtcactgtcagatcttcaggaggcaaagtatgaaaccttttcagacgacccttccccgggagctatcgattctaataattctctgtcagaaatgactcactttcgaccgcaattgcatcattccggagacatggtcttcacgccagaaagtgggttacagctgcgcttgaacgaaaaactgggcaccactgccgctacagaactgaaaaagcttgacttcaaagtgtctagcacctctaacaacctgatatccaccatacctagtgataaccttgccgccggaaccgacaacacatcctcgctcgggccaccgtcgatgccggtgcactacgactcacagttagacacaaccctttttggcaagaagtcatcaccactgaccgagtcaggggggcctctcagcctgtcggaagagaacaacgattccaaacttctcgaaagtgggttaatgaattcccaagaatcctcttggggtaagaacgtctcatcaactgagtccggtagactctttaaagggaagcgagcgcacggaccagccctcctgacaaaagacaatgccctctttaaagtcagcatatccttattgaagaccaataaaacaagtaataacagcgccacaaaccggaaaactcatatagatggtcccagcctgctgattgagaacagccctagcgtgtggcagaatatattagagtcagacacagaattcaagaaagtaacccccctgattcatgacaggatgctgatggacaagaacgccacggccctccggttaaatcacatgtcaaacaaaacaacaagctctaagaacatggagatggtccagcagaagaaggagggcccaattcctccagacgcgcaaaaccccgatatgtctttcttcaaaatgctgtttctgcccgaatccgcacgctggatccagcggacacatggcaaaaattcactgaactccggacagggccccagtcctaagcaactggtgagcttggggcccgagaagtccgtggaaggacagaatttcttgtctgagaaaaataaagttgtagttgggaagggggagttcaccaaagacgtcgggctgaaagagatggttttcccaagttcccgcaatctgtttctgacaaacctggacaacctgcatgagaataatacgcataaccaagagaaaaaaattcaagaagagatagagaaaaaggagacccttatacaggagaatgtggtcttaccgcagatccacacggtgactggcactaaaaacttcatgaagaacctgtttctgctcagtaccagacaaaatgtggaggggagctacgacggagcctatgccccggtcctccaggattttaggtcgctgaacgactccactaatcgaactaaaaagcataccgcccacttttccaagaagggggaagaagaaaaccttgaggggcttggcaatcagaccaaacagatcgtggagaaatatgcttgcactaccagaatttcccccaacaccagccaacagaatttcgtcacacaacgttccaaacgagcactaaagcagttccgcctgccactcgaagagacagaactggaaaaacgcatcatcgtggacgatacttccacgcaatggtccaaaaacatgaagcatctaaccccgagcactcttacacagatagactataacgagaaggaaaagggggccatcactcagtcccccctgtccgattgcctgacaaggtcccacagcatcccacaggctaaccgatccccgctccctatagcaaaagtgtcatcctttccctctatacgccccatctacttaacacgagtgctttttcaggacaacagcagtcacctgcctgccgccagttatagaaaaaaggactcgggcgtgcaagagtcttcgcacttcttacaaggcgcaaagaaaaataatttgtcactggcaattctcacgctggagatgacaggcgatcaaagagaggtgggctccctgggaacctcagctaccaactctgtcacttataaaaaagtggaaaacacagtgttgcccaagccagatcttcctaagacaagcggcaaagtggagctcctcccaaaagtgcatatctaccagaaggacctgtttccaacagagacctctaatggatctcccgggcatttggacttggtcgaaggctctttgcttcagggtaccgaaggagccatcaagtggaatgaggccaaccgccccggcaaagtgccgttccttagagtggcaaccgagtcgtcagccaaaactccgtctaaactcctggacccactggcttgggacaaccactacggcacgcagatccccaaggaggagtggaagagccaagagaagtcacctgaaaaaacagcctttaagaaaaaggatacgattctgtccctgaatgcttgcgaatcaaatcatgccatcgcagcaataaacgagggccagaacaagcccgagattgaggtcacatgggccaagcagggtaggacagagaggctttgctctcagaacccgcccgtgctcaagcggcatcagcgcgaaattaccaggacaaccctacagtccgaccaggaggaaatcgactatgatgatacgatctcagtagaaatgaaaaaggaagacttcgatatctacgacgaggatgagaaccagagtcccaggtcatttcagaagaaaacgaggcattactttatcgcagccgtggagagactctgggactacgggatgagttcttcaccccacgtgctgagaaaccgggcacagtccggttctgtgccccagttcaaaaaggtggtattccaagagttcacagacgggtccttcacgcagccattataccgcggggagctaaatgaacacctcggcctgctgggtccctacatccgcgctgaagtagaggacaacatcatggtgacctttcggaatcaggcttctcgaccctactccttctactcatcacttatctcttatgaagaagaccagagacagggagctgaacctcgtaagaactttgtgaagcccaacgaaactaagacttacttctggaaggtgcagcatcatatggccccaaccaaggacgaatttgactgtaaggcttgggcatacttcagtgatgttgacctggagaaggatgttcactctggtctcataggaccgctcctggtgtgccataccaatacccttaacccagcccacgggaggcaagttaccgtgcaggaatttgcactatttttcacaatattcgacgagacgaaatcttggtacttcacagagaacatggaaaggaactgccgggccccgtgcaacatccaaatggaagacccgacctttaaagagaattacagatttcacgcgatcaacgggtatattatggacaccttgcccggcttggtgatggcccaggaccaacgcattcgctggtacctgctgtcaatggggtctaacgagaacatccactccattcatttcagtggccatgtgtttacagtgaggaaaaaggaggagtataaaatggctctgtacaacctttaccccggggtttttgagactgtagagatgctaccctcaaaggcagggatttggagggtagagtgtttgattggggagcaccttcacgcaggcatgtccacattattccttgtgtactcaaataagtgccagacccccctcggcatggcctctggacacatcagagacttccagattaccgccagtggccagtatggacagtgggctccaaagctcgcccggctgcattactccggctcaataaatgcttggtccactaaagagccattctcctggatcaaggtggaccttctggcccctatgattattcacggcattaaaacccagggcgcccgccagaaatttagctcattatatatctcccaattcatcattatgtattccctagatggtaaaaaatggcagacatatcgcgggaattccaccggcactctgatggtgtttttcggcaacgtcgattcatcaggcatcaagcataacatctttaatcctcctatcattgcccgttatatccgcctgcaccccacacattattcaattcggagcaccctgaggatggaactgatggggtgcgatttgaatagctgctctatgcctctaggcatggagagcaaggctatcagcgatgctcagatcacagcaagtagttacttcacaaatatgtttgcaacatggtcaccaagtaaagccagactacacctgcaggggaggtcaaatgcatggagaccacaggtcaacaacccaaaggagtggttgcaggtggactttcagaagactatgaaggtcactggcgtgacgacccaaggcgtcaagtccctcctgacctccatgtatgtgaaggagtttttgatttcaagttcacaagacggacatcaatggaccctcttttttcagaatggcaaggtgaaagtattccaaggcaaccaggattcttttacccccgttgtgaactcccttgaccccccactgctgaccaggtacctaagaatccatccccagagttgggtgcatcagattgcactgcgcatggaagtgttagggtgcgaggcccaggatctatattag

SEQ ID NO: 2432 - DNA, 999 bp, synthetic construct
  misc_feature 1..999: note = source = /note="Description of Artificial Sequence: Synthetic coding sequence"
  source 1..999: mol_type = other DNA
atggggcgacctctgcatctggtgttgctttctgcctcccttgcggggttgttgctactcggagagtctctgtttatacgcagagagcaagccaataacattctggcacgggtaaccagggcaaattccttcctggaagaaatgaagaagggccatctggagcgcgaatgcatggaggaaacatgttcttatgaggaggccagggaggtgttcgaagacagcgacaagaccaatgaattttggaacaagtataaggacggggaccagtgtgaaacctccccgtgccagaatcagggaaagtgcaaagatggattgggcgaatacacctgtacatgccttgaggggtttgaagggaagaactgcgagctctttacgagaaagctgtgcagtctggataacggtgactgcgaccagttttgtcacgaggagcaaaatagcgtggtgtgcagctgcgccaggggatacactttggccgataatggcaaggcatgcatccccactggcccatatccctgtggaaagcagacgctggagaggcgtaagcgcagtgtggcccaggccactagtagcagtggggaggccccagactccatcacttggaagccctatgatgctgccgacctggatcccaccgaaaatcccttcgacttactcgacttcaaccagactcagcctgagcgcggggataataatctgacacgtatagtcggaggccaggagtgtaaagacggggagtgtccgtggcaggctctcttgattaatgaggaaaacgagggattttgcggcggaactattctgagcgagttctatatcctgaccgcagctcattgcctgtatcaggctaagagatttaagggaaccggtaccaggtcgcggcggagagctgtccggcggtgtacccgctggcgttggagcagttccaccacaggttcccagcgcaggcccatgacctctacttcaccatgtagcggctccaggcctccctcccccagcgcttag

SEQ ID NO: 2433 - DNA, 1467 bp, synthetic construct
  misc_feature 1..1467: note = source = /note="Description of Artificial Sequence: Synthetic coding sequence"
  source 1..1467: mol_type = other DNA
atgggtcgccccctgcatttggtgttgctgagtgcttcccttgccggtctactgctgcttggggagtccttattcattagacgtgaacaggccaacaatatccttgcacgagtgacccgggccaactcgtttctcgaagaaatgaagaaaggacacctggagagggagtgtatggaagagacctgcagctacgaagaagctagggaagtattcgaggactcagataagacgaatgaattctggaacaagtacaaggacggggatcagtgcgaaacctccccatgccagaaccagggcaagtgcaaagacggtctgggcgagtacacctgtacatgtctggaggggtttgagggaaagaattgcgagctctttactcggaaactgtgctctttggataacggcgattgtgaccagttttgtcacgaggagcagaattcggtcgtctgttcttgtgccagaggatacactctcgcagacaacggaaaggcctgcatacccaccggaccctatccctgtggtaaacagacactggaacgtagaaagagatccgttgcacaggccacgtctagcagtggagaggctcccgacagcataacgtggaagccgtacgatgccgccgatctggaccccacggaaaaccccttcgacttgctcgacttcaatcagactcagccggagcgcggcgacaacaacttaacacgaatcgttggcggccaggagtgtaaagacggggaatgcccctggcaagctttgctgattaacgaagaaaacgaaggattctgcggtggtaccatcctgagcgaattctatattctgaccgctgcacactgcctgtatcaagcgaagcgcttcaaagtgagagtgggcgatcgcaataccgaacaagaggagggtggggaggccgttcatgaggttgaagtggtgatcaagcacaatcggttcaccaaggagacatacgacttcgacatagcagtactgcggctgaaaactccaattaccttccgcatgaacgtggctccagcttgcttgcctgagcgcgactgggcggagagcactctgatgactcaaaaaacagggatcgtttccggcttcgggcggacccacgagaaaggcaggcaatccaccagactaaaaatgctggaggtaccatacgtggaccgtaatagctgcaaactctcttcctcattcatcattacccagaacatgttctgcgcaggttatgatacaaaacaggaggatgcttgccagggggattctggaggcccccacgtgacacgattcaaggatacttactttgtgacaggcatagtctcatggggtgaggggtgcgcacggaaggggaagtatggcatttacactaaggtgacagcctttctaaaatggatcgataggtcgatgaagacgcgaggcctgccaaaggccaaatctcatgctcctgaagtgatcacatctagtcccttgaaatag

SEQ ID NO: 2434 - DNA, 1005 bp, synthetic construct
  misc_feature 1..1005: note = source = /note="Description of Artificial Sequence: Synthetic coding sequence"
  source 1..1005: mol_type = other DNA
atggggcgtccgttacacctggtgcttttaagcgccagcctggccggccttttactgttaggagagtcccttttcattagaagggaacaggcaaataatatcttagcaagagtgacacgggctaactcgtttctggaggagatgaagaaagggcatttggaacgagaatgcatggaggagacatgttcctatgaagaggcgcgggaggtgtttgaagattcggataaaacaaatgagttttggaataagtataaggacggcgaccaatgtgaaacctcgccttgtcagaatcaggggaaatgtaaagacggcctcggtgagtacacgtgtacttgccttgagggatttgagggcaagaactgcgaacttttcaccaggaagctctgttctctggataatggggattgtgatcagttttgccacgaagagcagaactccgtcgtgtgcagctgtgcccgggggtataccttagcagataatggtaaagcctgtatccccactggcccttatccttgcggcaaacagaccttggaacgacgcaagaggagtgtggcgcaggcaacttcaagttctggggaggctcccgattcgatcacttggaaaccatacgatgcagccgacctagatcctacagaaaacccatttgatctgctcgacttcaatcagacccagcccgaacgtggagacaacaatctcacaaggatcgtgggaggacaggaatgtaaggatggcgagtgtccatggcaggccctgttgattaatgaggaaaatgaagggttctgtggtggcacgatcctctccgagttctatatcctcaccgcagcacattgtctctatcaggcgaagagattcaaggtgcgagggaccggaactagatcccggcgcagagctgtccggaggtgcacacgttggaggtggagctcatcaaccaccgggtctcaacgaagacccatgacgtctacaagtccctgtagcgggtccaggcctccttccccatccgcctag

SEQ ID NO: 2435 - DNA, 1722 bp, synthetic construct
  misc_feature 1..1722: note = source = /note="Description of Artificial Sequence: Synthetic coding sequence"
  source 1..1722: mol_type = other DNA
atgatcttcctgtaccaggtggttcattttattctgttcacttccgtgtccggggagtgcgtgacacagctccttaaggatacatgctttgaaggaggagatataacgactgtgttcacaccttccgcaaagtattgccaggttgtgtgtacttatcacccgcggtgcctgctgttcacgtttacggccgagtccccaagtgaggacccaacacgatggttcacctgcgttctgaaagactctgtgacagagactctcccaagggtcaataggacagcagccatcagcggttatagtttcaagcagtgtagtcaccaaatttccgtgaacaacatctgtttactgaagcatacccagactggaaccccaacccggatcactaagttggataaagtagttagtggattttctctaaagagctgtgcgctaagtaatttagcctgcattagggatattttccctaacaccgtttttgctgactcaaatatcgatagcgtgatggcacctgatgccttcgtctgcggccgtatatgtactcatcaccctggttgtctgttcttcacatttttctcacaagagtggccaaaggagagccagcggaatttgtgtttattgaagacaagtgagtcaggcttgcctagtacaagaattaagaagtccaaggccctgagcggcttttcgctgcagagttgccgccattccattcctgtgttctgccatagcagcttttaccatgacacagatttcctgggcgaagaactcgacatcgtggcagcaaagtctcacgaggcttgtcagaagctgtgtactaacgccgtgcgctgccagttcttcacatacactccggctcaagcttcgtgcaacgagggcaaagggaagtgttatctgaagctcagctcgaacgggtctcctacaaaaattctgcatggcaggggtggaatttctggctacacattgaggctgtgcaaaatggataacgagtgcactacaaagattaagccccgaattgtgggaggaaccgcctcagtaagaggcgaatggccctggcaggtcaccttgcatactacctcacccacccagcggcatctttgtggggggtcgattattggcaaccagtggattctaacagccgcccactgtttctacggcgtcgagagcccgaagatcctcagggtatacagcggcattctaaaccagtcagaaatcaaagaagatacctcatttttcggtgtccaggaaattattattcacgaccagtacaaaatggccgaatctggctatgacattgccctgcttaaactggagaccacggtcaactacaccgatagccaaagaccaatctgtctgcccagcaagggcgaccgaaatgtgatctataccgactgctgggtcaccggttgggggtatagaaagctgagggacaagatccaaaacactctccagaaggctaagatccctctggtaaccaatgaagagtgtcagaaaagataccgaggccataagatcactcataagatgatctgcgcaggctatagggagggcgggaaagatgcttgcaagggagattcaggcggtccgttgtcatgtaaacacaacgaagtgtggcatctcgttggaattacttcttggggagaaggttgtgctcaaagggaacggcccggagtatacacgaacgtcgtggaatacgttgattggatcctcgaaaaaacgcaggccgtatag

SEQ ID NO: 2436 - DNA, 1878 bp, synthetic construct
  misc_feature 1..1878: note = source = /note="Description of Artificial Sequence: Synthetic coding sequence"
  source 1..1878: mol_type = other DNA
atgatcttcctctaccaggtggttcatttcatcctctttacttctgtatcaggagagtgtgttacccaacttctgaaggacacatgctttgaagggggagatatcaccactgtattcacaccttctgccaagtattgccaggtcgtttgcacctatcatccccgatgtctactgttcacctttacagctgagtcaccgagcgaggatcctacacgttggtttacttgtgtgctgaaagactcagtgacagagaccctaccaagagtgaatagaactgcagcgatctccggatactccttcaagcagtgctcccatcagatatctgcttgcaacaaggacatctacgttgacctagatatgaagggtattaactataactcttctgtcgccaagtctgcccaggaatgtcaggaacgctgcacagatgatgtgcattgtcattttttcacatacgcaaccagacagtttcccagtctggaacaccggaatatttgtctattaaagcatacccagaccggcacccctacgcggatcacaaaacttgacaaggtggtcagtgggtttagtctcaaatcttgcgcactgagcaacctggcgtgcatccgtgacatcttccctaataccgtttttgcagacagcaatatcgatagcgtgatggcacctgatgccttcgtttgcggcagaatttgcactcatcatcctggttgcttattcttcacctttttctcacaggaatggcccaaagaatcccaaaggaacctgtgtctcctcaagacctctgagagcgggttgccttccactcgaatcaaaaaatccaaagcactctctggtttcagcctgcaaagttgtcggcacagtatccccgtgttctgccatagctccttttatcacgacaccgacttcctcggggaggagctggatattgttgccgctaagtcacacgaggcttgtcagaaactgtgcacaaatgccgtccggtgtcagttcttcacctacacacctgctcaggcctcgtgcaacgaaggtaaaggtaagtgctatctgaagctgagctccaacggtagccccaccaagatcttgcatggaagaggggggatttcaggctataccttgcgtctgtgtaagatggacaacgaatgcaccaccaagatcaaaccaaggatagtgggtggcaccgcatccgttcgtggcgaatggccctggcaggtaaccctccacaccacatctcctacccaaagacatctatgcgggggtagcatcatcggcaaccagtggatcctcacagctgcccactgtttctatggcgtagaatcacccaaaattctgagggtgtacagtggcatcctcaatcagagcgaaatcaaggaggatacaagcttcttcggggttcaggagataatcatccatgatcagtacaaaatggccgagtcaggctacgatattgccctgctgaagttggagacaaccgttaactataccgatagccagcggccaatctgcctccctagtaaaggcgataggaatgtgatctacaccgattgttgggtcactggatggggataccgcaagctgagggataagatccagaacaccttgcaaaaggctaaaatcccattagtaaccaacgaggagtgtcagaagaggtaccggggccacaaaatcacccacaaaatgatctgcgcaggttatagggaggggggaaaagatgcatgcaaaggcgatagcggcgggccactcagttgtaagcacaatgaggtctggcacctcgtaggcattaccagttggggtgaaggctgcgctcagcgcgagaggcccggggtgtacaccaatgtggtggaatacgtggattggatcctggaaaagactcaggccgtctag

SEQ ID NO: 2437 - DNA, 633 bp, synthetic construct
  misc_feature 1..633: note = source = /note="Description of Artificial Sequence: Synthetic coding sequence"
  source 1..633: mol_type = other DNA
tgatccggcttttccctgaaatcatgtgccctttccaatctggcttgtatccgagatatattccccaataccgtcttcgccgactctaacatagattcagtgatggcgcctgatgctttcgtttgtggccgaatctgcactcatcatcccggctgcctgttcttcacctttttctcgcaggagtggcccaaggaatctcagagaaacttatgtctcctgaagacatctgagtcaggtttgccttcaacacgtatcaaaaagagcaaggccctgagtgggttttcgctccagtcatgtagacacagtatccctgtcttctgtcacagctcattctatcatgatacggacttcctgggcgaggagctggacattgtcgctgccaagtcccacgaggcttgccaaaagctgtgtacgaatgcagtccgctgtcaattcttcacttacacaccagcgcaggcgagctgcaacgaaggcaagggaaagtgttacctgaaactcagtagcaacggatcacccacaaagatcttgcacggaagaggcggcatatccggctatacacttaggttatgtaagatggataacgaactgcgtggcgcccccatgaaaatatctggctggctcaaaacaagctag

SEQ ID NO: 2438 - DNA, 2199 bp, synthetic construct
  misc_feature 1..2199: note = source = /note="Description of Artificial Sequence: Synthetic coding sequence"
  source 1..2199: mol_type = other DNA
atgagcgagacatctagaacagcgttcggtgggcgcagggctgtgcctcctaataactctaacgctgcagaggatgaccttccaacagttgaactccagggcgtagttccacgtggtgtaaacctgcaggagtttctgaacgtgactagcgtgcacttgttcaaggaacgctgggatacgaataaggtcgatcatcacactgacaagtacgagaacaacaagctaattgtgcgcaggggccagagtttctacgtgcagatcgacttctcgcgaccttacgaccctcgccgagacctgtttcgggtggaatatgtgattggcagatatcctcaggaaaataaagggacatatattccagttccgatcgtgtctgagctgcagtctggaaagtggggcgctaaaatagtgatgagggaggaccggtctgtcaggctaagcatccagagtagtcccaagtgcatcgtgggtaaattcaggatgtacgtggctgtctggactccgtatggtgttcttaggacttctagaaacccagagacagacacctacattctgtttaatccttggtgtgaggacgacgccgtttatcttgataacgagaaggaacgggaggaatacgtcttgaacgatataggcgtgatcttttatggcgaggttaacgatattaagacgaggagttggtcgtacggtcagttcgaagatgggatcttagatacatgtttatacgttatggacagagcccagatggacctgtccggccgcggcaacccaatcaaagtaagtcgagtaggcagcgctatggtgaacgctaaggacgacgagggcgtgcttgttggctcatgggacaatatttatgcatacggagtacctccatctgcctggaccggaagtgttgatatcctgctggagtaccgtagtagcgagaatccagtgcgctacggtcagtgttgggtgttcgcaggtgtgtttaacacgtttcttagatgtttgggtatcccagcacgcatcgtcacaaattatttcagtgcacacgataacgatgctaatctccaaatggacatcttcctggaggaagacggtaatgtgaattcaaagctgaccaaagattctgtgtggaattaccactgttggaacgaggcttggatgacaagaccagacctgcccgtgggatttggaggatggcaagcagtggatagcactccccaagaaaacagcgacggcatgtatcgctgcggtccagctagcgtgcaggctattaagcacgggcacgtttgcttccagttcgacgcaccctttgtgttcgcagaggttaattcagatttgatttatattaccgcaaaaaaagacggaacccacgtggtggaaaatgtcgatgccacacacataggcaagttgatagtaacaaagcagatcggcggcgacggcatgatggacatcaccgatacttataaatttcaagagggtcaagaggaagaaaggctagcgctggagactgcgctgatgtatggcgccaagaaaccactgaatacggagggagtgatgaagagcagatccaacgtggacatggactttgaggtcgaaaacgcagtcttgggcaaggatttcaagctgtccattacgtttcgcaataattcgcacaatcgctacacaatcaccgcgtacctctctgctaacattacgttctacactggcgtgccgaaggcagaattcaaaaaagaaacttttgatgtaaccctggaaccactctctttcaagaaggaggctgtgctgatccaagcaggcgaatacatgggccagttactggagcaggcatccctccactttttcgttaccgctcgaatcaatgaaacccgcgacgtgcttgctaagcagaaatccaccgtgcttaccattccagagattatcatcaaggtcaggggcactcaagttgtggggagcgacatgaccgtcactgtggagtttaccaatcccctgaaggagacattgagaaacgtatgggtgcacttagacggtcctggggtcacccgtccaatgaagaaaatgttccgcgagatcagaccaaatagcaccgtgcaatgggaggaggtatgccggccttgggtctctgggcaccgcaagttgatcgcttccatgtcttctgactctctgaggcacgtctatggtgagttggatgttcagatccagagacgtcccagcatgtag

SEQ ID NO: 2439 - DNA, 417 bp, synthetic construct
  misc_feature 1..417: note = source = /note="Description of Artificial Sequence: Synthetic coding sequence"
  source 1..417: mol_type = other DNA
atgtcggagacctcccgaaccgcctttgggggacggcgcgccgtcccgcctaacaattcaaacgcagctgaggatgacctgcctaccgtcgagctgcaaggagttgtgccacgcggtgtgaacttacaggaatttctcaacgtcacttccgtgcatctgttcaaggagagatgggataccaataaagtggaccatcatactgacaaatacgagaataacaagttgatcgtgcgtcgtggtcagtccttctacgtacagatcgactttagtaggccttacgaccctaggcgagacttgtttagagtggagtacgtgatcggcagataccctcaggagaacaaaggaacttacatccccgtgcccattgtctccgagttacaaagcggcaaatggggcgccaagatcgtgatgagatag

SEQ ID NO: 2440 - DNA, 1881 bp, synthetic construct
  misc_feature 1..1881: note = source = /note="Description of Artificial Sequence: Synthetic coding sequence"
  source 1..1881: mol_type = other DNA
atgagcgagacctctagaacagcctttggcggcagacgcgccgtccccccaaacaactctaacgccgcagaggatgatcttcctactgttgaattacagggggtggtgccacggggagttaacctccagggcagatacccccaagagaataaaggcacatacattccagttcccattgtgtccgagctacagagtggtaagtggggtgccaagatcgttatgagagaggatcgcagcgttaggctgtccattcagtcttcccctaagtgtatcgtgggaaagtttcgcatgtacgtagctgtgtggacaccctacggcgtgttgcggaccagtaggaacccagagactgacacatacattctgttcaatccatggtgtgaagacgatgcggtctacttggacaacgaaaaagaaagggaggaatacgtcttaaacgacattggcgttatcttctatggggaggtaaatgatatcaaaacacggagctggtcctatgggcagttcgaggacggcatcttggacacctgtctgtatgttatggatagggcacaaatggatctctccgggcgaggaaaccctattaaggtttctcgcgtgggaagcgccatggtcaacgcgaaagacgacgaaggcgtgctggtagggagctgggacaatatttacgcctatggagtgcccccatctgcctggacaggatccgtggatatcttgctcgagtatcggtcatctgagaatccagttcggtatggacagtgttgggtttttgccggtgttttcaatacgtttttgaggtgtcttggcattccggcgagaattgtgacgaactattttagtgcccatgataatgatgccaacttgcagatggacatatttctggaagaggatggaaatgtgaactctaagctgacaaaggacagtgtctggaactaccactgttggaacgaggcctggatgacgagacctgatctgcccgtggggtttggcggatggcaagctgtcgatagcacacctcaggagaatagcgacggtatgtatcggtgcggcccagcctctgtccaggcaataaagcatgggcacgtctgcttccagtttgatgcaccttttgtatttgctgaggtgaatagcgatctgatttacattaccgcgaagaaagatggaacacatgtggtggagaacgtggatgctactcacatcggtaagctcatcgtgacaaagcaaattggcggggacggcatgatggacataaccgatacctacaagtttcaggaggggcaggaggaagaacgcctggccttagaaaccgcccttatgtacggtgccaaaaagcccctaaacaccgaaggcgtgatgaagtcccggagcaacgttgacatggattttgaagtggagaacgctgtcctcggaaaagactttaaactgagcatcactttccggaataactcgcataacaggtacacaatcaccgcgtacttatccgccaacatcacgttctatacaggagttccgaaggccgagtttaaaaaggaaacttttgatgtgacactcgaaccgttgagcttcaaaaaggaggcagtactgatacaagccggcgaatatatggggcagctgctggagcaggctagcttacatttttttgttaccgcacgcattaatgaaacccgggatgttttagccaaacagaaatctacggtcttgacaattccagagatcattattaaggttaggggcacgcaagtggtcggatccgacatgacggttactgaagtgtgtcgtccctgggtgtccgggcatagaaaattgatagcatcgatgtcctcagattccctgcgacatgtatatggagagttagacgtgcagattcagaggagacccagcatgtag

SEQ ID NO: 2441 - DNA, 8835 bp, synthetic construct
  misc_feature 1..8835: note = source = /note="Description of Artificial Sequence: Synthetic coding sequence"
  source 1..8835: mol_type = other DNA
atgactctgcgcttgctggttgccgctttgtgcgcaggaatcctggcggaagctcccagagtccgcgctcagcaccgggagcgcgtaacgtgcacccggttgtacgccgccgacatcgttttcttgttggacgggtcttcatctataggccggtccaatttcagggaggtccgcagttttctcgagggtctggtgctcccttttagtggggcggcctcagcgcaaggggttagatttgcaacggtccagtattctgatgatcctcgcaccgaatttggactcgacgccttggggtctggcggtgatgtcatccgcgcaataagggagctttcatataagggaggaaacacacgcacaggagctgcaattctccacgttgccgatcacgtgtttctccctcagctcgctagaccgggggttcctaaagtctgtattctgattaccgacggtaaaagtcaggaccttgtggacacagctgcccagaggctcaaaggccagggagtgaagctgtttgcagtgggcatcaagaatgcagatcccgaggagctcaagcgtgtcgcaagtcagccaacgagcgattttttcttcttcgtgaatgatttcagcatcctccgtactctgctccccttggtgagtcggagggtgtgtaccactgcaggaggcgtgcctgtgactagaccacccgatgattctacctcagctcccagggatctggtactatctgagccctcctcccagtcattaagggttcaatggacagctgcctccgggccagtcaccggatacaaggtacagtacacacctcttaccggactgggacagccgctgccttctgaaaggcaggaagttaacgttccagccggggagacctcagtgagattgcgtggcctgcggccattaacagagtatcaggtaactgtgatcgccctttatgctaattccataggtgaggctgtgtctggaaccgctagaacaacagctctggagggcccagaacttacaatccagaatactaccgcccacagtctgctagtcgcctggcgttctgtcccaggggcaacaggttaccgggtgacatggcgtgtcctaagcggggggccgacccagcagcaggagctcggccctgggcagggcagcgtcctgctgcgcgacttggagcctggcaccgactacgaggtcactgtgagcactctgtttggccggagcgttggccccgccacatctcttatggcaaggactgacgccagtgtagaacagacgctgcggccagttatactcggacctacctccattctgctctcctggaatctcgtgcctgaggcacgaggctatcggctggagtggaggcgggagacggggctcgagccacctcaaaaggtagtcctccccagcgacgtgaccagataccaactggatgggctccagcctggcacggagtacagactgacgctgtacaccctgctcgagggacatgaagtggccacaccagctacagttgtaccaacagggcctgagctcccagtctcccctgtaactgacctgcaggcaactgagctaccgggtcagagggtccgcgtatcctggtcacccgtgcccggcgccacgcagtatcgcattatagtgagatctactcagggagtggaacgaaccctggtactccctggctcccaaaccgcttttgatctggacgacgtgcaggctggtctgtcgtacactgttagggtctctgcccgcgttggaccacgggaagggtctgccagcgtgcttaccgttcggcgagaacctgaaacgccattggctgtccccggtctgagagtggttgtatctgatgccacgagggttcgcgttgcctggggacccgtgcccggcgctagtggcttcagaatttcatggtccacaggctcaggaccggagagcagtcagacgcttccgcctgatagcacggcaacggatatcaccggccttcagccaggcaccacctaccaagtggcggtctcagtgctgcggggccgagaagagggacctgccgccgtgatcgttgcccgtacggaccccctggggccagtccggacagtccatgtgactcaggcgtcctcttcatcggtgacaatcacctggacacgcgtgcccggcgccacaggatacagggttagctggcactccgcgcacggacctgaaaagtcccaattggtgtctggcgaggcaacagtggctgaactcgatgggcttgagccagacaccgagtacacggtgcacgtcagagctcatgttgctggcgtggacggacctcccgcatccgtggtggtgcggactgctccagagccagtgggaagagtgtctagactgcagatacttaacgcctcaagtgatgttctacgtataacttgggtgggggtcaccggagccactgcctaccgcctagcctggggtaggtcggagggagggcccatgcgccaccagattttgcctgggaacactgatagcgctgaaatccgcggactggaaggtggagttagctatagtgtccgggtgacagctctcgttggtgacagggaaggtacccccgtctcaattgtggtgacaaccccaccagaagcccctcctgctcttggtactctacacgtcgtgcagaggggcgagcattctcttagactcaggtgggagcccgtccctcgcgcccaggggtttcttctacactggcaaccagagggcgggcaagagcagagtcgggtgttgggcccagagttgagctcttaccacctggacggcctggaacccgccactcagtacagagtacgcctgtcggtattgggacctgcaggagagggacctagcgccgaagtgactgcgaggactgaatcacctcgcgtgccctctatagagttgcgcgtcgtggacactagcatcgatagtgtcactctggcatggactcccgttagtcgagcttctagctatatactttcctggagacctctgagggggcccggtcaggaggtgcctggctccccccaaacacttccgggtatctcctcatcgcagagagtcacagggctcgagcctggagtgagttacatcttcagcctcacaccggttctggacggcgtacgcggacctgaggcctctgttacccaaacaccagtttgcccccggggactcgctgacgtagtgttcctcccccatgccacgcaggacaatgctcatagagccgaagccacgcgacgggtcctggaacggctcgtgttggcattaggtccgctcggcccccaggccgtacaggtgggcctgttaagttattctcaccgtcccagtccactctttcctctcaacggctcacatgaccttggcattattctgcagcgaatccgtgatatgccctatatggatccgtccggcaacaatctaggtacagcagtagtcacagcgcacagatacatgctggcacccgacgcgcctggccggcgccagcacgtccccggcgtgatggtgttgcttgtggatgagccactgcgcggggacatctttagtcccatccgagaggcccaggctagtgggctgaatgtggtaatgttgggaatggctggggctgacccagaacaactgaggagacttgcaccaggcatggactccgtccagacattcttcgccgtggatgacgggccgtcactagatcaggctgtgtctggcctggctactgccctatgtcaagcatccttcactacccagccgcgacctgagccttgcccagtttattgccctaaaggccagaaaggggagccaggcgagatgggcctgcgaggccaggttggtccgcctggcgatcccgggctgccgggacgaaccggcgcccctggaccgcagggaccgccaggtagcgccactgctaaaggcgagcgcggttttccgggggctgatgggagacctggctcccccgggagggctggcaatcctggtacaccaggggctcctgggctgaaggggtctccgggccttcccgggcctagaggcgaccccggcgaacgcggcccacgcgggcctaaaggtgagccaggagcccccggacaggtaattgggggtgaaggtcccggattgcccggccgtaaaggggaccccggtccaagtggaccccccggccctagaggccccctcggggaccccggccccagaggcccgcccggcctcccaggcacagcaatgaagggcgataagggcgatagaggcgaacggggacccccaggacctggggaaggtggcatcgctcctggcgaacccggtttgccaggcctacccggctctcccgggccccaagggcctgtgggaccccctggcaaaaagggcgagaagggagacagcgaggatggagcacccggattgccaggtcagccaggttccccaggagagcaagggccacggggccccccaggagccatcggtcctaagggcgaccggggattccctggcccgttgggggaggccggtgagaagggagaaagggggccaccaggaccagctggttccaggggactccccggggtggccgggcggcctggggccaagggccccgaagggcctcctggaccaaccggccgccaaggtgaaaaaggggaacctgggagacctggggaccctgcagtggtgggacctgccgtagccggccccaagggagagaagggagacgtcggaccagccggaccccgaggggctacaggcgtgcagggcgaacgcggcccgcctggccttgttctgcccggcgaccctggccctaaaggggatccaggcgatcgagggcccatcggattgaccggaagagctggcccacctggtgactccggcccccccggagaaaagggtgatcccggaaggccaggcccccctggtccggtggggccccgaggtcgtgatggagaggtaggcgaaaagggggatgaaggccctcccggtgaccccggcttgccaggcaaggccggtgaacgtggccttaggggcgctcctggcgtgcgcgggcctgttggggaaaagggagaccagggcgatccaggtgaggatggcaggaatggaagccccgggagtagcgggcccaaaggggacagaggggagccagggcccccaggcccacctggacgactggtggacaccggtccgggcgccagggaaaagggggagcccggcgataggggccaggagggtccacgcggtccaaagggagatccggggctccccggtgccccaggcgaaagggggattgaaggattccgaggcccccccggccctcagggtgaccccggcgtgcgcggccctgctggagaaaaaggcgaccgggggccccctgggcttgatggaagaagcggtctggatggcaagcccggtgccgcaggaccttccggtcctaatggggctgctggtaaagctggagacccaggacgcgacgggctgcctggcttacgtggagaacagggcctgcctgggccaagcgggccccctggccttcccggcaaacccggagaagacgggaaaccaggcttaaatggcaaaaacggcgaacccggagacccaggtgaggacggccggaaaggcgagaaaggtgactccggagcttctggcagggaagggcgagatggccccaagggggagcggggggctcctggcattttagggcctcaagggcctcccggccttcctggccccgtcggcccgcccggccagggatttcctggagtacctggagggactggaccaaagggggatagaggtgaaacaggtagcaagggggaacagggcctcccaggagagcgggggctgcggggggaacccgggtctgtgcctaatgtggaccgccttctggaaacagcgggtattaaggctagcgctctcagggaaatagtagagacatgggatgaaagtagcggcagtttcctcccagtgcccgagcggcgcaggggacctaaaggagactcaggggaacaaggaccgcctggcaaagaggggccaatcggctttccaggtgaacggggcttaaagggcgacaggggcgaccccgggccccagggccccccggggttggctctgggtgagcggggcccccccggcccttccggacttgcaggagagcccgggaaacccggtatcccagggttgccgggtagagcagggggcgtgggggaggccggaagaccaggtgaaaggggagagcgaggagagaaaggagaacgcggggaacagggcagagatggcccgcctgggctccccgggacaccgggaccacctggccctccagggccgaaggtaagtgtggacgaacccggccccggcttgtccggtgagcaaggcccacccggactgaagggtgctaagggggagcctggtagcaacggcgatcaggggccgaaaggagacagaggcgtgcctggcattaagggggaccgcggagaaccggggccacgtgggcaggacggcaatcctgggctacctggcgagcggggtatggccgggcctgaagggaagccaggcctgcaagggccgagaggccctccgggacctgttggtggacacggagaccctggacccccaggcgcccctggactcgcaggacccgcaggcccacaaggcccttcaggattaaagggagaacctggagagaccggaccccccggccgtggactcacaggccccacaggtgctgtgggattaccaggacccccaggtccatcaggtctggttggaccccagggttctcctggactgccaggccaagtcggggagaccggcaagcctggtgcccctggtcgtgatggcgcgtctggcaaggatggcgacagaggcagtcccggcgtgccaggatccccaggcctgcccggacctgtggggcctaaaggggaacctggccctactggggctcctgggcaggctgtagtgggcttgccaggcgccaaaggcgaaaaaggtgcccccggcgggctggctggcgacctggtgggggagcctggagcgaagggtgacagaggtttaccaggccccagaggggagaagggcgaagctggaagagctggtgagcccggcgacccaggagaagatggtcagaaaggcgccccagggccaaaggggttcaaaggggacccaggggtgggcgtgccggggtcacctggacctccagggcctcctggggtgaaaggcgacctgggacttccaggtctgcccggagcgcccggggtggtcgggttccccggacaaacgggccctagaggtgagatgggacagcccggaccatctggtgaacgcgggttggcggggcccccgggaagggaaggcatccctgggcctcttggacctcccggccccccggggagcgtcggcccgcccggcgcgtccggcctgaagggagataagggtgacccaggggttgggctacctggccctcggggggaacgtggcgaacctggaatccgcggtgaggatggccgtccgggccaggaaggcccgagaggcctcactgggcctccaggtagccggggagaaaggggagagaaaggtgacgtcggctcagccgggcttaagggggataagggcgactctgcagttattctgggacctccaggccctaggggcgccaagggagacatgggggagcgtggccctcggggcctggatggcgacaaggggcctcgaggggataatggcgaccctggagacaaaggtagtaagggggagccaggcgataaagggtcagcgggcctcccggggctgcgcgggcttctgggtccgcagggacagcctggggcggccgggattcccggggaccccggcagccccggcaaggacggtgttccagggattaggggtgagaagggagacgtggggttcatgggaccacgtggactaaagggtgaacgtggcgtgaaaggcgcatgcggtctggatggcgaaaaaggtgataaaggtgaggctggcccccctggccggcccggattagccggccataagggagagatgggggaacctggcgtcccaggacagagcggcgcacctggtaaggaggggttgatcggcccaaaaggagatcgtggcttcgacggtcagccaggaccaaagggagaccaaggggagaaaggggaacgcggtactccagggataggaggctttcccggcccttctgggaatgacgggtcggcagggcctcctggtcctcctgggtcggttgggcctcggggccctgaggggctgcagggccaaaaaggcgaaaggggtccacccggcgaacgagttgttggcgcacctggggtcccaggtgccccaggagagcgaggagaacagggacgacctggaccagctgggccaaggggggaaaaaggagaggctgccttgacggaagacgacatacgcggttttgttaggcaagaaatgagtcaacattgtgcctgccagggacagtttattgcttcaggcagcagacccttgccctcctatgctgcggacaccgcagggtcccaattgcatgcggtccctgtgctgcgcgtgagtcatgcggaagaagaagagcgcgttccacccgaggacgatgaatattctgaatactccgagtactctgtggaagaataccaagaccctgaggccccttgggactccgatgacccatgttcgttacctctggacgaaggctcctgcactgcatacactctccgctggtatcatagagcagttactggatctacagaggcctgccacccattcgtgtacggcggctgcggaggcaacgctaacaggtttggaacccgcgaggcctgcgaaagacgctgtcccccgcgtgtggtacagtcccaaggcactggaaccgcccaggattag

SEQ ID NO: 2442 - DNA, 8739 bp, synthetic construct
  misc_feature 1..8739: note = source = /note="Description of Artificial Sequence: Synthetic coding sequence"
  source 1..8739: mol_type = other DNA
atgaccttgaggttgctcgtggcagcactgtgcgcagggatcctggcggaggcacctcgcgtaagggctcagcatagggaacgcgttacttgcacaaggctctacgcagctgatatcgtcttcctgctcgatggcagctcttcaattggcagatccaacttcagggaagtccggtccttcctggaggggctggtcttgccgttttccggcgcagcttctgcccagggggttcgtttcgctaccgtccagtattccgacgatccacggaccgagtttggtttagacgccctgggctctggaggggacgtcattcgcgccatcagagaactatcatataaaggtggaaacacgagaacaggggctgctatcctccacgtggctgaccacgtctttctccctcagttggcacgcccgggagtgccaaaagtgtgtattctgatcacagacggcaagtcgcaggacctcgtagacactgccgctcagcgcttgaaaggccaaggcgttaaactgtttgccgttggtattaaaaatgctgaccctgaagagctgaagcgcgttgcctcccagcccacttctgacttctttttttttgtgaatgacttcagtatcctccgcaccttgcttccactcgtttccagaagggtctgcaccacagcggggggcgttcccgtgacccggcctccggatgacagcacatcagccccaagggatctggtgctgtctgagccttctagccaaagcctaagagtgcagtggacagctgcatctgggcccgtgaccggatataaggtgcagtacacaccgctgaccggcctgggacaacccctgccctcagagaggcaagaggtcaatgtgcccgccggggagacaagcgtccgactacgaggcctccgccccttgaccgaatatcaagtgacagttattgcactttacgcaaactcaatcggcgaggctgtttccgggacagctaggaccaccgcactggaagggcccgagctcactattcagaatacgacagcacactccctgctggtcgcgtggaggtccgtaccaggcgccaccggctacagagtgacatggagggtgctaagcggcgggcctacacagcaacaggagctcggtccaggacagggctccgttctgcttagggacctggagcccggaaccgactacgaggtgaccgtcagcaccctctttggtcggtccgtggggcccgctacaagcttgatggccagaacagacgcttccgtagaacagaccctgcgaccagtgattcttggccccaccagtattctactctcttggaatctcgtacccgaggctcgggggtatcggttagagtggagaagagaaaccgggctggagcctcctcagaaggtagtgctcccctcagacgtcaccagatatcagctggacggcctgcagccagggactgagtatcgactgacactttacacactcttggaggggcacgaagtggccacccccgccaccgtggttcctactggtccggagctgccagtgtctcctgttaccgatctgcaagcaacagagttgcccgggcagagggtaagagtgtcctggagccccgtgcccggtgccacccagtaccgtatcattgtaagatcgacccagggtgttgagaggactctcgtccttcctggatctcagaccgcctttgacctcgatgacgtgcaggcagggctatcttatacggtcagagtgtccgcaagagtgggtccccgggagggctctgcctcggtgctaacagttaggcgcgagccagagactccgctggccgtgcctgggttgcgcgtcgtggtctcagatgccactagggtgagagtcgcttggggccccgtccctggtgcatccggatttcgaatatcttggtctacaggctcgggccccgagtcatctcagaccttgccccctgattctacagcaacagacattactgggttacaacctggcaccacttatcaagtggctgtgagtgtcctacgcggaagggaagaaggcccagcggcagtgatagttgccaggacagacccactcggaccggtgcggacagttcatgtgactcaagctagctccagcagtgtcaccatcacttggacccgggttcccggcgctactggttatcgggtctcgtggcacagtgcccacggtccagagaaatctcagctggtgagtggggaagccacagtggccgagcttgacggtcttgaacccgacaccgaatacactgttcacgtgcgcgcacacgtggctggagtagatggacccccagccagtgtggtggtccgtacagcacctgagccggtcggacgggtgtcacggctccagatccttaacgccagcagcgatgtgctcagaatcacatgggtgggcgtcaccggcgccaccgcctatcgcctcgcttgggggaggagtgaaggggggcccatgcggcaccagatactccctggcaataccgattccgcagagatccgcggcctcgagggcggcgtctcctacagcgtgcgtgttaccgccctcgtgggcgaccgcgaaggaaccccagtctcaattgtagtaactactcctcccgaagccccaccggcgctgggcacgcttcacgtcgtccagcggggggagcacagcttgagactcaggtgggagcccgttcctagagcccaggggtttttactccactggcagcctgagggcgggcaggagcagtctcgagtgttgggccctgaactctcctcctatcatttagacggcctggaaccagcgacgcagtatagagtgcgattgtctgtgctgggccctgctggcgagggcccgagcgcggaagttacggctcgaacagagagtcccagagtgccaagtatcgaactcagggtcgtggacacctctattgactcggtgaccctagcatggacacctgtgtctagggcttcctcctatattctgtcctggcgaccgcttagaggaccaggccaagaagtgccgggttccccccagacactgcccggtatttcaagcagtcaacgagtcaccggtctagagcctggcgtctcctacatcttcagtcttacccctgtcttggacggtgtgaggggaccagaggcttccgtaacccagacccctgtgtgcccacgaggattggcggatgtggtgttcctgcctcacgccactcaagacaatgcacatcgggctgaggctaccagacgcgtcttagagaggcttgtactggccttgggtcccctgggaccgcaggccgtgcaagtaggacttcttagctatagccaccgtcccagtccactatttcccctgaatggatcacatgacctaggtattatactgcagcgcattcgggacatgccctatatggacccatcgggcaacaacttaggcacagccgtggttactgcccatcgctacatgttagcgccagacgcgcccggacgcagacaacacgtccccggcgtcatggtgcttttagtggacgaaccactgagaggggacatattctcccctatccgggaggcacaggcctctggtcttaatgtggtgatgttggggatggctggcgccgaccccgaacagctccgaaggctggccccaggcatggactcagtgcagaccttttttgcagtcgatgatggtccatccctggaccaggctgtgtctggactcgctaccgcactttgccaggcgtcctttactacccagcccagacccgagccttgccccgtctactgccctaaaggacaaaaaggggaacctggcgaaatgggtcttcgtggtcaagttggcccccccggcgaccccggtctccccggtcggactggcgcccccgggccgcagggacctccggggtccgcgaccgccaagggcgagcgcggtttccctggagccgatgggcgccctggctcacctggccgcgctggaaatccaggtacccctggggccccaggcctgaaaggttcaccaggattaccaggacctcgcggggatcccggcgagcgcggccctaggggcccgaaaggcgagccaggagctcctggtcaggtcatcggcggcgaggggcccgggctcccgggacggaagggagaccccggcccgtctggccctccaggcccacgggggccactcggtgaccccggcccgcgaggaccgccgggcctgcctggcactgccatgaaaggcgataagggagataggggggaacgaggacctccaggcccaggtgagggtgggattgctcctggtgaaccaggactgcctgggctgcccggtagtcccgggcctcagggccccgtgggtccacccggaaaaaagggggagaaaggggattcagaggatggggcacccggacttccggggcagcctggcagccccggcgagcaggggcctagggggcccccaggtgccattgggccgaagggtgatagagggttccctggtccactgggcgaagcgggagaaaaaggcgaacgggggcctcccggccctgccggatcccgaggtcttcccggggtcgcgggacgacccggtgctaaggggccggagggacccccaggcccgacgggccgacaaggtgaaaagggtgagcccggtaggccgggggatcccgccgtcgtggggcccgcagtcgcgggtcctaaaggtgaaaaaggggatgtgggacccgcgggaccacggggcgccacaggtgtgcagggagagcgcggaccgcctggcttagtgctgccaggggacccggggcctaaaggagatccaggcgaccgcgggcccattggtctcaccggaagagcaggtcccccaggcgatagcgggccgccaggggaaaagggagaccctggccggcccggcccccccggcccagtcggaccgagaggccgagatggcgaagtgggtgagaaaggagacgaagggccaccaggcgatcctggactgccaggaaaagccggagaaaggggcctacggggcgcacccggtgtgagagggcccgtcggagaaaaaggcgaccagggcgacccgggcgaagacggaagaaacggtagtccaggatcatctggtcccaagggagaccgcggcgaaccagggccaccaggtccacctggccggctcgttgatacggggccaggagctagggagaaaggcgaacctggggatagggggcaggagggacctcggggcccgaagggcgatccaggtctgcccggcgctcctggagagcgcggaattgaaggatttcgagggccgccaggcccccagggtgacccgggcgtaaggggccctgctggcgagaagggggaccggggcccacctggccttgacggcaggtcgggtctggatggaaagcctggtgctgccggccccagtggcccaaacggagctgccgggaaggcgggagacccgggaagggatggactgccaggcctgaggggcgagcaggggttgcccggcccatccggacctccgggcctcccaggaaagcctggggaggatggaaaacccgggcttaatggcaagaatggagaacctggcgaccctggggaagatggtcggaagggtgagaaaggtgatagcggcgcttcgggcagggaaggattcccgggggtaccaggcggcacgggacccaaaggcgaccggggggaaacaggatccaagggcgagcaggggctgcccggtgagaggggcctgaggggggaaccgggctcagtgcccaacgttgacagactgttggagaccgcagggatcaaggccagtgctttgcgggagatcgttgaaacttgggatgaatcctctggaagcttccttcctgtgccagagaggcgccgaggtcctaagggcgacagtggcgaacaggggccacccgggaaggagggtcccattggctttcctggggaaagaggcctaaagggcgatcgtggcgaccccggccctcagggcccgcccggcctggccctaggggaacggggacctccaggtcctagtgggctagccggtgagccgggcaaaccaggaatccccgggctgcctggccgggcaggtggagtgggagaggccggacgcccaggcgagcgaggagaacgaggcgaaaagggtgagagaggcgagcaggggagagacggcccacctggcctgcctggtacacccgggcctcccggcccccccggccctaaagtatccgtggacgaacccggacctggcttaagcggcgagcaaggacccccagggctgaagggtgccaagggggaacctggcagtaatggagaccagggccccaagggcgatcgcggagtgccgggcattaagggagatagaggggaaccaggccctcggggacaggatggtaatccaggtttacccggcgaacggggcatggctgggccagagggcaagcctgggctgcaggggccacgcggcccccccgggccagtgggcgggcacggagacccaggcccgcccggagcccccggcctggcaggtcccgctggccctcaggggcccagcgggctgaagggagaacccggcgagactggcccccctggcaggggtctgactggaccaacgggcgccgtgggcctgcccggacccccggggccctctggccttgtgggccctcaggggtcacccgggctccccggacaggtcggagaaaccggaaaacctggtgcgcctggccgggatggtgcctcaggtaaagatggtgataggggaagccccggcgttcccgggagccccgggctgccaggcccagtgggtccgaaaggggagcccggtcccacaggcgctccaggccaggccgtggtgggcctgccaggcgccaaaggtgaaaagggcgccccaggaggcctagcgggcgacttggtcggagaaccaggcgccaaaggcgatcggggcctgccagggccgcggggcgagaagggtgaagccggtcgggccggagagccaggagaccccggtgaagatggccagaagggcgcgccaggacccaagggattcaagggcgatcccggcgttggtgtcccaggctctccaggtcctcccgggccacccggcgtgaaaggagacctcggtcttccaggtctgccaggtgcccccggcgttgtcggcttcccagggcagaccggcccgcgcggcgaaatgggtcaacctgggcctagtggggagagaggcctcgctggcccaccaggtagggaaggcattcctggaccactcggcccacccggaccacctggctctgtgggtccccccggcgctagcggcttaaagggcgacaaaggcgacccgggcgtcggccttcccggcccccgcggcgagaggggcgagccagggatccgaggcgaagatggccggccagggcaggaagggccgcggggtcttacgggaccacccgggagcagaggagaacggggagagaaaggcgatgtggggagtgccgggctgaaaggagacaagggagactccgctgtgatcctggggcctcctggaccccgcggcgctaagggggatatgggggagaggggaccacgggggctcgatggggataagggccctcggggagacaacggggatcccggagataagggttccaagggtgaacccggcgataaaggcagtgctgggcttccaggtctgcgcgggcttttagggcctcaaggccaacctggcgcggcgggaattcccggagacccaggctccccagggaaggatggagttcctggcattagaggagagaagggcgatgtgggctttatgggtcctcgcggactcaagggggagcggggggtgaagggcgcctgtggactggacggggaaaagggcgacaagggagaagccggccccccagggcgaccaggcctcgccggacataagggggagatgggggagcccggtgtgcccggtcaatcaggcgctcctggtaaggaagggttaattggccctaaaggcgacagaggctttgatggtcaacctgggcccaagggagatcagggcgaaaaaggcgaacgcggcaccccaggaatcgggggtttcccaggcccatccggtaacgatggcagtgccggacctcctggcccacctggtagcgtcggcccccgaggccccgagggactgcagggccagaagggtgaacggggccccccaggtgaaagggttgttggcgcaccaggggttcctggcgctcctggcgagcgcggggaacagggcaggcccgggcctgctggtccccggggagagaagggggaagctgctcttacggaggatgacatccgtggttttgtgcgacaggaaatgtctcaacactgtgcctgccagggccagtttatcgcctccggatctcggccactcccatcctacgcagcagatactgcgggttcccagttacacgccgttcctgtgctgagagtctcccacgccgaagaagaagagcgcgtgcctccagaggacgacgagtactccgagtacagcgagtactctgtggaggagtatcaagaccccgaggccccatgggacagtgatgacccctgttccctccccctggacgagggctcttgcacagcctataccctcagatggtatcaccgggcagtgactggcagtaccgaggcctgtcatccgtttgtgtatggaggctgcgggggcaacgcaaatcgctttggaacccgtgaggcctgcgagaggcggtgtcctccccgcgtcgttcagtctcaaggcaccggtactgctcaggactag

SEQ ID NO: 2443 - DNA, 435 bp, synthetic construct
  misc_feature 1..435: note = source = /note="Description of Artificial Sequence: Synthetic coding sequence"
  source 1..435: mol_type = other DNA
atgtggctgcagagcctactgttactgggtactgtggcctgctcaatcagtgctccggccaggtctccttctccaagcactcagccgtgggaacatgtgaacgccatccaggaggccaggcggctcctaaacttgagtcgagacaccgccgccgagatgaatgaaaccgtggaagtcatttcagagatgttcgaccttcaagagcccacttgtctgcagaccagattggaactgtacaagcagggcttgcgagggtctctgacgaagcttaaaggaccacttaccatgatggctagtcactataaacaacactgtccacccaccccagagacaagttgtgccactcaaattatcaccttcgagagcttcaaggaaaaccttaaagatttcttactggttattcccttcgattgctgggagcccgtacaggagtag

SEQ ID NO: 2444 - DNA, 1218 bp, synthetic construct
  misc_feature 1..1218: note = source = /note="Description of Artificial Sequence: Synthetic coding sequence"
  source 1..1218: mol_type = other DNA
atggaagcctcctttgtgcaaaccaccatggctcttggtttgagctccaaaaaagcttctagtcgcaacgtggcggtcgaaagaaagaacttaattaccgtttgccggtttagcgttaaaacccttctcgaaaaatacaccgctgaacctattgacgatagttctgaagagtttgtaaacttcgccgctatcctggagcagatactgtcacaccggttcaaagcctgtgcacctgccggtccagtgtcatggtttagtagcgatggccagagaggcttctgggactacatcagattagcatgcagcaaggtgcccaacaactgcgtgagcagcattgagaatatggagaatatctcaacagctagggccaaaggacgggcatggatcagggtcgctctcatggagaaacggatgtcggagtacattaccaccgccctgcgggatactaggactacccgccgtttctatgactcaggggctataatgctgcgcgacgaggctaccattttaaccggtatgctgatcggattatctgccatcgatttttctttttgcctcaaaggagaggttcttgacggaaaaactcccgtggtgatcgactacactccctacctaaagttcacgcagtcttatgactacctaactgacgaggaagaacggcactctgccgagagttccacctccgaagataactctcctgaacacccatacctgcctcttgtgaccgatgaggattcttggtactccaagtggcacaaaatggagcagaaattccgcattgtctatgcgcaaaagggttacctagaagaactggtgcggcttagagagagtcaactcaaggatctagaagccgaaaatcgcaggctccagctgcagctcgaggaggctgccgcccagaatcagagggaaaaacgcgagctcgagggggtgatcctagaactccaggagcagctcacaggtctcattcccagcgaccatgctccactggcccagggctccaaggagctgacaacgccactagtgaatcagtggccctctctagggactttgaacggcgctgagggggcgtccaactccaagctatacagacgacatagctttatgtctacagagccactgtcagccgaagcatcattgtcgtctgattcccagcgcctcggtgaggggacaagggacgaggagccctggggccccatcggtagttcagaacctaactag

SEQ ID NO: 2445 - DNA, 603 bp, synthetic construct
  misc_feature 1..603: note = source = /note="Description of Artificial Sequence: Synthetic coding sequence"
  source 1..603: mol_type = other DNA
atgtccccagagccggccctatcacctgctctgcagctgctgttatggcactccgcactgtggacggtccaggaggccacgcccttgggtcccgcatcctccctcccgcagtctttcctcctcaaatgtctggagcaggtccggaaaatccagggagatggcgctgctctgcaggagaagctttgcgcaacctacaagctgtgccaccccgaggagctggtgctgctcggacacagtctcggtattccctgggcacctttgtccagctgcccaagccaggcccttcaactggctgggtgcctgtcccagctgcatagtgggctgttcttgtatcagggcctgctgcaagctctcgaggggattagtcctgagctgggacctactctggatacattgcagctggacgtggcggattttgcaactaccatctggcagcaaatggaagagctgggcatggctcctgcattgcagcctacccaaggggcgatgcctgccttcgctagcgcctttcaaaggagagctggtggcgtcctggtagcctcccatttgcaatcctttttagaagtttcctaccgcgttctgcggcatctggcgcagccttag

SEQ ID NO: 2446 - DNA, 516 bp, synthetic construct
  misc_feature 1..516: note = source = /note="Description of Artificial Sequence: Synthetic coding sequence"
  source 1..516: mol_type = other DNA
atggcagggcctgcgactcagagccccatgaagctgatggccctgcaattactgctgtggcactccgccctctggaccgtccaggaagctacacctttgggccccgcctcttcattgccacagagctttcttttgaagtgcctggaacaggtcaggaagatacaaggggacggggccgccctgcaagaaaagctcgtgtccgaagccgggtgtctgagccagctccacagcgggctcttcttgtaccagggcctgctccaagcactggagggaatctctccagaactggggccgacactggacaccttacagttagacgtggcagacttcgctacaaccatttggcaacagatggaagagttgggaatggctcctgctcttcagcctacgcagggcgctatgccagccttcgcctctgcctttcagagaagagctgggggggtcctcgtggcctcccacctgcagagctttcttgaggtgtcttatagggttctgaggcatctggcgcagccttag

SEQ ID NO: 2447 - DNA, 615 bp, synthetic construct
  misc_feature 1..615: note = source = /note="Description of Artificial Sequence: Synthetic coding sequence"
  source 1..615: mol_type = other DNA
atggcaggtccagcaacacagtcgcctatgaagctaatggccctgcagctactgctgtggcatagtgccctctggacggtgcaagaggccacgcctctgggcccagcctcctccttgccccagagctttctgctgaaatgcctggaacaggtgcgcaaaattcagggcgacggggccgcactgcaggagaagctatgcgctacctataagctgtgtcatcccgaagagttggtgttgctcgggcactctctaggaatcccttgggccccactctcttcatgtccctctcaggccctgcaactggccggatgcctcagccagctccactcagggctcttcctataccagggcctgctccaggctttagaaggcatttcccctgagctgggtccgacacttgataccctccagctggatgtggcggacttcgcaaccaccatctggcagcagatggaggagctcggcatggccccggccttgcagccaacgcagggtgcgatgcctgccttcgctagtgcgttccagcgacgggccgggggcgtcctggtggcctctcaccttcaatccttcctcgaggtgtcataccgtgtactcagacacctggcacagccctag

SEQ ID NO: 2448 - DNA, 3696 bp, synthetic construct
  misc_feature 1..3696: note = source = /note="Description of Artificial Sequence: Synthetic coding sequence"
  source 1..3696: mol_type = other DNA
atgaggctgttggccaaaattatatgtctaatgctgtgggccatctgcgttgccgaggactgcaacgagctcccacccaggagaaatacagaaatcttgacaggatcttggtcagaccagacttatcctgaaggaacccaggcgatttacaaatgtcgacctgggtaccgcagcctcggtaatgttatcatggtgtgtaggaaaggagagtgggtggcgttaaacccacttcggaaatgtcaaaaacgaccctgcggtcacccaggtgataccccctttgggactttcacgctcacaggcggtaacgttttcgagtatggtgtgaaggcagtgtatacctgtaacgaaggttatcagttacttggcgagatcaactaccgcgagtgcgacactgacggttggaccaacgacatccctatctgtgaagtcgtcaagtgtttgccggtaaccgctcccgaaaacggaaagatagttagcagtgccatggaaccagatcgggagtaccactttggccaggctgtgagattcgtgtgcaactctggatacaagatcgaaggagatgaggaaatgcactgttcagatgatggcttttggagtaaggaaaaacctaaatgcgtcgaaatctcttgcaaaagccccgacgtaataaatggtagccctatctctcagaagatcatctataaggagaatgagcggtttcagtataagtgcaatatgggatacgaatattccgaaaggggcgacgcggtgtgtaccgaaagtggttggcgtccgctgccaagctgtgaagagaagtcttgtgacaacccatacattcccaatggtgactacagtccacttcgtatcaaacatcgaactggtgacgagatcacatatcaatgccgtaacggtttttaccctgctaccagaggaaataccgcgaaatgcacttctaccggctggattccagctccacggtgtactctcaagccgtgcgactaccccgatatcaagcacggcgggctctatcacgaaaacatgcgccggccgtatttcccagttgctgtgggcaagtactactcatactactgtgacgagcactttgagactccaagcggcagctattgggaccatatccattgtactcaggacggatggtcccccgcagtgccatgcctgagaaagtgctactttccttatctcgaaaatggttacaaccagaatcacggcagaaaatttgtacagggcaaatcaatcgacgtggcgtgtcatccaggctacgccctgcccaaagctcagactacagtgacatgtatggaaaatgggtggtcccccaccccccggtgtattagggtcaaaacttgttcaaagagctccatcgacattgagaacggcttcatttctgaatcacagtacacttatgctctgaaggagaaggccaagtaccagtgcaagctcggttacgtgacagccgatggcgaaactagcgggtccatcacttgtggcaaagacgggtggtcagctcagccaacttgtatcaaaagctgcgacatccctgtctttatgaatgcacgcaccaaaaatgatttcacttggttcaaactgaacgacaccctggattacgagtgtcacgacggctacgaaagtaacacaggctccacaactggaagcattgtatgcgggtataacggctggagtgaccttcctatttgctacgagcgggaatgcgagctgcctaagattgacgttcatcttgttccagataggaagaaggaccaatacaaagtgggggaggttctcaaattctcttgcaagcccggatttaccattgtaggacctaatagtgtacagtgctatcacttcggccttagcccagacctgcctatctgcaaggagcaggtgcagtcctgcggaccacccccagagctgctgaacgggaacgtgaaggagaaaaccaaagaggaatatggccatagcgaagtggtggaatactactgtaatcctcgcttcttgatgaaaggccctaataaaattcagtgcgtcgatggggaatggacaacgttgccggtgtgtatagtagaggagtcaacctgtggggatatccccgaactcgaacacggctgggcacagctgagtagccccccgtactactatggggatagcgtggagttcaattgctccgaatccttcacgatgattggtcaccgatctatcacctgtattcacggggtgtggacgcaattaccccaatgcgtggccatcgataagctaaaaaaatgcaagtcgtcaaacctgataatcttagaagagcacctaaagaacaaaaaggagttcgaccacaatagcaacatcaggtacagatgcagaggtaaagaggggtggattcataccgtatgtattaacggacggtgggaccctgaggtgaactgttcaatggcacagattcagctctgcccgcccccccctcagattcccaatagccacaatatgaccaccactctgaactatagagacggggagaaggtgagtgttctatgccaagagaactaccttatccaggagggggaggaaatcacatgcaaagacggcaggtggcagtctatcccactctgcgttgaaaagatcccatgctcacagccaccacagatcgagcacgggaccatcaacagctcaagatcttcccaagaaagctacgcgcatgggaccaagctgtcatacacatgcgaaggcggttttagaatctctgaggaaaacgagacaacttgctatatgggaaaatggtccagtccaccacagtgcgaaggcctcccttgtaaatcccctcccgagattagccatggagtggtagcccacatgtccgattcataccaatatggtgaggaagttacctacaagtgctttgaagggtttgggatcgacggtcctgcaatagcgaagtgcctcggtgaaaagtggtcccatcccccctcgtgtattaaaacagactgtttatcactcccttcatttgagaatgcaatcccgatgggcgaaaagaaagacgtttataaagctggagagcaggtgacttacacctgtgcaacttactacaagatggacggagcatcaaatgtcacctgcatcaattcgaggtggaccggccggccaacgtgtcgggatacttcatgcgtgaatccacctacggtccagaatgcgtatatagtctcacgacagatgtctaagtatccatcgggtgagcgagtccgataccagtgccgcagtccatatgaaatgttcggcgatgaagaggttatgtgcctgaatggcaactggacagagcccccccagtgtaaagattctaccggtaagtgtggcccaccgcctcctatcgataatggcgacattacctcatttccgctgtccgtctacgctcctgcttcatctgttgagtaccaatgccaaaatttgtaccagttggaaggtaataaacgaataacctgtcgaaacggacaatggagcgaaccgcctaaatgtctgcatccatgcgtgatttctcgagagataatggagaactacaatattgcattacgctggaccgctaaacaaaaattgtactcccggacaggggagtctgtggagtttgtctgcaagcgaggataccgcctctcctctagaagccataccctaagaactacttgttgggacggaaaactggagtatcccacatgtgccaagcgatag

SEQ ID NO: 2449 - DNA, 1350 bp, synthetic construct
  misc_feature 1..1350: note = source = /note="Description of Artificial Sequence: Synthetic coding sequence"
  source 1..1350: mol_type = other DNA
atgagacttctggctaagataatctgccttatgctatgggctatctgcgtggccgaggactgtaacgagcttcccccgcgtcgtaacactgagattctaaccggctcttggagcgatcaaacataccctgagggtacccaggccatatataaatgtagacccggctataggtcattaggaaacgtgataatggtatgtcggaagggcgagtgggtggctctcaacccccttcggaagtgtcaaaaaagaccctgtgggcacccaggcgacactccatttgggacttttacattaaccggggggaacgtgttcgaatacggagtaaaggccgtgtatacttgtaatgagggataccagcttctcggtgagatcaactatcgcgagtgtgacactgatggatggaccaacgatattcctatttgcgaggtggtgaaatgcctgccagtgactgccccggaaaatgggaagatcgtttcttctgcaatggaacccgaccgggagtaccacttcggccaggcagtccgcttcgtatgcaactctggctataaaatagaaggagatgaggaaatgcattgcagtgatgatggcttctggagtaaagaaaagccaaagtgtgtggaaatctcatgcaagtctcctgatgtgattaacggctccccaatcagccagaagatcatttataaagagaacgagcgcttccaatataagtgcaacatgggctacgagtactcagagaggggtgacgccgtctgcacagaaagtgggtggcggccactcccatcctgcgaagaaaaaagttgcgataatccctacatcccgaatggggactactcaccactcagaattaaacacagaacaggcgacgagatcacatatcagtgtaggaacgggttttatccggcaaccagaggcaatacggccaagtgtaccagtacagggtggatccctgcccccaggtgtacactaaaaccttgcgattacccggacattaaacacggtggattgtaccatgaaaacatgcggcggccttacttccccgtggcagtcgggaagtattatagctattactgcgatgaacactttgaaaccccatcagggtcttactgggatcacatccactgtacccaagacggctggagtcccgccgtcccgtgtctgcgcaaatgctatttcccctatttagagaatggctataatcagaaccacgggagaaagttcgtccagggaaaatcaattgacgttgcatgtcacccaggatacgcgctgccgaaggctcagactacagttacttgcatggaaaatgggtggtcccctacccctcgctgcatccgtgtgatttttcagctgtag

SEQ ID NO: 2450 - DNA, 1350 bp, synthetic construct
  misc_feature 1..1350: note = source = /note="Description of Artificial Sequence: Synthetic coding sequence"
  source 1..1350: mol_type = other DNA
atgcgccttctcgcaaagattatctgtctgatgctgtgggcaatctgtgtggcggaggactgcaatgaacttcctcctcgcagaaatacggagatactaaccggctcttggagtgatcagacctatccggagggaacgcaggcgatttataaatgtcggcctggatatagaagcttgggaaatgtgataatggtgtgccgcaagggcgagtgggtcgcccttaaccccctgcgcaaatgccagaaacgcccatgcggacaccccggtgacaccccctttggcacattcacgctgaccgggggaaacgtctttgaatatggcgtgaaagcggtctacacatgtaatgagggctaccagctgttaggcgaaatcaactatcgggaatgcgacacagatggctggacaaatgatatccctatttgcgaagtggtcaagtgtctccccgtgactgccccagagaatgggaagatcgtgtcttcagccatggagcctgacagagagtaccattttggacaggcggttcgtttcgtttgtaacagcgggtacaagatcgagggtgatgaggaaatgcattgtagcgacgacggattttggtctaaagagaaaccgaagtgtgtggaaatttcctgtaagtccccagacgtgatcaacggtagtccgataagccaaaagattatttacaaggaaaatgagaggttccaatacaagtgcaatatgggctacgaatatagcgaaagaggtgacgctgtgtgcaccgagtctggttggcggccccttccatcatgcgaggagaaatcatgtgataatccctatattcctaatggtgactattccccacttcgcatcaaacacaggaccggtgacgagatcacataccagtgtagaaatggtttttaccctgcgacaaggggtaacactgcgaagtgtacctcaaccgggtggatcccagccccgcggtgtactcttaagccatgtgactacccggatatcaaacatggaggtctataccacgagaacatgaggaggccatattttcccgttgccgtgggaaaatattatagctactactgtgacgagcattttgaaactcctagcggcagttactgggatcatattcactgtactcaagacgggtggtcccctgccgtgccgtgcctccgtaagtgctatttcccctacctagagaacggctacaatcagaatcacggcagaaaatttgtgcaaggcaaatcgattgacgtggcgtgccatccaggatacgctttacccaaggcgcaaaccacagtcacctgcatggagaacggctggtcacctacgccgcgatgcatcagggtgagctttacactatag

SEQ ID NO: 2451 - DNA, 573 bp, synthetic construct
  misc_feature 1..573: note = source = /note="Description of Artificial Sequence: Synthetic coding sequence"
  source 1..573: mol_type = other DNA
atggctgcaggcgagctggagggtggtaagcccttgtctggcctcctgaatgcacttgctcaggatactttccacggctaccctggaatcacggaagagttattgcgtagtcaattatacccagaggtgcccccagaggagttcagaccgttccttgccaaaatgcggggaatcctgaaaagtatagccagcgccgacatggattttaaccagctcgaggcgtttctaacagcccagaccaaaaagcagggcggaatcacgtccgatcaggccgctgtgatatcaaaattctggaaaagccataagacgaagatccgtgaatccctgatgaatcagtcccgctggaactccggacttaggggactgagctggcgcgtagacggcaagtcacagagtcgccactctgcacaaattcacacccccgttgccataatcgagcttgaactaggaaagtacggacaggaaagtgaatttctttgtcttgagtttgatgaagtgaaggtgaatcaaattttgaaaaccctgagcgaggtcgaggagtcaatctcaaccctgatatctcaaccaaactag

SEQ ID NO: 2452 - DNA, 117 bp, synthetic construct
  misc_feature 1..117: note = source = /note="Description of Artificial Sequence: Synthetic coding sequence"
  source 1..117: mol_type = other DNA
tgacaagagagcgagttcctgtgcctggaatttgatgaggtgaaggtgaatcagattctaaaaacactaagcgaggtagaggaatctattagtactctgatcagccaacccaactag

SEQ ID NO: 2453 - DNA, 99 bp, synthetic construct
  misc_feature 1..99: note = source = /note="Description of Artificial Sequence: Synthetic coding sequence"
  source 1..99: mol_type = other DNA
taatgtttagaatttgacgaagttaaggtcaatcaaatcctgaagaccctatccgaggtggaggagtccatctcaacattaatctcgcagccaaattag

SEQ ID NO: 2454 - DNA, 117 bp, synthetic construct
  misc_feature 1..117: note = source = /note="Description of Artificial Sequence: Synthetic coding sequence"
  source 1..117: mol_type = other DNA
taacaggagtcagaatttctttgcctcgaattcgacgaggtcaaagtaaatcaaattctcaaaactctgtccgaagtcgaggaatcgatcagcactctgatcagtcagcccaactag

SEQ ID NO: 2455 - DNA, 480 bp, synthetic construct
  misc_feature 1..480: note = source = /note="Description of Artificial Sequence: Synthetic coding sequence"
  source 1..480: mol_type = other DNA
atggcagccggggagctcgaaggggggaagcccctgagtggactcttaaacgctctggcacaagacactttccacggctatcctggaataacggaagagctgctgaggtcccaattgtatcctgaagtgccacccgaggagttccgaccgttcctagctaaaatgcgggggatcctcaaaagcattgcctctgccgacatggactttaatcagctggaggcattcctgaccgcacagaccaagaagcagggcggcattacctcggaccaggctgctgtaattagtaagttttggaaaagtcataagactaaaatccgggagagtctcatgaatcagtcacgctggaacagcggtctgcggggcctatcatggcgcgtggatggaaagtctcaaagtagacacagcgctcagattcacacccccgtcgccattattgagttggagcttggtaagtacggtcaggtccactgcaatcaatag

SEQ ID NO: 2456 - DNA, 591 bp, synthetic construct
  misc_feature 1..591: note = source = /note="Description of Artificial Sequence: Synthetic coding sequence"
  source 1..591: mol_type = other DNA
atgcgcctgcccctgctggtcagcgctggcgtgctgttggtggcactactgccctgtccaccctgccgcgctctgctttcacggggtcccgtgcccggtgcgcggcaggccccccagcacccccaaccactcgacttcttccagccaccccctcagtcagaacagcctcagcagccacaggcccgtccggttctgttaagaatgggcgaagagtacttcttgcgccttggaaatttaaacaaatctccggctgctcccctctccccagccagttccttgctagcaggggggtccggatctcgcccgagtcccgagcaggccacggcaaacttctttcgggtgctcttgcagcagctgcttctcccgcggagaagtctcgacagccccgcggccttagccgaaagaggggcaagaaatgcgcttggcggccaccaggaagctccggaacgagagcgcaggtcggaggagcccccaatttcactggatttgacctttcaccttctgcgggaggtgcttgagatggctcgggccgaacagctcgcccagcaagctcattctaacaggaagctgatggaaatcattgggaagtag

SEQ ID NO: 2457 - DNA, 4443 bp, synthetic construct
  misc_feature 1..4443: note = source = /note="Description of Artificial Sequence: Synthetic coding sequence"
  source 1..4443: mol_type = other DNA
atgcaacggagcccactcgaaaaggcatctgttgtcagcaaactctttttttcttggaccaggcctattttaagaaagggctatcgccaacgcctggagttaagcgatatatatcaaattccatctgtggatagtgctgataatctgtccgagaagttggagagggagtgggacagggaactggcaagtaagaagaatcccaaactaattaacgctctccgaagatgctttttctggcggtttatgttctacggaatctttctctaccttggtgaagtgacaaaagctgtccagccgttactgctaggacggatcatcgcctcctacgatcccgacaacaaggaggaacggagcatagctatatatctggggattggcctttgccttttatttatcgttcgcaccctgctgcttcaccccgcaatattcggactgcaccatatcggaatgcagatgagaatagcgatgttctccttaatctataagaagaccttaaaactctcttcccgggtgctggataagattagtatcgggcagctggtatcactactgtccaataacctcaacaagttcgatgagggactcgctttggcccactttgtatggattgcccccctgcaagtggccctgctaatgggcctcatctgggaactcctgcaggcatccgcattctgtggccttggttttctgatcgttctcgctctgtttcaggcagggctggggcggatgatgatgaagtacagggatcagagggcagggaaaatcagtgaacgcctggtcatcacgtctgagatgatagagaacatccagagtgtaaaagcctactgctgggaagaagccatggaaaaaatgattgagaacctgcgccagacggagttgaaactgacacggaaggcagcttacgtaaggtattttaactcttcagcttttttcttttcaggattcttcgtcgtgttcctgagtgtacttccttatgccttgatcaagggcataatcctgaggaagatattcactaccatttccttttgtattgtgctcagaatggccgttacaagacagtttccttgggctgttcaaacgtggtatgactccctgggagccatcaataagattcaggacttcctccagaaacaggaatacaagaccctcgagtataatcttacaacgacagaggtcgttatggaaaacgtcacagcattttgggaggagggattcggcgagctgttcgagaaagcaaaacagaataataacaacagaaagacttccaatggcgacgacagtctgttcttttctaattttagcctgttgggcacaccagtacttaaggatatcaactttaagatagaacgggggcaattgctggcggtggctggaagcactggagctggaaaaacctcactcctgatggtcatcatgggagaattggaaccttccgaaggaaaaatcaaacactccggcagaatctccttttgctcccagttttcatggatcatgccgggaaccatcaaagagaacattatttttggggtgtcttatgacgagtataggtacaggtccgtgataaaggcttgtcaactggaggaggatatttccaagtttgcagagaaagacaacatcgtgttgggggaaggggggatcacgctgtccggcgggcaacgcgcccgaatttctctggcaagggcagtgtacaaggacgcggatttgtacttacttgacagtcccttcgggtacctcgatgtcttaaccgaaaaagaaattttcgagagctgtgtgtgcaagttgatggcaaataaaaccagaattttggtgacatccaaaatggaacacctgaaaaaagccgataagatcctgattctccatgagggatcctcgtatttttacgggaccttctcagagcttcagaaccttcagccggatttttcctccaagttaatgggctgtgattcgtttgaccagtttagcgcggagcggcggaattccatcctgacggagacactacatcgctttagtctggagggcgacgctccggtctcttggaccgaaaccaaaaagcagtccttcaagcagactggcgagttcggcgagaaaagaaagaacagcatcctcaatcctattaactctatcaggaaattttctattgtgcaaaaaacccctctccagatgaacggcatcgaggaggacagcgacgagcctcttgagaggcgcctgagcctcgtgccagattctgagcagggagaagctattttgcccaggataagtgtcatttctactggccctacattacaggctaggagaagacagagcgttttgaacctgatgacacacagcgtgaatcagggccagaatatccatagaaagaccactgcaagcacacgcaaagtgagcctggctccacaggcgaacctgacagaactggatatctacagtaggagactgagccaggaaacaggtctggaaattagcgaagagatcaatgaagaggatctgaaggaatgtttcttcgacgacatggaatcaatcccagcagtaaccacatggaacacataccttcgatatattaccgttcataaaagtctgatttttgtgttgatttggtgtctggtcatatttctggccgaagttgccgcttctctggttgtcctgtggctcctggggaatacccccttgcaggacaaagggaactctactcacagcaggaacaatagttatgccgtgatcattacaagcaccagctcctattacgtgttttatatctacgtcggagtggccgacactctcctggctatgggattttttcgtggcctgccactcgtgcataccctgatcacagttagtaagattttgcatcacaagatgctccattccgttctccaggcgcccatgtccacgctgaacaccctgaaggcagggggcatcttgaacagattctccaaagatatcgctattcttgatgatctgctacccctgactatttttgactttatccagttacttctgatcgttataggggccattgcagtagtggctgtgcttcaaccatatatcttcgttgcgactgtccctgtgatcgtcgcttttataatgctgcgggcctatttcctccagacatcccagcagctgaaacaacttgagtctgaagggaggagcccaatctttacgcacttggttaccagcctgaagggactctggaccttgcgtgccttcggtcggcagccctattttgagacgctgttccacaaggccctaaacctgcataccgcgaactggttcctctatctgagcaccttacggtggttccagatgagaatcgagatgattttcgtcatcttctttattgcagtgacctttatatctatcttaaccaccggcgagggcgaagggagagtgggtataatcttgaccctggctatgaatatcatgtccacactacagtgggccgtcaactcctcgattgacgtggactctctgatgcggtcagtatcgagggtctttaagtttatcgacatgcctactgaaggcaagccgactaagtctaccaaaccatacaagaacggacagctgtcaaaagtgatgatcatcgagaactcacacgttaagaaggatgatatatggccatctgggggccagatgacagtcaaagatctcactgccaagtatactgagggagggaatgctatcctggagaatatatccttttcaatcagccccgggcagcgagtgggcctcttaggtcgtacaggaagcggaaaaagtacattgctgagcgcctttctccggttactcaacactgagggtgagatacaaatcgacggcgtgtcatgggatagcataactcttcagcagtggcggaaggctttcggcgtgattcctcagaaggtttttatctttagtggcacattccggaagaaccttgacccttacgaacaatggtctgatcaagaaatttggaaggtggcggacgaagtggggctaaggagcgtgatcgaacagtttccagggaaattggacttcgttttagtggacggcgggtgtgtactgagccacggacacaagcagttaatgtgtctagccaggtccgtgctctcgaaagctaaaatccttctcctcgatgaacccagtgcccatctggaccctgtgacctaccagattattaggcgaactcttaagcaggccttcgccgactgcacagttatactgtgcgaacaccgcattgaagccatgctcgagtgccagcagttcctggtgatcgaggagaacaaggtccggcaatacgacagtatccagaagctgcttaacgaacgcagtttgtttaggcaggctatatcaccgtcggatcgggtgaaactgtttccccacagaaattcttcaaagtgtaagtctaagccccagattgctgccttgaaagaggaaaccgaggaagaggtccaggacacccgtctttag

SEQ ID NO: 2458 - DNA, 4317 bp, synthetic construct
  misc_feature 1..4317: note = source = /note="Description of Artificial Sequence: Synthetic coding sequence"
  source 1..4317: mol_type = other DNA
atgcagagaagcccgctggagaaggcttcagttgtgtccaaattgttcttcagctggactcgacctatcctgcgaaaaggctaccggcagcggctcgaactgtcagatatctatcagattcccagtgtggactccgctgacaatttatcagagaagcttgaacgagagtgggaccgcgaattggcatcgaaaaagaaccctaaactgattaatgcacttcggagatgctttttttggcgattcatgttctacggcatcttcctctacctgggtgaagtgacgaaagccgtgcagccccttctgctgggccgcattattgccagttacgatccagacaataaggaggaaaggtccattgccatctatctcgggatcgggctgtgcctgttgtttattgttcgaacccttcttttgcaccctgccatattcggactgcaccacattggaatgcagatgaggatcgcaatgttctccctcatctataaaaaaggactggctctggcacacttcgtgtggatagcacccctgcaggtggccctcttgatgggcctgatctgggagctgctccaggcaagcgcgttttgcggactagggtttctgatcgtactcgctctgtttcaagcaggacttggcagaatgatgatgaagtatagagaccaacgcgctgggaagatctccgaaagattggtgatcacctctgagatgattgaaaatatacagagcgtcaaggcctattgttgggaagaggccatggagaaaatgatcgagaatctcaggcagaccgaactcaaattgacaagaaaagctgcttatgtaagatattttaactctagcgcctttttcttttccggttttttcgtggtatttttatcggtgttgccttatgcgctgataaagggaatcatactccgcaaaatattcacgactataagcttctgcatagtgttgaggatggccgtcacccgacagttcccgtgggctgtccagacatggtatgatagcttgggcgccataaacaaaattcaggactttttacaaaagcaggagtataaaaccctggagtacaatttaaccaccactgaggtcgtcatggaaaacgtgaccgccttctgggaggagggcttcggcgaattgttcgaaaaggccaagcaaaacaacaacaaccggaagaccagcaatggggacgattccctgttcttttcaaacttttctctgctgggcacgccagtgctcaaggatataaatttcaagatcgagcgcggacagctgttggccgtcgccggcagcaccggagcaggcaagacctctttgctgatggtcataatgggggagctcgaaccaagcgagggtaagatcaaacactctggacggatctcattctgcagccagttttcctggatcatgccaggcactatcaaggaaaacattatatttggtgtttcatacgatgagtacaggtaccgcagcgtcatcaaagcctgccaactcgaggaagacataagtaaattcgccgaaaaagataacatcgtgttaggggaaggtggaatcacattatctggggggcagcgtgcccggattagtctggcccgtgcagtctacaaggatgctgatctgtacctcctcgacagcccattcggatatctagatgttctgactgaaaaagagatctttgagtcctgtgtttgcaagctaatggctaacaagaccagaattttagtgacaagcaagatggaacaccttaagaaagcggataaaatcctgatcctgcacgagggcagtagctatttttatggcacattttccgagctacagaacctccaacctgattttagtagtaaattaatgggttgtgatagctttgaccaattctctgctgaaaggcgaaatagcattcttacagagactttgcaccgtttctctctcgagggagacgctcccgtttcctggaccgagaccaaaaagcagtcctttaagcagactggagagtttggcgagaagcggaagaattcaatactgaacccgatcaactcaattcgcaagttctccattgtgcaaaaaacgccactccaaatgaacggaattgaggaagactctgatgagcccctggaaagaagactgtccctagtgcctgattctgaacagggggaggccatcctgccccgcattagcgtaatttcaactggtccaactctgcaggcccggaggcgtcagtctgttctgaatctgatgactcactccgtaaaccaaggccaaaatattcataggaagaccacagcctccacacgtaaggtgtcgctggccccgcaagccaatctaacagagctagacatctattccagaagattatcacaggagacagggctggagatatcagaagagatcaatgaggaagacctgaaggagtgtttctttgacgatatggaatctattcccgctgtgacaacgtggaatacatatttacggtacataacggttcacaaatcattaatctttgttctgatctggtgtctggtgattttccttgcagaagtggccgcgagcctggtggttctgtggctcctgggaaataccccattacaggacaaaggtaattccacccacagtaggaacaacagttacgccgttatcataacatctacttcatcctattatgttttctacatatatgtgggggtcgctgacacattgctggctatgggcttcttcaggggactgcctctggtacacaccctgattacagtcagtaagatcctccaccacaagatgctacacagcgtactccaggcgccaatgtctacactcaatacactgaaggcgggcggtatactaaatcgcttcagcaaggatatcgctatactggacgatcttctcccgctcacaatcttcgattttatacaactattactgatagtcatcggcgccatcgctgtggttgccgtactgcagccctacattttcgtggccacagtgccggtgattgtggcctttattatgcttcgcgcatatttccttcagacatcacagcagttaaagcaactggagagcgagggccggtcccccatctttactcacctggtaacttcgctcaaggggctctggactctccgcgcattcggccgccagccatatttcgagaccctatttcacaaggcactaaacctgcacacggccaactggttcctgtacctaagtaccctcaggtggttccagatgcggatagagatgatttttgttatctttttcatcgccgtgaccttcatttccatcctgaccacaggagagggcgaagggagagtggggatcatcctgaccctggctatgaacattatgtccacactgcagtgggccgtaaattcttccattgacgttgactctttaatgcgctccgtcagtcgggtgttcaagttcatagatatgcctaccgagggaaaaccgacaaaatccaccaaaccatacaaaaacgggcagctgagcaaagttatgatcattgagaattcacacgtgaaaaaggatgacatctggcctagtggcggtcagatgacagtgaaggaccttaccgccaagtacactgaagggggcaacgccattctggagaatatttccttttctatctctcctgggcaacgggtgggccttttggggcgtacaggaagtgggaagtctactctcttatctgcctttctgcgcctcctcaatactgaaggagagatccagatcgacggggtgagctgggacagcatcaccctgcagcagtggaggaaagccttcggtgtcatacctcaaaaagtcttcatattcagcgggacttttcgtaagaatctagatccctacgagcagtggagtgaccaggagatctggaaggttgctgacgaagtgggcctaaggtcagttatcgagcagttccccggtaagttagacttcgttctggtagacggaggttgtgttttgtctcacggacataagcagctgatgtgcttggctcgctcagtgctcagcaaagcaaaaattcttctcttggacgagccttccgcccacctcgacccagtcacatatcagatcatccgtaggacacttaagcaggcgtttgccgactgtacagtgatcttgtgcgagcacagaatcgaggccatgctcgagtgccaacagtttctcgttattgaggagaataaggtgcggcagtatgactcaattcagaagttgctgaacgagaggtcactgttcaggcaggctatctccccttccgaccgtgtgaagctgttcccacatcggaactccagcaagtgtaagagcaagccacaaatcgctgctttgaagtag

SEQ ID NO: 2459 - DNA, 4260 bp, synthetic construct
  misc_feature 1..4260: note = source = /note="Description of Artificial Sequence: Synthetic coding sequence"
  source 1..4260: mol_type = other DNA
atgcagcgaagtccgctggaaaaggcaagtgtcgtgagtaagctctttttctcttggacaagacccattttaaggaagggatatagacagagattggaactgtctgacatctaccagattccctcagttgatagcgcggataacctctcagaaaaactcgaaagggagtgggaccgggaactggcctccaaaaagaaccccaagttgatcaacgccctccggagatgctttttctggcggttcatgttttacggcatctttctctatctaggcgaagtcacaaaggctgtgcagccactactgctcggcaggatcattgcatcttacgaccctgataataaggaagagcgctccatagccatctatcttggtattggcctgtgcttgctcttcatcgtgcgcacgctccttttacatccggccattttcggactccatcacattggaatgcaaatgcgcatcgcaatgttctctttgatttacaagaagacacttaaactgagcagccgcgtgctcgacaaaatcagcattgggcagctcgtatccctgttgtctaataatctgaacaagtttgatgaaggcttagctctggcccactttgtctggatcgctccattgcaggtcgctctccttatgggcttaatttgggaactgcttcaagcctccgccttttgtggactgggcttcctgatcgttctggccctgtttcaggctggactaggcaggatgatgatgaaatatagagatcagcgggctggcaaaatctccgaacgcctcgtcatcaccagcgaaatgatcgagaatattcaatctgtgaaggcatattgttgggaggaagccatggagaagatgatcgaaaatctcagacagactgagctgaagctgacacgaaaggctgcctacgtgcggtatttcaattcatccgccttctttttttctggcttctttgtcgtgttcctcagtgtgctgccttatgccctgattaagggaattatattgaggaaaatcttcacaactattagtttctgtattgtcctccgaatggctgtaacaagacagtttccatgggcggtacaaacctggtatgattcacttggggcgatcaacaaaattcaagactttttgcaaaagcaggaatataaaaccctggagtataacttaacgaccactgaggtagtcatggagaacgtcaccgccttctgggaagagacatcgctactgatggtaattatgggggaactagagccctctgagggaaagattaaacattctggacgcattagcttttgcagccagttctcctggatcatgccaggtaccattaaggagaatattatttttggggtatcctacgatgaatatcgttatcgtagcgttatcaaggcctgccagctcgaggaggacataagtaaattcgcggagaaggacaacatagtgcttggggagggaggaatcactctgagtggggggcagagagcacggatcagtctggcaagagccgtttataaagatgcggatctctacctgctggactcaccatttggatatctggacgtgctcaccgagaaggagatcttcgagtcttgcgtttgcaagctgatggctaataagaccagaatcctagtgactagtaagatggagcatctgaaaaaggcggacaaaattctgattctccacgagggctccagctatttctacggaaccttctccgaactgcagaatctccaacccgatttttcttctaagctgatgggctgcgatagcttcgatcagttttctgcagaacgaagaaacagcattttgaccgaaacgctacatcggttttcattggagggagatgcccccgtatcatggactgagacaaagaagcagtcctttaaacagacaggtgaatttggggaaaagagaaagaactccatcctaaatccaatcaactccataagaaaattcagtattgtgcaaaaaactcccctgcaaatgaatgggatagaggaggatagtgatgagccactggagcgccgactgtccctcgtgccggacagtgagcagggcgaagcaatcctgcccaggatctctgtcatttctaccgggcctacgctccaagcacgtcgcagacagtcggtgcttaatctcatgacgcattccgtgaaccaagggcaaaacattcaccgaaaaacaacggcctcaacaaggaaggtctctctggctcctcaggctaacttgactgaattagacatctattctcgtcgcttgagtcaggagactggcctcgaaatctctgaggagattaatgaagaggacctaaaagaatgtttctttgacgacatggaaagtatccctgctgtgaccacatggaatacctacctcaggtacattaccgtgcacaagtcgcttatttttgtgcttatctggtgtctcgtgatattcctggctgaggtcgcagccagtctggtggttctttggctacttgggaacactccgctccaggataaagggaattcaacgcattctaggaacaactcgtacgctgtgatcatcacatctacttccagttattacgtgttctatatttatgtgggtgtggccgatactctgctggccatgggattcttccgaggcctccccttggtccacaccctgatcacagtctcaaagattctccatcataagatgttgcatagcgtactgcaggcgcctatgtctacactaaataccctcaaagcaggaggtatactgaaccgtttctctaaggatattgcaatcctcgacgacttactgccactgaccatcttcgattttatccagttgttgctgatcgttattggcgccatcgctgtcgtggcggtcctgcaaccttacatcttcgtggccactgtacccgtgatcgtcgcctttatcatgttaagagcctactttctacagactagtcaacagctaaaacagctcgagtctgagggtcgatctcccatttttacccatttggtgacatctctgaaaggcctctggacactacgggcgttcggcagacagccttactttgaaactttatttcataaagcattgaaccttcacaccgctaactggtttctgtatttatcgaccttgcgttggtttcagatgcggattgagatgattttcgtgatattctttatcgcagtgacattcatttcgattcttacgaccggagaaggggaaggcagggtggggatcatcctaaccctggcaatgaacatcatgagcaccctgcagtgggccgtgaactcaagcatagacgtcgactctcttatgaggtctgttagccgcgtgtttaagttcatcgacatgcccaccgaaggaaagcctacaaaatctaccaaaccctataagaacggtcaactgtcaaaagtcatgattatcgagaattcacatgtgaaaaaggacgatatctggccctcaggcggccagatgacagttaaggatctgacagccaagtatacagaaggggggaatgcaatcctggaaaacattagcttctcaattagtccggggcagcgcgtaggcctcctcggacgcacaggaagtggaaagagtaccctcctctccgccttcctgcgcttgctcaataccgaaggggagattcagatcgacggggtgagttgggacagtattaccctacagcagtggcgcaaggcttttggtgtgattccacagaaagtctttatcttctcggggacctttcggaaaaatcttgacccttacgaacaatggtcagatcaggagatttggaaggtcgcagacgaggtgggcctccggagcgtgatcgagcagtttccaggcaaactggactttgtcctggtggacggggggtgcgtgctgtcccacggacataaacaactgatgtgcctggcaaggagcgtgttgtcaaaagctaaaattcttctcttagacgagccgtctgcgcacctcgacccggtaacataccaaataattcggaggacactcaaacaggctttcgctgactgcacagttattctgtgcgagcataggattgaggcaatgttagaatgtcagcagttcctggtcatcgaagagaacaaggtcagacagtatgactctattcagaaactattaaatgaacggtctttgttccgccaggctatctctccgtctgacagggtgaagctgttcccacacaggaatagttctaaatgcaagagcaagccacagatagcggctctcaaagaagaaaccgaggaggaggtgcaggatactcggctctag

SEQ ID NO: 2460 - DNA, 573 bp, synthetic construct
  misc_feature 1..573: note = source = /note="Description of Artificial Sequence: Synthetic coding sequence"
  source 1..573: mol_type = other DNA
taaaagggactgtggaccttgcgcgcatttggaagacagccttattttgagaccctgttccataaggcgcttaacctgcataccgcgaattggttcctgtacctctcaactctgaggtggttccaaatgcggatcgagatgatttttgtgatcttttttatcgcggttacattcatcagcatactaaccacaggggaaggcgagggcagggttgggatcattctcactttggccatgaacatcatgtccaccttgcagtgggccgttaatagtagcatcgatgttgactcgttgatgcgaagtgtgtcccgcgtgttcaagtttattgatatgccaaccgaaggcaagccaaccaagtcgaccaaaccgtataagaacggtcaactctcaaaagttatgattattgagaactcgcacgtcaaaaaggatgatatttggcccagcgggggccagatgaccgtgaaggacctgactgccaaatacacggagggcggaaatgccatcctggagaacatctccttttctatctcccccgggcagagagtgcgcttcgagcattgtctgctgtgttag

SEQ ID NO: 2461 - DNA, 1203 bp, synthetic construct
  misc_feature 1..1203: note = source = /note="Description of Artificial Sequence: Synthetic coding sequence"
  source 1..1203: mol_type = other DNA
atgatccgcaactggttaaccattttcatactgttcccactgaagttggtggaaaagtgcgaatcctccgtgtcgctgacagtgccccccgtcgtgaagctggagaacggtagcagtactaacgtgtccctgaccctgcgaccccccctcaacgccacactcgttataaccttcgagataaccttccggtctaaaaacatcacaatcttggagctcccagacgaagtggttgttccccccggcgtgacaaatagctctttccaggtcacaagccagaatgttggacagctgacggtatatttacatgggaaccactccaaccagaccggcccgcggataagatttctcgtgatccgatcgtccgcgatctcaattatcaatcaggtaatagggtggatctactttgtcgcgtggtcaataagcttctacccacaggtgattatgaattggaggagaaaaagcgtgattggactgtcattcgactttgtggccttaaacctgacgggatttgttgcctattccgtgtttaatataggactgctctgggtgccctatatcaaggagcagttcctgttgaagtatcccaacggggtgaaccccgtcaactccaacgacgtcttcttctctctgcatgcagttgtcctaacgctgattatcatcgtgcaatgttgcttgtatgagagaggagggcagagggtcagctggcctgcgataggttttctggtgctggcgtggctgtttgctttcgtaacaatgatcgtggctgccgtcggcgtcactacttggctgcaattccttttttgctttagctatatcaaacttgcagtgacactggtaaaatacttcccacaggcctatatgaacttctactacaaaagtaccgagggctggagcattgggaatgtgcttctcgacttcaccggcgggtctttttctttactccagatgtttctgcagtcttataacaatgaccagtggactcttatttttggcgacccaacgaagtttggccttggggtgttcagcattgtgttcgatgtggtgttcttcattcagcatttttgcttgtatagaaagaggcccggacttcaggccgcccggaccggctccggttctaggctcaggcaggattgggcacccagtttacagcccaaagctctgccacagaccacaagcgtgtccgcatccagcttgaagggctag

SEQ ID NO: 2462 - DNA, 1104 bp, synthetic construct
  misc_feature 1..1104: note = source = /note="Description of Artificial Sequence: Synthetic coding sequence"
  source 1..1104: mol_type = other DNA
atgattagaaattggttgacaatattcatcttattcccgctcaagttagtggaaaagtgtgaaagttctgtgtccttaactgtgcctcctgtggtaaagttagaaaatggctctagcaccaacgtgtctctcactctgcgacctcccttgaatgctacgctggttattacttttgagattaccttcagaagtaaaaacattacaatcctagaattgcccgatgaggttgtagtcccacccggtgtgactaacagcagctttcaggttaccagccagaacgtgggacagctgacggtgtatcttcacggaaatcacagcaaccagacaggcccgaggattcgctttctggttattaggagtagtgccatttcaatcattaaccaagtaatcggatggatctattttgtggcctggtcaatcagcttctaccctcaggtcataatgaattggagacggaagtctgttatcggactctccttcgactttgtcgcgctcaacctcaccgggtttgtggcttactcggttttcaacataggcttgctatgggtgccctacataaaagagcagtttttattaaagtaccccaacggcgtgaaccctgtgaacagtaacgacgtgttcttctcacttcacgccgttgtgcttaccctgatcattattgtccagtgttgcctttatgaaagggggggacaacgcgtgtcatggccagcgattggcttcctcgtgctcgcctggctctttgcctttgtgaccatgatcgtggcagccgtgggagttacgacatggctgcagtttctgttctgcttttcttacattaaactggccgtgaccctggtcaaatatttcccccaggcgtacatgaatttttactataagtcaacagagggatggagtataggcaacgtgctattagactttacgggtggcagcttttctttgctgcagatgttccttcagagctacaataacgaccagtggaccctaatattcggtgatcccaccaaatttggcctgggggtcttctcgatcgtcttcgacgtagtgtttttcattcagcacttctgtctgtataggaaaaggccagggtacgatcaattaaactag

SEQ ID NO: 2463 - DNA, 663 bp, synthetic construct
  misc_feature 1..663: note = source = /note="Description of Artificial Sequence: Synthetic coding sequence"
  source 1..663: mol_type = other DNA
atgaactggaggagaaaatccgtcattgggttgtccttcgattttgtagctttgaatctcactgggtttgtcgcttattcagttttcaatattggtctactatgggtgccttatattaaggaacagtttctgctcaaatatcccaacggggttaatccagtgaactcaaacgacgtcttcttttcgctgcacgcagttgttctcacactgataattatcgtgcaatgttgcctgtatgagcgaggggggcaacgtgttagctggccggcaattggcttcctggttcttgcttggctatttgccttcgtcaccatgattgttgcggcagtgggggtgacgacatggttgcagttcctgttttgcttcagttacataaaactcgctgtaacgcttgtgaaatatttcccacaagcgtatatgaacttctactataagagcactgaaggctggtctattggcaacgtgcttctggattttaccggtggatccttttccctgctgcagatgttcctgcagtcctataataacgaccagtggactttgatctttggtgaccccacaaagtttgggctaggagtgttctccattgtgtttgacgtcgttttcttcatacagcatttttgtctttatcggaaaagaccaggatacgaccaactgaactag

SEQ ID NO: 2464 - DNA, 879 bp, synthetic construct
  misc_feature 1..879: note = source = /note="Description of Artificial Sequence: Synthetic coding sequence"
  source 1..879: mol_type = other DNA
atgtgtcctcgcatcagatttctggtgattagatcatccgctattagcataattaatcaggtgatcggctggatttactttgtggcctggtctataagcttttaccctcaagtcattatgaactggcgaagaaagtccgtcattggcctgtctttcgattttgtagccctcaatttaaccggcttcgtggcctacagcgtcttcaacataggattgctctgggtgccctatattaaagagcagttcttgctgaaatatcccaatggtgtgaaccctgttaacagcaacgacgtgtttttcagcttacatgctgtggtgctgacactgattattatcgtccaatgctgtttgtatgagcggggcggacagcgcgtctcctggccagctatcggttttctcgtgctggcctggctcttcgcatttgtaacgatgattgtggctgcagttggcgtcacaacgtggctccagttcctgttttgcttttcttatatcaagctggccgtaacactagtcaaatacttccctcaggcgtatatgaacttctactacaagagcacagaaggttggagcattggcaatgtgctgctagatttcacgggcggcagttttagtttgcttcagatgtttttgcagtcttacaacaatgatcagtggaccttgatattcggcgatcccaccaagttcggcctgggtgtttttagtattgttttcgatgtagtcttttttatacagcacttctgcctgtacaggaagcgcccaggcctccaggccgctaggaccggcagcggaagcaggctaagacaggattgggcgccttctctgcagcctaaggccttaccacagaccacctcagtgtctgctagctcccttaagggctag

SEQ ID NO: 2465 - DNA, 228 bp, synthetic construct
  misc_feature 1..228: note = source = /note="Description of Artificial Sequence: Synthetic coding sequence"
  source 1..228: mol_type = other DNA
atgatccgaaactggctgaccattttcatactctttcctcttaagctcgtggagaaatgtgagagctctgtgtcacttaccgttccgccagtggtaaaattagaaaatgggtcctccaccaacgtgagcctgaccttacgaccccccctcaacgctaccttagtgatcacatttgagattacattcaggtcaaaaaatatcacaatcttggagctgccagacgaatag

SEQ ID NO: 2466 - DNA, 204 bp, synthetic construct
  misc_feature 1..204: note = source = /note="Description of Artificial Sequence: Synthetic coding sequence"
  source 1..204: mol_type = other DNA
atgcggatccattaccttttgttcgccctgttgtttttgttcttggtccccgtgcccggacacggcggaataattaataccctgcagaagtactactgccgtgtgaggggtggacgttgtgcagtcttgtcttgcctgcctaaggaagaacagatcggaaaatgcagcacccgaggtaggaagtgttgtcggcgaaagaagtag

SEQ ID NO: 2467 - DNA, 204 bp, synthetic construct
  misc_feature 1..204: note = source = /note="Description of Artificial Sequence: Synthetic coding sequence"
  source 1..204: mol_type = other DNA
atgagaattcactaccttctattcgccttgctctttttattcctggtgccagtaccgggacatggtgggattatcaataccctgcagaaatactactgccgggtgagaggagggcgctgcgccgtgttaagttgtctgcccaaagaggagcagattggtaagtgttccaccaggggccggaaatgttgtcggaggaagaagtag

SEQ ID NO: 2468 - DNA, 195 bp, synthetic construct
  misc_feature 1..195: note = source = /note="Description of Artificial Sequence: Synthetic coding sequence"
  source 1..195: mol_type = other DNA
atgcgcgtgctttatctgctattctcatttctgtttatcttcttaatgccgctcccgggggtctttggcgggataggcgaccccgtaacctgcttgaagtccggcgccatctgtcaccctgttttctgtcctcgccgctataagcagatcggtacgtgtgggttacccgggacaaagtgttgcaagaagccctag

SEQ ID NO: 2469 - DNA, 195 bp, synthetic construct
  misc_feature 1..195: note = source = /note="Description of Artificial Sequence: Synthetic coding sequence"
  source 1..195: mol_type = other DNA
atgcgtgtactttatctcctgttttcctttctcttcatcttcctgatgcccctaccaggagtgtttggcgggattggcgatcccgttacttgtctgaagagcggagctatctgtcacccagtgttctgccctaggaggtataagcagattggaacgtgtggtctgcccgggaccaagtgttgcaagaaaccctag

SEQ ID NO: 2470 - DNA, 849 bp, synthetic construct
  misc_feature 1..849: note = source = /note="Description of Artificial Sequence: Synthetic coding sequence"
  source 1..849: mol_type = other DNA
atgagaggcatgaagctgctcggcgcgctgctggcactggctgcattgttacagggggcagtgtccttaaaaattgccgcttttaacattcaaacattcggagaaaccaagatgtctaacgctacactggtttcatatattgtgcagatcttgagccggtacgacattgccctggtgcaagaggtgcgcgactcccatctcacggcggtgggcaaactgctggacaacctgaaccaggacgcccccgacacctaccattatgtcgtgtccgaacccctcggaaggaattcatataaggagcgctacctctttgtgtaccgcccggaccaggtatccgcggtggattcctactactacgacgatggctgtgaaccttgcggcaacgatacttttaatagagagcccgctatcgtcagatttttctctcgtttcacggaggtgcgtgagttcgcgattgttccattacatgccgccccgggagacgccgtggctgaaatcgacgccctttacgacgtgtatctggacgtccaagaaaagtggggcctggaggacgtcatgctaatgggagacttcaacgctggatgctcctatgtgcgtccatcccaatggtcatccatccgactgtggaccagtcccacatttcagtggcttatcccagattcggctgatacgacagccacccccacacattgtgcctacgaccgcatagtggtggcgggaatgctcctgaggggcgcagtggtaccggatagtgctctacccttcaattttcaggctgcctacggcctgtctgaccagcttgcccaagccatcagcgatcactaccctgtcgaagtcatgcttaaatag

SEQ ID NO: 2471 - DNA, 849 bp, synthetic construct
  misc_feature 1..849: note = source = /note="Description of Artificial Sequence: Synthetic coding sequence"
  source 1..849: mol_type = other DNA
atgaggggaatgaagttgctcggagcgctcctggccctggctgccctacttcagggagctgtgtcgttgaaaatagccgccttcaatattcagactttcggggagacaaaaatgtccaacgctaccctcgtgtcctatatcgtgcaaattctgagcaggtacgatattgcgttggtgcaggaggtgcgggatagccacctaactgccgtgggcaagctactggacaatctgaatcaggacgcgccggacacttaccattatgtggtgtccgagcccttgggcaggaatagttataaggagcgctatctgttcgtttacaggccagaccaggtgagcgccgtcgactcctattactacgacgacggctgcgaaccttgcgggaatgacacttttaatcgtgagcccgccattgtccggtttttctcacggtttaccgaagtgcgagagttcgcaatcgttccactgcacgccgcgccaggagatgctgtggccgagattgacgcactctatgacgtgtacctcgacgtgcaagaaaagtggggcctagaggatgttatgttgatgggagatttcaacgccggctgcagttacgtacggccgtctcagtggtcctctattcgcctctggaccagccctacatttcagtggttgattcccgattctgccgacaccacagctactcctacccattgcgcatacgacagaattgttgtcgccgggatgctgctgcggggtgctgtggtgccagacagcgccttgccctttaacttccaggcagcttacgggctcagtgaccagctggctcaggccatctctgaccactatcccgttgaagttatgttaaaatag

SEQ ID NO: 2472 - DNA, 564 bp, synthetic construct
  misc_feature 1..564: note = source = /note="Description of Artificial Sequence: Synthetic coding sequence"
  source 1..564: mol_type = other DNA
atgcaccaaacacccatcactacctggagtgtgtctcattgggatggcacggctattagatctgcaacatgtagctgtacgggcctgacacgatgcctgagatggacagccacgaccaccatgatggcagcctcccccgccggcactaccccttccaccgagtcacagcccctgagcggcagctcccctggttctcaagacgtaatgctcatgggcgacttcaacgctggatgtagctacgtacgaccatcccaatggtcttcaattagactgtggaccagtcccacctttcagtggcttattcccgactccgccgatactacagccacaccaacacattgtgcctacgatagaatcgtcgtagctggcatgcttctgcgcggggctgtagtccccgattccgcactgccctttaacttccaagccgcttatgggttgtccgaccaattattctctgtgcacacatgttccggtgcagggctcggcgaaagacacgggttgccagcaagcgcggccttgccctccaatacctgtcgtgcaggcacgcacagagtcagcacgtag

SEQ ID NO: 2473 - DNA, 6243 bp, synthetic construct
  misc_feature 1..6243: note = source = /note="Description of Artificial Sequence: Synthetic coding sequence"
  source 1..6243: mol_type = other DNA
atgctcagagtctttatcttgtacgctgaaaacgtgcatacacccgatactgatattagtgacgcttattgctccgccgtgtttgccggcgtcaagaaacgaacgaaagttataaaaaacagcgttaatcctgtgtggaacgaaggattcgagtgggacttgaagggaattcccctggatcagggttctgaactccacgtggtggtgaaagaccatgagactatgggacggaaccgctttttgggggaggcaaaggtcccactcagagaagtcctagctaccccctctttatctgcaagctttaacgccccactgctagatacgaagaaacagcccacaggggcttctctcgtgctacaggtttcgtataccccactgccaggcgccgtccctctgttcccccctccaactcctctggaaccttcacctacactccccgacctggatgtggtagccgacaccggcggcgaggaagacacagaagaccaggggctgaccggcgacgaggccgagccatttcttgaccaaagcggaggccctggtgctccgacaactcccagaaagcttccctccagacctccacctcactaccccggtatcaagaggaagcggtccgcaccaacatctcgaaagctgttgagcgacaaaccacaggattttcaaattagagtgcaggtcattgagggccggcagctgcccggggtcaacatcaagcctgtcgtgaaagtgaccgctgctgggcagactaaacgaaccaggatccacaaaggaaatagccccctttttaacgagaccctcttttttaatctttttgactcgcctggcgagctgttcgacgaacccatatttattacggttgtggatagcaggtccttgcgtacagatgcattgttaggtgaattccgaatggacgtcggaacaatatatcgcgaaccgcgtcacgcctatcttagaaagtggttgctgttgtcagatcccgatgatttctccgcaggcgctcgtggatacctcaagacatcactgtgtgtcctcggaccaggggatgaagctcccttggaaaggaaagatccttctgaggacaaggaggacatcgagtccaacttgctgaggccaacaggtgttgcacttagaggcgctcatttctgcttgaaggtcttccgggctgaggatctgccacaaatggacgatgctgtcatggacaatgtaaaacagattttcggcttcgagagtaacaaaaagaatctggtggatccatttgtcgaggtgtcctttgctggcaagatgctgtgctctaagattctggagaaaaccgctaatccacagtggaatcagaacatcaccctaccggccatgttcccatccatgtgcgaaaagatgcgaatcaggatcattgattgggatcggttaacgcataacgacatcgttgcaactacatatttgagtatgtccaagataagtgcccccggcggagaaattgaggaagagccagcgggggccgtcaaaccttctaaggcttccgacctggacgactacttaggttttctgcctactttcggcccatgctatattaacctttatggcagcccgcgcgaatttaccggcttccccgatccatacactgagctgaacaccggcaagggcgagggcgttgcttataggggcagattactcttgagtctagaaactaagctggtggagcattcagagcagaaggttgaggacctaccagcagatgatattctcagagtggagaagtacctcagacggcgtaaatatagcctattcgccgccttttactcagcaaccatgctgcaagacgtggatgacgctatccagttcgaagtttcgattggtaactacggaaataagtttgacatgacctgcttgccattggcctctacaactcagtatagtcgggcggttttcgatggctgccactactactacttaccttggggaaatgtgaaaccagtggtagtcctatctagctattgggaggacatcagtcatagaatagagactcagaaccaactgctgggtattgcggatagactcgaggcaggcctggagcaggttcacctagctcttaaggcacaatgtagtactgaagatgtggacagtcttgtggcccagctgaccgacgaattaatcgccggatgctctcagcccctaggcgacattcatgagacgccgagcgccacccatctagaccagtatttgtaccaacttaggacgcatcacttgtcccagatcaccgaggctgccctggcattgaagttagggcactcagagctgccagctgccctggagcaggctgaggattggcttctccgccttagggctctggccgaggagccccagaacagcctccccgacatagtgatctggatgcttcagggtgacaagagggtagcttatcagcgggtgcccgctcaccaagtgctgttttcacgccgaggggccaattattgtgggaagaattgtggcaagctgcagactatcttcctgaaatatccgatggagaaagtgcctggcgctagaatgcctgtgcagatcagggtgaagctctggtttggtctaagcgtcgatgaaaaggagttcaatcagttcgccgaagggaagctgtcagtgttcgccgagacctacgagaacgaaacaaagctcgccctcgtcggcaactggggaaccacaggtctgacataccccaagttctctgacgtcaccgggaagattaaactgccaaaggatagtttcaggccttccgccggctggacctgggccggtgattggttcgtgtgcccagaaaagacccttctccacgatatggatgcgggacatttgtctttcgtcgaagaggtgttcgagaaccagaccaggttgcctggtggtcagtggatctacatgagtgacaattataccgatgtcaacggcgaaaaggttcttccgaaggacgatatagagtgtccactcggatggaagtgggaggacgaggagtggtcgaccgatctgaatagggctgttgatgagcagggttgggagtacagtatcaccatccctcccgagcgaaaacccaagcactgggtcccagcggaaaaaatgtattacactcatagacggcggagatgggtcagactccggcgaagagatctgagccagatggaggccttgaaaagacacaggcaggccgaagcagaaggcgaaggctgggagtacgcctcgctcttcggatggaaatttcacctggagtaccgtaagactgacgccttccgacgtcgccgatggagacggaggatggagcctctggaaaagactggccctgccgccgtcttcgctctcgagggcgcactgggaggagtaatggatgacaagagcgaggattcaatgtctgtcagtaccctcagttttggagtgaaccgaccaactatctcttgcattttcgattatggaaaccgctatcaccttagatgctacatgtaccaggccagggatctggccgccatggataaagacagcttcagcgacccttacgctatcgtgtcattcctccatcagtctcagaaaactgtggttgtgaagaacacactgaatccgacatgggaccaaactctgatcttctacgagattgaaatcttcggcgagccagcaaccgtggcagagcagccaccctcgattgtggttgagctctacgaccatgacacatacggagcggatgagttcatgggcaggtgcatttgccaaccttccttggagcgaatgccgcgattggcttggtttcctctgacaagagggagtcagccctcaggtgaactcctggcttcattcgagttaattcaacgggagaagccagccattcatcatattcccggattcgaggttcaagaaacctcaaggatcttggacgaatctgaggacacggatctaccttatccaccacctcaaagggaagccaatatttatatggtgcctcagaatattaagccggccctgcagaggactgcgatcgaaattctcgcgtggggcctgcgcaacatgaagtcataccagctcgcaaatattagtagccctagcttggtggtcgagtgcggcggacagaccgtccaatcttgtgtaatccgcaacctacgaaaaaaccctaactttgatatttgtacgctatttatggaagttatgcttcccagagaagaactttactgcccccctatcactgtgaaagtcatagacaatcgtcagttcggacgtagacccgtggtaggccagtgcaccatccggtcactcgagagcttcctatgtgacccctatagcgccgaatccccatccccccagggggggcccgacgatgtgagtctgctcagcccaggtgaggacgtgctcatcgatattgacgataaagagccccttattcccatccaggaggaggagttcatcgattggtggtcgaaatttttcgcttctatcggcgagcgcgaaaagtgcggaagttacctcgagaaggatttcgacacactgaaagtgtatgatacacagttagagaatgtagaagcatttgaaggcttaagcgacttttgcaataccttcaagctgtaccgcggcaaaacacaggaggaaacggaagacccatccgtgatcggcgaattcaaaggcttgttcaagatctaccctttgcccgaagatcctgccataccaatgcctcctagacagttccaccaactcgccgctcagggcccccaggaatgtctagtgaggatatatatcgtccgggcatttgggctgcagcctaaagacccaaacgggaagtgcgacccatatatcaagatctctatcggaaagaaaagtgtctcagaccaggacaactacataccctgcactcttgaacccgtattcgggaagatgttcgaacttacctgcaccttgcccctggaaaaggacctgaaaataactctgtacgactacgacctgctctccaaagatgaaaaaattggcgagaccgtagttgaccttgaaaaccggctgttgagcaaattcggagctagatgcggcctgccccaaacctactgtgtgtccggtccgaaccagtggcgcgaccagctaaggccgagtcaactgttgcatctcttctgccagcagcaccgtgtgaaagcacctgtgtaccgaactgaccgcgtcatgttccaggataaggaatacagcatcgaggaaatcgaggcaggccggatccccaacccacaccttggcccagtggaagaacggctcgctttgcacgtgttgcagcagcaggggttggtaccagagcacgttgagtcccgcccactatacagtcccctgcaaccggatattgagcagggcaagttgcagatgtgggtggatttgttccccaaggcactgggccggcccggccctcccttcaacattacgccgcggagggcgagacggttctttctccggtgcataatttggaacacgagggacgtgatcctggatgatttgtcactcaccggtgaaaagatgtccgacatttatgtaaagggatggatgatcgggttcgaggagcataaacaaaagactgatgtgcattatagatccctgggcggagagggcaacttcaactggcgctttatttttccattcgactatctgccagccgaacaggtttgcactatcgctaagaaggacgcattttggcgtttggacaagacggagagtaaaatccccgcaagagtggtgtttcaaatctgggacaatgacaaattcagctttgatgattttctagggtcactccagctcgacctaaaccggatgcctaaacctgctaaaaccgccaaaaagtgctctctggaccagctggatgacgctttccatcctgagtggttcgtcagcctgttcgagcagaaaactgtgaaagggtggtggccctgtgtggctgaagagggcgagaagaaaatacttgctggaaagctggaaatgactctcgaaatcgtagccgagagtgagcacgaggaacgccctgccggccaagggagggacgaacctaacatgaatcccaaactggaggacccacgacgaccggacacgtcatttctctggtttacatctccttataagaccatgaagttcatcctatggcgacgctttaggtgggcgatcatcctcttcataattctattcatactgctgcttttcctggcgatctttatttatgcatttcccaactatgctgcaatgaaactggtcaaaccctttagctag

SEQ ID NO: 2474 - DNA, 6246 bp, synthetic construct
  misc_feature 1..6246: note = source = /note="Description of Artificial Sequence: Synthetic coding sequence"
  source 1..6246: mol_type = other DNA
atgctttgctgcctgcttgtacgggcttcaaacctgcctagtgctaaaaaagatcgccgcagcgatccagtggctagtctcacattcagaggcgtgaagaagaggacaaaggttataaagaattctgtgaaccctgtctggaatgaaggtttcgaatgggacctgaaggggattccattagaccagggatctgagcttcatgtcgtggtcaaagaccacgagaccatgggacggaataggtttctcggtgaggccaaagtgcccttgcgcgaggtcctggctaccccttccctgtctgcttcatttaacgcgcctcttctggatacaaaaaagcagcccacgggagcttctctagtgctgcaggttagctacaccccgctgcctggcgctgtgcccctgttccctcctcctacacccctggaacccagcccaaccttgcctgacctcgacgtcgtcgcagacaccggtggcgaggaagataccgaggatcagggccttacaggagacgaggccgagccgttcctcgatcagtctggagggccaggcgcgcccacaactcctaggaaactgcctagcagacccccgccacattaccccgggattaagcgcaaacgcagcgcaccaacgtcacggaagttgctttctgacaagccccaggacttccagattcgggtgcaggtaattgagggtcgtcagctgcccggcgtcaacataaagcctgtcgtcaaagtaacagcggctggtcaaacaaaaaggaccagaatacacaagggcaactcaccgctgttcaatgaaactctgttcttcaatttgttcgactctccaggcgaactctttgacgagccgatattcatcacagtcgttgattcaaggagtttacgcaccgacgctctcctgggtgaattccggatggacgttggcacaatttaccgggagccgcggcacgcttacttaagaaagtggttgctcttatcggatcctgacgatttcagcgccggagcaagaggctaccttaaaacaagcctttgcgtgctgggacctggtgatgaagccccactcgagagaaaagacccatctgaagataaagaggacattgagtccaatctgctgcggcccacaggagtggctctcagaggcgcccatttctgtttaaaagtatttcgtgcagaagaccttccccagatggatgacgctgtgatggataacgtgaaacagattttcggcttcgaaagcaacaaaaagaacctcgtagacccttttgttgaggttagcttcgccggtaaaatgctttgtagcaagattttggaaaagactgcgaatccacagtggaaccagaatataactctgcccgccatgttccccagcatgtgcgaaaaaatgcggatcaggataattgattgggatcgcctgacacacaatgacatagtggccactacgtacctgagcatgtctaagatctctgcccccggcggggagattgaagaggagcctgcaggggcagtgaagccatccaaagcctccgacctggatgactacctgggattcttgccgacatttggcccctgttacatcaatctatacggttcccctagggagtttaccggattcccagatccttacactgaattaaataccggaaagggagaaggagttgcctatagaggacgcctgctgttatcgctggaaaccaagctggtggaacattctgaacagaaggtggaagacctccccgcagacgatattctgcgtgtggaaaagtatttgaggcgtcggaagtactccttattcgccgcattttattcagcaactatgctgcaagacgtcgacgatgcaatacagttcgaggtatccattggaaactatggtaacaaattcgatatgacatgtttgccgctcgcctcaaccacgcagtatagtcgtgccgttttcgacgggtgccactattactatctcccctggggcaacgtgaaaccagtggtcgttctaagctcatactgggaggatatatctcaccgaattgaaactcagaatcagctcctaggcatcgccgataggctggaggcaggtctggaacaggttcatcttgctctcaaggcacaatgcagtactgaggatgtagattccctggttgcccagctcaccgatgagctcattgccgggtgtagccagcctctgggggacatccacgaaacaccaagcgcaacacacctggatcagtatctttaccagctgaggactcaccacctgtcccaaattaccgaggcagcactggccctcaagttggggcacagcgaattacccgccgcccttgaacaggctgaggactggctcctgagactgcgcgccctggccgaagaaccacaaaactcccttccggatatcgtgatttggatgctgcaaggcgataagcgggttgcttatcagcgtgtaccggcccaccaggtgctcttctctaggcgaggcgcaaactactgtgggaaaaattgtggcaagctgcagactatcttcttaaaatatcctatggaaaaagtaccaggggcgaggatgccggtacagattcgggtgaaactgtggtttgggctgagcgtcgatgaaaaagaattcaatcagtttgcagagggcaaactgagcgttttcgccgagacatacgagaacgaaaccaagctggcactggtgggaaattggggaactacagggcttacctatcctaaattctctgacgttaccggcaaaatcaagctccccaaggatagctttcgtccctctgccggatggacttgggcaggcgattggtttgtgtgtccagagaagaccctgttacacgacatggacgccggacacctaagttttgttgaagaagtcttcgagaaccagacgcgcctgcccggcggccagtggatctacatgtccgataactacacagacgtcaacggagagaaagtactacccaaggacgatattgagtgcccactgggctggaagtgggaggatgaggaatggagcactgatctgaacagggccgtcgatgagcagggttgggagtacagcattaccattcccccagaaagaaaacccaaacactgggtccccgccgagaagatgtactacacccataggaggagaagatgggtgaggctgcgaagaagagacttgagtcagatggaggctctgaaacggcataggcaggctgaagcagagggtgagggctgggaatacgcgagtctgttcggttggaagttccatctggaatatcgcaagaccgacgcttttagacgccgaaggtggagacggcgaatggagcccctggaaaaaactggaccagcagctgtcttcgcgctggagggcgctctcggcggggtgatggacgataagagtgaagattctatgagtgtgtccacgctcagttttggtgtgaacagacctaccatttcctgtatcttcgattacggcaataggtaccacctgcgatgttatatgtatcaggcaagggatctggccgccatggacaaggactcatttagtgacccatacgctattgtctctttcctccaccaatctcagaaaaccgtcgtggtgaaaaataccctaaatcctacctgggaccagacccttatcttctacgaaattgaaatctttggcgagcctgcgacggtcgccgaacagccaccatccattgtcgtagaactttatgaccacgacacttacggagctgatgaatttatgggtcgatgtatctgtcagccaagcctggagagaatgcccaggttggcgtggttcccattaacgcgtggctctcagccgagcggcgaacttctcgccagcttcgagttaatccagagggagaaacctgctattcatcacattcctggctttgaagtgcaggagaccagcaggatacttgatgagtccgaagacaccgacttaccctaccctccgccccaacgagaggcaaacatttatatggtcccacagaacatcaaacctgctctccagcggacagccatagaaatactagcctggggactaagaaacatgaaaagctaccagttagcaaacattagctccccctccctggtggtagaatgtggagggcaaactgtccagtcatgcgtgatcaggaacctgcggaagaatccgaattttgatatttgcactctgtttatggaagtgatgcttcccagagaagagctctattgtccccccatcacagtgaaggtgatcgataatagacagttcggtcggcgtcctgtggtcggacagtgcacaattcgctcgttggaatcatttttatgcgacccctactccgccgagagtccaagccctcagggagggccggatgacgtgtctctgctgtctccaggtgaagacgtactgattgacattgacgacaaagaacctctcattccaattcaggaagaggaatttattgactggtggtccaagttttttgcatcaattggggaacgggagaaatgcggatcctatctggaaaaggatttcgatactttgaaggtatacgacactcagttggaaaacgtcgaagctttcgaaggcctgagcgatttttgtaacacgttcaagctataccgcgggaagacccaggaagaaactgaagacccttcagtgattggcgagttcaagggcctatttaagatttaccccttaccagaagatccggccattcccatgccgcctaggcagttccaccagttagccgcacaagggccacaggaatgccttgttagaatttatatagtaagggccttcggactgcagcccaaggaccccaatggtaagtgcgatccttatatcaagatttctatcgggaaaaagagtgtaagtgaccaggacaattatatcccatgcacactagagcccgtatttggcaaaatgtttgaacttacgtgtacattgcccctggagaaggatctcaagattaccctctacgactatgatctgcttagcaaggatgaaaaaattggcgagacggtggttgatttggaaaaccgacttctttcaaagtttggagcccgctgtggattgccacagacatattgtgtgtccgggcccaaccagtggagagatcaactacgccccagtcaattattgcatctgttctgccagcagcaccgggtcaaggcgcctgtatacaggacggatagggttatgtttcaggacaaagagtattccatcgaggaaatcgaagcaggacgtatccccaaccctcacttaggacccgtggaagaacgactcgcgttgcacgtcctacagcaacaggggctcgtgcccgaacacgtggaatcccgacctttgtactcccccctgcagccagatatcgagcaaggaaaactgcagatgtgggtggacctctttcctaaggcgttagggcggcccggccccccctttaatataaccccaagacgggccagaagattttttctgcgatgtataatctggaacactcgcgacgtcatccttgacgaccttagtctgaccggcgaaaagatgtcagatatctatgtcaaggggtggatgattggatttgaagaacataaacagaagactgacgtgcattatagatcactcggaggagaaggcaatttcaactggcgatttatcttccccttcgattacctgcctgctgagcaggtatgcaccatcgccaaaaaagacgccttctggagattagataagaccgaatccaagattcccgcgagagtcgtcttccaaatttgggacaacgacaaattctctttcgacgatttccttggcagtcttcagctggatctgaataggatgcctaagcccgctaagaccgctaagaaatgctctctcgatcaattagatgacgcattccatccagagtggtttgtgtcgctcttcgaacagaaaactgttaaagggtggtggccttgtgtggctgaagagggggagaagaagatattggcgggaaaactagaaatgactctggagattgtagccgaaagcgagcacgaggaacggcccgccggccagggccgggacgagcccaacatgaatcctaagctggaggatcccagacgcccagacacctcttttctgtggtttacctccccgtataaaacaatgaagttcatactgtggaggcggttccgctgggccattatcttgttcattatcctgtttattttgctcttgtttctggctattttcatttacgctttcccgaactacgcagccatgaagctagtgaagcctttcagctag

SEQ ID NO: 2475 - DNA, 6309 bp, synthetic construct
  misc_feature 1..6309: note = source = /note="Description of Artificial Sequence: Synthetic coding sequence"
  source 1..6309: mol_type = other DNA
atgctgtgttgcctactagtgcgagcgagcaatctccccagtgctaaaaaggatcgacggtcagatccagtggcgtccctcacatttcgaggagtgaaaaaacgcacaaaggtcatcaaaaacagcgttaatccagtctggaatgaggggtttgaatgggacctgaaaggaatacctttggatcaggggtccgaactccacgtggtcgtgaaggaccacgaaactatggggcggaaccggtttcttggggaggcaaaagtaccactgcgtgaagtacttgctaccccgtcgctttccgcttccttcaacgctccattattggataccaagaagcagccaacaggggcttcccttgtgctccaagttagctacactcccctgccaggcgccgtgcccctttttccacctcccacccccctggaacccagccctactctccctgatttggatgtggtggcagatactggaggggaggaagatactgaagaccagggtctgaccggagatgaagctgagccatttctagaccagagcggcgggccaggtgcacccacaacaccaagaaagctcccgtcacgaccgcccccccactatccggggatcaagcggaaacggtcagctcccacatcacgcaagctgctctccgataaacctcaagattttcagatcagagtccaggttatcgaaggccgccaattgcctggagtcaacataaagcccgtcgtcaaggttaccgctgccggccaaactaaaagaacaagaatccataagggaaactccccactctttaatgaaactctgttctttaaccttttcgacagcccgggtgagttatttgatgagccaatcttcatcacagtggtggattcgcggtctctaagaaccgatgctctcctgggcgaattccgtatggatgtgggcactatctatagggagccccggcatgcctacctaagaaaatggctgcttctcagcgaccctgacgattttagcgcaggcgcccgcggctacctcaagaccagcctgtgcgtcctgggacccggggacgaagcacccctggaacgcaaggatccctcagaggataaggaggatattgagagcaacttacttcgtcctactggtgtagccctacgtggcgctcacttttgtctcaaagtgttccgcgctgaggacttacctcagatggatgacgcggtgatggataacgtcaagcaaatcttcggattcgagtcaaacaaaaaaaatctggttgacccatttgttgaggtgagtttcgctggcaaaatgctctgctctaaaatcctggagaaaaccgccaatccccagtggaatcagaatatcaccctgccggcaatgtttcccagtatgtgtgagaagatgcggattcgtattattgactgggatcggctaacccataacgatattgtcgccactacttatttgtctatgtcaaagatcagtgctcctgggggcgaaatcgaggaggaaccggccggagccgtcaagcctagcaaagcctcagacctcgatgactatctggggttccttcccacatttggaccgtgctacatcaatctttatggatctcccagggagttcaccggcttccctgatccgtatactgagctgaacaccggaaagggagaaggcgtggcttaccggggcagactcctgctctcattggaaacgaagctggtcgaacactcagaacagaaggtagaggacctccccgccgatgacatcttaagagtggaaaagtatctgaggagacgcaaatactcgctgtttgctgcattctactcagccactatgctccaggacgtcgacgacgccattcagttcgaagtgtcaattgggaactacgggaataaatttgacatgacctgcctgcccctggcttcaacgacgcagtactcacgagctgtttttgatgggtgccattattattatttaccgtggggaaacgtgaagcccgtagtcgtactgtcctcgtactgggaggatatctctcacagaatcgaaacacagaatcagttacttggcatcgccgaccggttagaggctggcctggagcaggtccatttagcgttaaaagcacagtgtagtactgaggacgtggactctcttgtcgcacagctgacagacgaattaatagcggggtgttctcagcctttaggcgatattcacgagacgccaagcgcaacccacttggaccaatatttgtatcagcttcggactcatcacctctcacagatcacagaggccgccctcgccctgaaactgggtcattcggagctacctgcagcacttgagcaagccgaggattggttgttgagattgcgtgcccttgcggaagagccacaaaactctctcccagacattgtgatatggatgctacagggggacaaacgtgtggcctatcagcgcgtgccagcacatcaggtgttattcagccgccgaggagctaattactgtgggaaaaactgcgggaaactccaaactatcttcctgaagtatcctatggaaaaagtgcccggcgcccgcatgcccgtccagattagagtcaagctctggttcggcctgtctgttgacgagaaagaattcaaccagtttgccgagggcaaactcagtgtattcgcagaaacatacgagaacgaaacaaagcttgccctggtcggaaattggggtactaccggcctgacctatcccaaattttctgacgtgacgggtaagattaagcttcccaaggattctttccggccgtcagccggatggacatgggcgggggattggtttgtgtgccccgagaaaaccttgttgcatgacatggacgcagggcatctgtcttttgtcgaagaggtgtttgaaaatcaaaccagattgccagggggacagtggatttatatgagtgacaattacacagacgttaatggcgagaaggtgctgccaaaagatgatatcgaatgccctttgggatggaagtgggaggatgaagaatggtctaccgacctcaatcgcgccgtggatgagcagggatgggagtacagtatcacgattccccccgagcggaagcctaaacactgggttccagccgagaaaatgtactatacccaccgccgaaggagatgggtccgcttgaggaggcgagatctgtctcagatggaagccctgaaaaggcacaggcaagcagaggctgagggcgaggggtgggagtatgcctccctctttggctggaagttccacctcgagtacagaaaaacagatgccttccggaggcgccgatggaggaggcggatggagcccctcgaaaaaacagggcctgccgctgtatttgccctagaaggtgccctggggggcgttatggatgacaagagcgaagacagcatgtccgtatctaccctgtcctttggcgtgaaccgaccaacaatcagctgtattttcgactatggaaatcgatatcacctgagatgttatatgtaccaggccagagacctcgcagctatggacaaggacagtttcagcgacccctatgccatcgtgtcctttttacaccagagtcagaaaaccgtggtggtcaagaatactctgaatccgacatgggaccagactctgattttttacgagatagaaattttcggcgaaccagccaccgtggccgagcagccgccgagcattgtggttgaactgtacgaccatgacacatacggggcagacgagttcatgggtagatgtatctgtcagccctcactcgagcggatgccacggcttgcttggtttcctttaactcgtgggagtcagccgagcggagagttgttggcatcttttgagctgattcagagggaaaagcctgcaatacaccacatcccagggttcgaagtccaagaaacttcgcgtatcctggatgagtccgaggacacggacttaccataccccccaccacagagagaagccaacatttacatggtcccccaaaacatcaagcctgctctccaaagaacagcgattgagattttggcctgggggttgcgaaacatgaagtcttaccagttggcaaatatatcctcaccgagcctagtcgtggagtgtggcggacagactgttcagtcgtgcgtgatccgcaatcttagaaaaaaccctaattttgacatatgtacactctttatggaggtcatgctgccacgagaagagctttactgcccacccatcactgtgaaggttattgataatcgccaatttggacggagacccgtcgtagggcagtgcacaattagatcgctggagtcttttctgtgcgatccatactcggcagagtcaccctcaccccagggaggaccagacgacgttagtctgctaagtcccggcgaggatgttttaatcgacattgatgataaagagccgttgatccccattcagctggcagacggcttgtcatccctggcgcccacaaatacagcttcgcctcctagctctccacatgaggaagaatttatcgattggtggtccaaattttttgccagcatcggcgaacgagagaagtgcggcagttacctggaaaaggacttcgacactttgaaagtgtacgatacacagttggagaacgtggaagcattcgaaggactgtcggacttttgtaacacctttaaactgtaccggggcaaaacacaggaggagaccgaggacccctcagtgatcggtgagttcaagggcctgttcaagatatatcctctgcccgaggaccccgccatacctatgcctcctcggcagtttcaccagttggcggcccaaggcccacaggaatgcctcgtcaggatctatatcgtgagagcctttggcctacagccaaaagatcctaacggcaaatgcgacccatacattaagatcagcattggcaaaaagagcgtatctgaccaggacaactacattccgtgcacactagaaccagtatttggcaagatgttcgagctgacatgtaccctcccactcgagaaagacttaaagatcacactttatgattacgatctgctctctaaggatgaaaaaattggagaaacggtcgtggatctggagaatagactgctttccaagtttggcgcccgctgtggccttcctcagacctattgcgtttctggtccaaaccagtggagggaccaactccggccaagtcaacttcttcacctgttctgtcaacagcaccgcgtgaaggccccagtttaccggaccgacagagtgatgttccaggacaaagagtactccatcgaagaaatagaagccgggaggatccccaatccccacctcggaccggtggaggagcggctcgctctccatgtgttacaacagcagggccttgtgcccgaacacgtggagagtaggccactgtattcaccacttcagcctgacattgagcaaggtaaactgcagatgtgggtggatttgttccctaaggccctgggtcgcccaggccctcctttcaacataaccccacgtcgtgcccgacggttctttttgcgttgcatcatctggaacactcgggacgttatcttagatgacctgtccctgaccggggagaaaatgtccgatatttacgtgaaggggtggatgataggattcgaagaacacaagcagaagacagatgtgcactaccgttccctcggaggtgagggaaattttaattggagattcatcttcccattcgattatcttccggctgaacaggtatgcacaattgccaagaaagacgccttctggagactggacaaaacagagagcaagattcctgcgcgagtggtctttcaaatttgggacaacgacaagttctccttcgacgatttcctgggaagtctccaactggacctgaacagaatgccaaaaccagcaaaaaccgctaagaagtgctctctggatcagctggatgatgcctttcatcctgagtggttcgtctccctctttgagcaaaagactgtgaaaggctggtggccatgcgtggcggaggaaggcgaaaaaaagatcctggcaggcaaactggaaatgactctggagatagtcgcagagtctgaacatgaggaaagaccagcgggtcagggtagagacgagcccaacatgaatccgaagcttgaagatcctcgacgcccagatactagttttctgtggttcacttctccatacaagaccatgaaatttatactctggagacgcttccggtgggctatcattttgttcatcattctcttcatcctgcttctgtttctcgctatcttcatctatgctttcccaaactatgcggcgatgaaattagttaagcctttctcctag

SEQ ID NO: 2476 - DNA, 6357 bp, synthetic construct
  misc_feature 1..6357: note = source = /note="Description of Artificial Sequence: Synthetic coding sequence"
  source 1..6357: mol_type = other DNA
atgctcagggtcttcatcctgtacgctgagaacgtgcatacccccgacaccgatataagcgacgcttactgttccgccgtgtttgccggtgtcaagaagcgcaccaaggttatcaagaacagcgtgaatcccgtttggaatgagggattcgaatgggacttgaaggggattcccttagatcaagggagcgagcttcacgtggtggtgaaggatcacgagaccatgggacggaatagattcctcggggaagccaaggtgcccctgcgcgaagtactcgccaccccatccctctccgcttcttttaatgcccctcttctggacacaaagaagcagcccactggcgccagtcttgtactccaggtgagttacacaccattgccaggagccgtacctctattccccccaccaacgccactcgagccgtctccgaccttgccagatctggatgtcgtagccgggggaggtcaatcccgcgcagagacttggtccctgctgtctgatagtaccatggataccagatattccggaaagaaatggcctgctccgacagacactgggggggaggaggataccgaggatcaggggctaaccggggacgaggctgagccatttctggaccagagcgggggtccgggggcccccaccaccccacgtaagcttccaagccgccccccgccgcactatcctggtataaaacgcaagcgttccgcacccacctccaggaagttattgtcagataagcctcaggatttccagattagagttcaggtcattgaaggtaggcaactgcccggggtgaacattaagccagtggtcaaggttaccgctgccggccagacaaaaagaacaaggatccataagggcaactctccactgttcaacgagacgctcttctttaacctgttcgattcgccaggggaattattcgatgagccaatttttatcactgtcgtggatagtaggagtctcaggaccgatgctctgctgggcgagttccggatggacgtcggcacaatatatcgcgagccaaggcatgcatatctgaggaaatggttgctccttagcgatcccgatgacttcagtgctggcgcacgagggtatttaaagacctcactgtgcgtcctgggtccaggggatgaggccccgctggaacggaaagacccctccgaggacaaagaggacattgaatccaatttgcttcggccaacaggagtcgcccttcgcggggctcacttttgcctgaaggttttcagagcagaggatctcccacaaatggacgacgccgtaatggataatgtgaagcaaatatttggttttgaaagcaataaaaaaaatctggttgatccattcgtagaagtctcgttcgccggaaagatgctatgtagtaaaatactcgagaagaccgcaaacccccagtggaatcagaacatcactctgcccgcaatgtttcctagtatgtgtgaaaaaatgcgaatccgtatcatcgactgggatcgcctgacgcataacgacatcgtcgccacaacatacctctccatgtctaagattagtgcccccgggggagaaattgaggtggacgattacctcggatttctccccacatttggcccttgttacatcaacctgtacggttcaccgagagagtttactggctttcctgatccttataccgagctcaacacagggaaaggcgagggtgttgcatatcgcggacggttgttactgtctctcgagaccaagcttgtcgagcattccgagcagaaagtggaagacctgcctgcggacgatatcttgcgcgtggaaaagtacttacgacgaaggaagtactcacttttcgccgccttctatagtgctaccatgctccaagatgttgatgatgcgatacagttcgaagtcagtatcggcaattacgggaacaaatttgacatgacctgcctgccattagcttccactacccaatatagtcgtgccgtgtttgacggttgtcattactattacttaccttggggcaacgtgaagcctgtggtcgtcctatccagttattgggaggacatatctcatcggatcgagacgcaaaatcagctgctgggtatcgctgatcggttggaagcgggattagaacaggtacacttggccctgaaagcccagtgcagcaccgaagatgtcgatagcctggttgctcagctgacagacgagttgattgcaggctgcagtcagccccttggcgacattcatgaaacaccttctgcaacacatctggatcaatacttataccagctgcgtacgcaccacctaagccagattaccgaggctgccttggcgctgaagctgggccactctgaactgccagcggccctggaacaggccgaggactggttgctgcgactcagagccttagccgaggagccccaaaatagcctaccagatattgtgatctggatgctgcagggggacaagcgggtcgcctatcagagagtccccgcccaccaagtgctgtttagcaggaggggggcaaactactgcggcaaaaactgtggtaaattgcagacaatttttcttaaatatcccatggagaaggttcccggcgctcgaatgccggtgcagattcgggtcaagttgtggtttgggctctccgtggatgaaaaagagtttaatcaatttgcagaaggcaagctgagcgtgttcgccgaaacatacgaaaacgaaacaaaactagccctcgtcggcaattggggtaccactggactgacataccccaagttttctgacgtcactggcaagatcaaactgccaaaggactcttttcgaccgtccgcaggttggacatgggctggagactggttcgtgtgccctgaaaagacactgcttcatgatatggacgctggccacctttcctttgttgaggaagtgttcgaaaaccagactcgcctaccagggggccagtggatatacatgtccgataactatacggatgtgaacggcgaaaaggtgttgcccaaggatgacatcgagtgccccctgggatggaagtgggaggacgaggagtggagcacagaccttaatcgggctgtagacgaacaaggctgggaatattcgattacaattccacccgaaagaaagcccaagcattgggtgcccgctgaaaaaatgtactatactcatcgacgacggcgatgggtcagattacggcggcgggacctgagtcagatggaagctctcaagcgccaccggcaagcagaggccgaaggtgaggggtgggagtacgctagcctgttcggctggaaattccatctcgagtaccggaagactgatgcgttcagacggaggagatggcgaagaagaatggagcctctggagaagacaggtccggccgctgtgtttgcactggaaggtgctctgggcggcgtgatggacgataaatctgaggatagcatgagtgtcagcaccttgtctttcggagtgaataggcctacaattagctgcatcttcgattacggcaacagataccacctgcggtgctacatgtatcaggctcgggatctggccgcaatggacaaggactctttttcagatccatatgccattgtgtctttcctgcaccagtcgcagaaaacagtggtggtgaagaatacattaaatccaacttgggatcagacactcattttttatgaaattgaaatctttggggagccagccacagtcgctgaacagccaccctccatcgtggtggaattatacgatcacgatacctatggtgccgatgaatttatgggtcgatgtatatgccagccatctctcgagcgtatgcccaggttagcatggtttccgctgacccgggggtcccagccaagtggagaattgctggcctccttcgagctcatccagcgggaaaagcccgctattcaccacatcccggggtttgaagtccaggaaacttcaaggatcctggacgagtccgaggataccgacctgccatatccaccaccgcaacgggaagctaatatctacatggtccctcaaaacatcaaacctgccttgcagcgcacagcaatagagatcctagcttggggattgcggaacatgaaatcttaccagctggccaacatttctagtccttctttagtggtcgagtgcggtggacaaaccgtccagtcgtgtgtcattcggaacctaaggaagaaccccaatttcgacatctgcacgctgtttatggaagtaatgctgcctcgagaggaattgtactgccccccgattacagtcaaagtaatcgacaatcggcagttcgggaggagacccgtagttgggcagtgtaccatcaggagcctcgaatcatttctctgcgatccgtattcagctgagtctccgagcccacagggtggcccggatgatgtctccttgctgtctccgggagaagatgtgttaatcgatatcgacgacaaagaacctcttattccaattcaattggcagatggcctgagctctttggcccctacaaatactgcgagcccaccaagttctccacatgaggaggaattcattgattggtggtccaaattcttcgctagcattggcgaaagagagaagtgtggctcctatctggagaaggatttcgatactctgaaagtatacgatacacaactcgaaaacgttgaggcattcgaaggactttctgacttctgcaacacatttaagctctacagagggaagactcaggaggaaaccgaggatccttctgtgatcggggaatttaagggcttgtttaaaatatatccattgcccgaagaccctgctataccgatgccacctaggcaattccaccagcttgccgcccaggggcctcaggaatgtctggttcggatctatattgtgagggcattcggactccaaccaaaagaccctaatgggaagtgcgatccttacatcaaaatttctattggcaagaaaagcgtgtcggatcaggacaattatatcccctgcacccttgagccggtgttcggcaagatgttcgaacttacttgtaccctgccactcgaaaaggacttaaagatcaccctgtacgattacgatctgctcagtaaggacgagaaaattggagagaccgttgttgatctcgaaaataggctcttaagcaagtttggcgctcggtgcggcttgccccaaacttactgtgtgtctggacctaatcagtggagggaccagctgcggccaagccagctgttgcatctgttctgtcagcaacatagagtgaaagctcccgtctatcgcactgaccgggttatgttccaggataaagagtactctatcgaagagatcgaggctggccgtatccctaatcctcacctgggacctgttgaagagcggctggccctccatgtgctacagcagcagggtctggtcccggaacacgttgagtctcggcctttatactctccactgcagcccgatattgaacaagggaagctgcagatgtgggtggacttattccccaaggccttgggcagacccggcccccctttcaacattacacccagaagagctaggaggttcttcctgagatgcatcatctggaacactcgcgacgtaattctggacgacctcagtctcaccggggagaaaatgagcgatatctacgtaaagggctggatgatcggatttgaggagcacaagcaaaaaacagacgtccattaccgctctctagggggcgagggtaactttaactggcgcttcatctttccttttgattacctgcccgccgagcaggtttgtacgatcgccaagaaagacgctttttggcggctcgataagaccgagtctaagataccggcacgagtagtttttcagatatgggataatgacaagttctcatttgacgacttcctgggctcactccaacttgacctgaacagaatgccaaaacctgctaagactgccaaaaaatgcagtctagaccaactggacgacgctttccaccctgagtggtttgtcagcctgttcgagcagaaaaccgttaagggttggtggccttgcgtcgcagaagaaggtgaaaaaaaaattttagccgggaaattggagatgaccctcgaaatcgtcgcagagtccgagcacgaggagagacccgccgggcagggcagagacgagcctaacatgaaccctaagctggaggaccccagaagaccagacactagctttctgtggtttacaagtccatacaaaaccatgaaattcattctgtggagaaggttccgttgggcaataattttgtttattatactatttattctcctcctgttccttgccatatttatctacgcgtttcctaactacgccgctatgaagttagtcaagcccttctcgtag

SEQ ID NO: 2477 - DNA, 6339 bp, synthetic construct
  misc_feature 1..6339: note = source = /note="Description of Artificial Sequence: Synthetic coding sequence"
  source 1..6339: mol_type = other DNA
atgctctgttgcctgctcgttcgggcttcaaatctgccgtccgccaaaaaggatcgcaggagtgatcctgtggcttcactcaccttcagaggcgtcaagaagcgaacgaaggtgatcaagaattcggtgaaccccgtgtggaacgaagggttcgaatgggacctgaaaggtatccccttggatcagggctctgagctgcatgtggttgtgaaggatcacgaaaccatggggcgtaatcgtttccttggagaggcaaaagtgccccttagagaggttcttgccaccccctccctttctgcttcttttaatgcccccctcctggacacgaaaaagcaaccgaccggggccagtctggttctccaggtctcgtacactccccttcccggagcggtacccctcttccctcctccgactcccctcgaaccgtctcctaccctgcccgatctggatgtagtggcaggtggtggtcagtctagagccgagacctggtcactgttatctgacagtacaatggatacgcgctacagcggaaagaaatggccagcccccacagacaccggaggcgaggaagataccgaagaccagggcctgacaggagacgaggccgagccctttctagaccaatccggcggcccgggcgctccaactacacctcggaagctgccctccaggcctcccccccattaccccggcatcaaacgtaaacggagcgcccccacatctaggaagctcctttcagataagcctcaggactttcagatcagggtgcaagtaattgaggggcgccagctccccggggtaaatattaaacccgtggtgaaagtgaccgctgcaggacaaaccaaaagaactaggattcacaaggggaattcgcctttattcaatgaaacactctttttcaacctgttcgactcgcctggggaactgtttgatgagccaattttcatcaccgtggtggactccaggagcttacgcacggatgcgctgctgggggaatttaggatggacgtcggcactatatatagggagcctcggcacgcttatctcagaaaatggcttctgttatctgacccggacgacttttcagctggcgcccggggatacctgaagacctctttgtgcgtacttggcccaggcgatgaggcccccctggagcgaaaggacccttcggaggacaaagaggacattgaatctaatctcttgcgccccaccggggtggcacttcgcggggcccacttctgtctgaaggtgtttagggctgaagatttacctcaaatggacgacgcggttatggacaacgtgaagcagatcttcggattcgaatccaataagaagaatctcgtagacccgtttgtggaggtctcatttgccggaaaaatgctctgttccaagatcctggagaaaacggcaaatcctcagtggaatcaaaacataaccctccctgcaatgtttccttctatgtgcgagaagatgcgtatcaggatcattgactgggaccgtttgacgcacaacgacatcgtcgctaccacttatctatcaatgtcaaagatctccgctcccggtggcgagatcgaggaagagcctgccggcgccgtaaagcccagcaaggctagtgacctggacgattaccttgggttcctgcctacctttggcccatgttatataaacctctatggcagtccaagagaattcactggcttccccgatccctacactgaactgaacaccggcaaaggcgaaggcgtcgcttaccgtggccgtttactgctgagcctggaaacaaagctggtggagcactcagaacagaaagtggaagaccttcccgccgatgatatcctgcgggtcgaaaagtacctgaggagaaggaagtacagtctgttcgcagctttttactccgctactatgctgcaagatgtagacgacgcaattcagtttgaggtttcgatcggaaattacgggaataagtttgacatgacctgtctgcctctcgcatctactactcagtactcacgcgccgtcttcgatggctgtcactattactaccttccatggggcaatgtgaagcctgtcgtggtgctcagttcctattgggaagacatttctcaccgcatcgagacccagaaccagctgctcgggattgccgataggttggaagccggtctggagcaggtgcacctcgccttaaaggcccagtgtagtaccgaagatgtggatagcctggtggcccagctaacagatgagcttatagctggctgttcccaaccactcggggacattcacgaaacccctagtgctacccacctggaccagtatctctaccagcttaggactcaccatctgagccagatcaccgaagccgcccttgctcttaagttggggcacagtgaacttcccgccgccctcgaacaggctgaagactggctcctccgcctgagggcattggcagaggagcctcagaattcgctccccgacatagtgatctggatgctccaaggtgacaagcgcgtggcttaccaaagagttccagctcaccaggttctgttttctcggagaggtgctaattattgcggcaaaaactgcggcaagttgcaaaccatctttcttaagtaccccatggaaaaagtccctggagccagaatgcctgtccagatacgcgtgaagctgtggttcggtctgtccgtagatgaaaaggaattcaatcagtttgcagaaggcaagctttctgtgtttgccgagacctacgaaaatgagactaagttggcactagtcgggaactggggaaccactggactgacctacccaaagtttagtgatgttactggtaaaataaaactgcccaaggactcttttcggcctagcgccgggtggacatgggcaggggactggttcgtgtgcccagagaagactctgctccatgacatggacgctggacacctcagtttcgtggaggaggtgttcgagaatcaaactcggctgcctggcggccagtggatctacatgtccgacaattatacggacgttaacggcgaaaaagtgttgcctaaggatgacatcgaatgccctctgggctggaagtgggaagacgaggaatggagcactgacttaaatcgtgccgtagacgagcagggatgggagtacagcatcaccatcccccccgagcgtaagcccaaacactgggtaccagctgagaagatgtattacacacaccgccggcgaaggtgggtacgcctgcgccgaagagacctgagtcaaatggaagctttgaagcgccacagacaagccgaggccgaaggagaggggtgggagtacgcctcactattcgggtggaagtttcatctcgagtaccgtaagacggacgcatttcggcgcagaaggtggcggaggagaatggaaccactagagaagacagggcctgctgctgtctttgccttagaaggggcgctgggcggggtgatggacgacaagtcagaagacagtatgagcgtgagtacactgagtttcggagtcaaccggcccactatctcctgcatcttcgactatggaaaccgctatcacctgagatgttacatgtatcaggccagagatctggctgcaatggataaggattctttttctgacccttatgccatcgtgagctttctccatcagtcacagaaaactgtggtggtgaaaaataccctcaaccccacctgggaccagacattgatcttctacgagatcgaaatcttcggcgaaccagccacagtggccgaacagcccccatcaatcgtagtggagctctacgatcacgatacatatggtgcagacgagttcatgggccggtgcatatgccagccatctctggagcgaatgccacgattagcctggtttcccctgacacgtggaagtcagccctccggtgagctgctggcaagttttgaactcatccagcgcgagaaacccgcaatccaccacattcctggcttcgaagtgcaggagacatcccgcatcctcgacgagagtgaggatacggatctgccatacccccccccacagcgggaggcgaacatttatatggttccgcagaacatcaaacccgcactacaacgtaccgccatcgagatactggcatggggcttgcgtaacatgaaatcatatcagctggctaatatctctagcccctccctcgtggtcgagtgcggtggacagactgtgcaaagttgtgtgatccgtaaccttaggaagaatccaaattttgacatttgtacactatttatggaggtgatgttgcccagagaggagttatactgtccacccatcacagtgaaggttatcgataatcggcagtttggtcgtagacccgttgtgggtcagtgtacaattcgctccctcgaaagcttcttatgcgacccttattctgcagaatccccaagtcctcagggcggcccagatgacgttagtctactgtccccaggcgaggatgtgctaatagacatcgatgataaggaacctctcattcccattcaggaagaagagtttatcgattggtggtccaagttctttgctagtataggagagagggagaagtgtggcagttacctcgaaaaggacttcgacaccttgaaagtgtacgacacacagttagagaacgtggaggcgtttgaaggcttatctgacttctgcaacactttcaaactctaccgcggcaaaacccaggaagagactgaagatccttcagtcatcggggaatttaagggcctgttcaagatctacccactgcctgaggacccagccattcccatgccccccagacaatttcaccaattggctgcgcagggaccacaggaatgcctggttcgaatctacattgtccgcgcattcggtctgcagcccaaggacccaaatggaaaatgtgatccttacatcaaaataagcatcggcaaaaagagcgtgtccgatcaggacaactacatcccctgcaccctagaacccgtgttcgggaaaatgtttgagctcacatgcactctccccctggaaaaggacctcaaaattactctgtatgactacgacctgctatccaaggacgagaagatcggagagaccgtagttgatctggagaatcggctgctgtctaagttcggcgcacgttgcggattgccacagacatattgtgtgagcgggccgaatcagtggagggatcagcttcggccgagtcagttgctccacctattctgtcagcagcatcgggtcaaggcccccgtgtaccgcacagatagggtcatgtttcaagacaaagaatattctatcgaggagatcgaggccggtagaatccccaacccccacctaggccccgtggaggaaaggcttgcgctccacgtgctgcagcagcagggtctggttcctgagcacgtggagtctagacctctctactctcctttgcagcctgacattgagcaggggaagctgcagatgtgggttgacttattccctaaagccctcgggcggccagggccccccttcaatatcacgccccgaagagccagacggttctttcttcggtgtatcatatggaacactagggacgttatcctggacgatcttagtttaacaggagaaaaaatgtccgacatttacgtgaagggttggatgattggcttcgaggagcacaagcagaaaacggacgtgcattacagaagcttagggggcgagggcaactttaattggagattcatatttccattcgattatctcccagcggagcaagtatgcactattgctaagaaggatgccttctggcggctggacaaaaccgaatcaaagatccccgcccgagtcgtgtttcaaatctgggacaatgacaagttttcctttgacgatttcctgggcagccttcaactggacctgaaccgtatgccaaagcctgcgaagacagccaagaaatgtagtcttgatcagctggacgatgcctttcatcccgagtggtttgtgtccctgtttgagcagaagactgtgaagggttggtggccctgcgttgcggaggaaggtgaaaaaaagatcctcgccgggaaactggagatgacattggagatcgttgcagagtctgagcacgaggaaaggccagccggccagggaagagatgaaccaaacatgaatcctaaacttgaagaccccagacgacccgatacttcttttttgtggtttacatcaccgtacaagacaatgaagttcattctttggcgccgtttccggtgggccattattctcttcatcattctcttcattctactgttgttcttggctatcttcatttatgctttccctaattacgccgctatgaagttggtgaaacctttcagctag

SEQ ID NO: 2478 - DNA, 6267 bp, synthetic construct
  misc_feature 1..6267: note = source = /note="Description of Artificial Sequence: Synthetic coding sequence"
  source 1..6267: mol_type = other DNA
atgctctgctgcctactggttcgcgccagcaatctcccatcagcaaagaaagacagacggtcggatccagtggcgtctctgaccttccgcggagtcaaaaagagaacaaaggtcatcaagaatagtgtcaatccagtgtggaacgaaggctttgaatgggacctgaaaggtattcccttggaccagggtagcgaattgcatgtcgttgtgaaagaccacgagacgatgggaagaaatagatttctgggtgaggctaaagtgccccttcgcgaggtattggccacaccgtcactgagcgcgagtttcaatgctccattgctagatactaagaaacagcctactggtgcttctctcgtcctgcaggtgagttacacgccgttgcccggagctgtcccgctgttcccccctccaacccctttggagccctcccctaccctcccggatttggacgtcgtggctgacacagggggagaggaggacacagaagatcaggggctcacaggtgacgaagccgagccttttctggaccaatctggcgggcctggggcaccaacaactccacgcaaactgccatctaggcctccgccccactacccaggcattaagcggaagcggtccgcacccacatcccgtaaactattgagcgataagccccaggatttccagataagagtgcaggttatcgagggccgtcagcttcccggcgtgaacatcaagccagtcgtgaaagtgactgccgccggccagaccaaaagaaccaggattcacaagggaaacagtccattattcaatgagacgttgttctttaacctgtttgactccccaggtgagttgtttgacgagcctatcttcattactgtcgtggattccagaagcttgagaaccgatgccctgctgggtgagttccgcatggatgttggtaccatttatcgggaaccccgacatgcttacctgcgtaagtggttgcttttgtccgatccagatgacttcagcgcgggggcccgaggctatttgaaaacatctctgtgtgttctgggccccggagacgaggcgcctcttgaaagaaaggacccatccgaggacaaagaggacattgaatccaatttgctgagaccaacaggagttgcattgagaggcgcccacttctgtctgaaggtgttccgcgcagaagacttgccccaaatggatgatgctgttatggataatgtgaaacagatttttggctttgaatccaacaaaaagaacctggtggacccattcgttgaagtgtccttcgcgggtaaaatgctgtgtagcaagattctggaaaagactgctaacccgcagtggaaccagaacataactctgcctgccatgtttccatccatgtgtgagaagatgcggatcaggattatagactgggatagactgacccacaatgacatcgtcgctactacatacctgagtatgtcaaagataagtgctcccgggggggagattgaagtcgatgattatctgggattcttaccgacattcggcccatgttacatcaatttgtacggcagtccgcgcgaatttacaggattccccgacccctacactgagctaaataccgggaaaggagagggagtggcttatcgagggcggctactgctgagccttgagacaaagctggttgagcactctgagcagaaagtggaggacttacctgctgacgatatcctgagggtggagaaatacctccgcagacgcaaatacagccttttcgctgctttttatagtgctacaatgctccaggatgtggacgatgccattcagtttgaggtctccattggcaactacggaaataagttcgatatgacctgcttgccacttgcaagcactacacagtactcccgggccgtgttcgacggctgccattattattatctaccctgggggaacgtaaagcctgtggtcgtgctctcctcctattgggaggacatcagccatcgtatagaaactcagaatcaactgctcggtattgcagacaggttggaggccggacttgaacaagtccacttggccttaaaagctcagtgctctacagaggatgtagattctcttgtggcgcaactgacagacgagctgatcgcggggtgtagtcaaccactgggcgacatccacgagacaccttccgccacacatcttgaccagtatctgtaccagctgagaacccaccatctgtcacagattacagaagccgctttggctctcaaactgggccacagtgaactcccagctgccctggaacaggccgaggattggctgctgcggctgcgggcactggctgaagagccacagaactctctgccagacattgtgatttggatgttacagggggacaaacgagtcgcctaccagagagtgcccgctcaccaggtgttattctcccgaagaggtgccaattattgcggtaaaaattgcggcaagttacagacaatctttctgaaatatccaatggagaaggttcctggggccaggatgccggtccagatccgcgtcaaactctggttcggcctctcagtggacgaaaaggaatttaatcaatttgcagaaggcaagctcagcgtcttcgccgagacctacgaaaatgaaacaaagctggcactcgtgggaaattgggggactactgggttgacgtacccaaagtttagcgatgtgacgggtaaaatcaagttacccaaggacagcttccggccctccgctggatggacttgggccggggactggtttgtatgtcccgagaaaacgcttctgcatgatatggacgccggtcatctgagcttcgtggaggaagtattcgaaaaccagacccggttgccaggaggacagtggatatacatgtcagataactacactgatgtgaacggtgaaaaagtactgcctaaagacgacattgaatgtccgctgggctggaaatgggaggatgaggagtggtcgactgacctgaatcgggctgtcgacgagcaaggatgggaatactccattactatcccccctgagcgcaaacccaaacactgggtgcctgctgaaaagatgtactacacacaccgacgccggcgttgggtgcgtctgaggcggagagacctgtcccagatggaggctctaaagaggcaccggcaggctgaggcagagggtgaaggctgggaatacgccagtctgtttggatggaagtttcaccttgaatacagaaaaacagatgctttcagacgcaggagatggcgtcgacgaatggaacccctagagaagacaggccccgcagctgtgttcgcgcttgagggcgctctgggcggtgttatggacgataaaagcgaggactctatgagcgtatccaccttgtctttcggagtgaatcggcccactatctcgtgcatatttgattacggcaatcgatatcacctgcggtgttatatgtaccaggcccgtgacctagctgccatggataaagatagctttagcgacccatacgccatagtcagtttcctgcaccagagccagaaaacagtcgtcgtgaaaaatacgctcaatcctacatgggatcagactttaatattctacgagatcgaaatctttggggagccagcgaccgtcgccgaacaaccgccctccatcgtagttgaactatatgatcatgatacgtatggggctgatgagttcatgggacggtgtatctgccagccctcgctggagaggatgcctagactcgcctggtttcccctgacccgaggctcacagccatcaggtgaactgctagcaagttttgagcttatccagcgtgaaaaaccggccatccatcatataccgggtttcgaggtgcaggagacaagcagaatccttgatgagtctgaagatacagatctgccttatcccccgcctcaaagagaggctaacatttacatggtgccacaaaacattaagcccgcgctgcagaggaccgcaattgaaatcctggcctggggcctcaggaacatgaagtcctatcagcttgcaaatatatcctcacctagcctggtagttgagtgtggaggacagaccgtccaatcctgtgtcataagaaatctgagaaagaatccaaactttgacatctgcacactcttcatggaggtgatgctacctcgagaagaactctattgtccacctattacggtcaaagtgatcgacaatcggcagtttggtaggaggccggttgtcgggcagtgtaccatcagatctctggagagctttctttgcgatccatattctgcggaatcccctagtcctcaaggcgggccagacgacgtatcgctgttgagccccggtgaagacgtcctaattgacattgacgacaaggagcccttaatcccaatacaactggcagatgggctgtccagccttgccccaacgaataccgcatcaccaccctccagtccacatgaggaggagtttattgattggtggagcaagttcttcgcatcaattggagagcgggagaaatgcgggtcttacttggagaaggattttgacactctcaaggtctacgacacacaactggagaatgttgaagcatttgaggggctctccgacttttgtaatactttcaaactgtacagggggaagacccaggaggagactgaagacccttccgtgatcggggaattcaaaggactcttcaagatttatcctctgcctgaggaccctgcgatccccatgcctcctcgacaatttcatcaactggccgcacaaggaccgcaggagtgtctagtccgcatatacatcgtgcgcgccttcgggctccagcctaaagatcctaacggcaagtgtgatccgtatattaagatctctatcggcaagaagagcgtcagcgatcaagataattacattccctgcacacttgagcccgtctttggcaaaatgtttgaattgacttgcaccctaccactggaaaaggacttaaaaataaccctctacgactacgacttactgagtaaggacgaaaaaattggcgaaacggttgtggacctggaaaatcggctcttgtccaagtttggggcccgatgcggactgccccagacttactgtgtctccggccccaatcagtggcgggatcagttgaggccgagtcaactactccatctgttctgccagcagcaccgggtgaaggcgcctgtttacaggacagaccgcgtgatgttccaagataaagaatactcgattgaggagattgaggcaggccgcatcccaaaccctcaccttggccccgtggaggagaggcttgcgttgcacgtattacagcagcaaggtctggtcccggaacacgttgaatccagaccactgtacagtcctctccagcccgacatcgaacagggcaagcttcagatgtgggtggacttgttccctaaagccttgggtagacctggcccaccgttcaacataacaccacgcagggcccggcgcttttttctgaggtgtatcatatggaacactagggacgtaattctggatgacctctcgctcacgggcgaaaaaatgtcagatatatacgtgaaaggttggatgattggcttcgaggaacacaagcaaaaaacagacgtgcactacaggtccctaggaggagaaggaaacttcaactggcggtttatcttcccctttgattaccttcccgccgaacaggtttgtaccatcgccaagaaggatgcattctggcgcttggacaagactgagagcaaaatacccgctagagttgtgtttcaaatttgggacaatgacaagttttcctttgacgacttcttaggtagtcttcaactggacttgaacagaatgcccaaaccagcaaaaaccgccaagaagtgtagcttggaccagttggacgacgcgttccatccagaatggttcgtaagtctgttcgagcagaagacagtgaagggctggtggccgtgcgtggcagaggagggggagaagaaaatcctggccgggaaactcgagatgaccctggaaattgttgccgaatccgaacacgaagaacgcccagccggccagggaagagacgagcctaacatgaaccctaaactcgaagacccccgaaggccggacacatcttttctgtggttcactagcccatataagaccatgaagtttatcctgtggcggaggttccggtgggccatcatattgtttatcatacttttcattttgcttctgtttctggctatttttatttacgcattccctaactacgccgcgatgaagcttgtcaagcccttctcttag

SEQ ID NO: 2479 - DNA, 6294 bp, synthetic construct
  misc_feature 1..6294: note = source = /note="Description of Artificial Sequence: Synthetic coding sequence"
  source 1..6294: mol_type = other DNA
atgctacgagtgttcatcctgtatgctgagaacgtccatacccccgacacagatatttccgatgcctattgttcagctgtgtttgctggggtcaagaaacggacaaaagttattaagaactcggtgaatcccgtctggaacgaggggtttgaatgggacctgaaagggatcccacttgatcagggcagcgaactgcacgtagtcgttaaggatcacgaaactatggggaggaacagattcctgggggaagcaaaagtgcctctgagggaggtgctcgctaccccttccctatctgcctcctttaacgccccgctgttggataccaagaagcagccaacaggagcctcccttgtgcttcaggtgagctacaccccattgcccggcgctgtcccactgttccctcctcctaccccattggagccatctccaactctgccggatctggacgtggtggcagggggcggacagtccagggccgagacttggtccctgctgagtgattccaccatggacactcgatacagtggcaagaaatggcccgcccctacggacaccggtggggaagaggacacagaagatcagggattaacgggggatgaggcggaaccctttcttgaccagagcggtggccccggtgcaccgacaaccccaaggaagttgccgtcaaggccccctccgcattatcccggtattaagaggaagaggagcgcacccacctcccgtaagctcctttctgataagccacaggatttccaaattagggtccaggtgattgaaggtagacagctcccaggtgtgaacattaaacctgtggtgaaggtcaccgcagctggccagacaaaaagaacaaggatccacaaaggaaactctccactgttcaacgaaactctattttttaatctcttcgatagcccaggcgaacttttcgacgagccaattttcattacagtggtggatagccgctcacttagaacggacgcccttctcggagaattcagaatggacgttgggacgatctacagggaacccaggcatgcatacctgcgaaagtggcttttacttagcgacccggatgattttagcgccggcgcaaggggttaccttaagacatctctatgcgtgctggggcccggggacgaggcacctctggagcgcaaagatccatccgaagataaggaagacatagaaagcaatctgctgagacccactggcgtggctctgagaggtgcccatttctgcctgaaggtcttcagagcagaagatctgccccaaatggatgatgctgtgatggacaacgtgaaacagatcttcgggtttgagagcaacaaaaaaaacttggtggaccctttcgtagaagttagcttcgcagggaagatgctctgctccaaaattctggaaaagactgccaacccacagtggaaccagaatattaccctacccgcgatgtttccctcaatgtgtgaaaaaatgagaattagaatcatagactgggataggcttacccacaacgatatcgtggctacgacctacctgtctatgagcaaaatatctgcccctggaggagaaatcgaggtcgacgattatctaggcttcctgccaacgtttgggccctgctatatcaatctgtatggcagcccccgtgaattcactggcttcccggatccctacactgagctaaataccgggaaaggtgagggcgtggcctatagggggaggctcttattgtcgctggagaccaagttggtagagcactccgagcagaaggtcgaagatctgcccgccgacgatatattgcgcgtagaaaaatacttaaggagaagaaaatactcactctttgctgccttctattccgcaaccatgctacaggatgttgatgacgctattcagtttgaagtgtccatcgggaattacggaaataagtttgatatgacatgtctgcccctggcatcaacaacccaatactcccgcgccgtgttcgacggatgccattattactatctcccttgggggaatgtgaagccagtggtggtactaagttcctactgggaggacatttctcaccgcatcgaaacacagaatcagctgctgggcatcgcagacaggctggaggctggactcgaacaggtccaccttgctctgaaagcccagtgctctacagaagatgttgactctctggttgctcagcttacagatgagctgatcgccggttgttcacagcccttgggagacattcacgagaccccttcagcaactcatctagatcaatatctctatcagttacggacacaccatctctctcagatcacggaggctgctttggcgctcaaattaggtcatagcgagctgccagccgcgcttgaacaagccgaagactggctgctgagattaagggccctggccgaggagccacagaactctttgccagacatcgtcatatggatgttacagggggacaaacgtgtagcttaccaacgggtgcccgcccaccaagtgttgttttccagacggggggccaactactgtggcaagaactgcgggaaactgcagacgattttccttaaataccctatggagaaggttcctggcgcccggatgcccgtccagatacgagttaagttgtggtttgggttgtctgtggacgaaaaggagttcaaccagttcgctgagggaaagctgtctgtgttcgcagaaacttacgaaaatgagactaagttggctctcgtgggaaactggggtactacaggactcacctacccgaagttcagcgacgttaccggtaagatcaagctgccaaaagacagcttccgtccctctgccgggtggacatgggctggtgattggttcgtctgccctgagaagactctgctgcacgatatggacgctggccacctctccttcgtcgaagaggtttttgaaaatcagactcgcctccccggcggccagtggatatacatgagtgacaattataccgacgttaatggggaaaaagttctgcccaaagatgatatcgagtgtccattgggttggaagtgggaagacgaagagtggagtactgatcttaacagggcggtggacgaacaaggatgggagtattctatcaccatccctcccgagcgcaagcccaagcattgggtccccgcggaaaagatgtactacacacacaggaggcgtcgttgggtccggttgagacgacgggatctatcacaaatggaagctctgaaacgccacaggcaagcggaggccgagggggaagggtgggaatacgcgtccttatttggctggaagtttcacctggaatatcgcaagactgatgccttccgcagacgcaggtggcggcggcggatggaaccactggaaaagacgggacctgccgccgtgttcgcactagaaggtgctctgggtggcgttatggatgataagtccgaggactcgatgagcgtgagcacccttagttttggcgtgaataggccaacaattagttgcatcttcgactatgggaatcggtaccacttgcggtgctacatgtatcaggcacgagacctcgctgcgatggacaaagactcattttcagatccatacgccatcgtgagctttcttcaccagtcacagaaaaccgtagtggtcaagaatactctgaacccgacatgggaccagaccctcattttttacgaaatcgagatttttggggaacctgccacagtggctgagcagccaccctccatcgtggtagagttgtacgatcacgatacttatggtgccgacgagtttatgggacggtgtatatgtcagcccagtcttgagcggatgccccggctggcatggtttcctcttacgaggggcagccagccatcaggtgagctgcttgcctccttcgagctaatacagcgggagaagccggcaatccaccatataccaggcttcgaagttcaggagacgtcccggatcctggacgagtctgaggataccgatctaccctatcccccaccacagagggaagccaatatctacatggtgccacagaacataaaacccgcccttcagcggacagcgatcgagatccttgcctggggactgaggaacatgaaaagctaccagttagccaatatttcctctccaagccttgtggtggagtgcgggggacaaacagtgcagtcctgcgttattcgtaatttgcgtaaaaatccaaatttcgatatttgtactctgtttatggaagtgatgcttccacgagaggagctgtactgtccaccaatcactgtcaaggtgatcgacaatagacagtttggtcgtcgccctgtagttggacagtgtaccattcggtctctggaaagcttcttgtgtgacccatactcagccgagtcgccttccccccagggcggccctgacgatgtgagtctactgtcaccgggggaggatgtgctaatcgatatagacgacaaggagccactgatcccaatccaagaggaggagtttattgattggtggtcgaagttctttgcatctataggtgaacgtgagaagtgtggctcatacctcgaaaaggatttcgacactctgaaggtctacgacacccagctcgagaatgtggaagcatttgaaggccttagcgatttctgcaacacatttaaactctacaggggaaaaacccaagaggagaccgaggacccctccgtcatcggcgagtttaagggactatttaaaatctacccgttgcctgaagaccccgcaatccccatgcccccacgccagttccaccaactggccgctcaaggcccacaggaatgtctggtaagaatttatatagtgcgagcattcggcctccagcctaaggaccccaacggaaagtgtgacccttatattaagatcagcataggtaaaaagtctgtgtctgaccaggacaactatattccttgtacgctggagcctgtcttcggaaagatgtttgaactgacttgcactcttcctctcgagaaggacctcaagatcaccttgtatgattatgatctgctgagcaaagatgagaaaatcggggagaccgtggtggatttggagaaccggctgctttcaaagtttggcgctcgatgtggcttgcctcagacctattgcgtgtctggacccaatcagtggcgagatcagctcaggccaagccagctcctgcatctgttttgtcagcagcaccgcgtgaaggccccagtctacaggaccgatcgtgtgatgttccaggataaagaatattccattgaagagattgaagctggacggatccctaatccccacttaggccccgtggaggagaggctggctctacacgtgctccaacagcagggactggttcctgaacacgttgagtcccggccactatactccccgctgcagcctgacattgagcaaggaaaattgcaaatgtgggtggatttgttcccaaaggctctgggacgccctggaccgccatttaacataaccccccggagagcccgacgattttttttacgctgcattatctggaataccagagatgtgattctcgatgatctctctttgacaggggaaaaaatgtctgacatatacgtgaaaggctggatgattggatttgaggagcacaaacagaagacggatgtacattacagatctcttggcggcgaaggcaattttaactggaggtttatctttccctttgactacctgcctgccgaacaagtgtgcacaatcgctaagaaggacgcattctggagactggacaaaaccgagtcaaaaattccagccagagtggtgttccagatctgggacaacgataaattttcctttgatgatttcttaggcagcttgcagcttgatctgaatagaatgccaaaacccgccaagactgccaagaagtgcagtctcgatcaactggacgacgccttccatcccgagtggttcgttagcttgtttgaacagaaaacagtcaaaggatggtggccctgcgtggcggaagagggtgaaaaaaagatcctggctggcaaattagaaatgaccctggagatcgttgccgagagcgaacacgaagagcgccctgcagggcagggtagggacgagcccaatatgaatcctaagcttgaggatcccaggcggccagacacctcgttcctgtggttcacgtccccctataaaaccatgaagttcatcttgtggagacgttttagatgggctattatactgttcattattctctttatcttgctgttgttcctggcaatatttatttacgcatttcctaactacgctgccatgaagttagtgaaaccgttctcttag

SEQ ID NO: 2480 - DNA, 6360 bp, synthetic construct
  misc_feature 1..6360: note = source = /note="Description of Artificial Sequence: Synthetic coding sequence"
  source 1..6360: mol_type = other DNA
atgctctgttgtctgctggttcgcgcatctaacctcccaagtgccaagaaggatcgccgctctgaccccgtggcatccctgacattccgcggcgttaaaaaaaggactaaagtcatcaaaaacagcgttaatccagtgtggaatgaggggtttgaatgggatttaaaggggattccactggaccaagggtctgaactacatgtcgttgtaaaagaccatgaaaccatgggtaggaaccgcttcctgggcgaagccaaggtgcccctgcgtgaagtgctggctactccgagcctatccgcgtccttcaacgcgccattgctggataccaagaagcagcccaccggagcctctctcgttctacaggtgtcctacactcctctgcctggggccgtacctctcttcccacccccaacacctcttgagccatctcccaccctacccgacctggacgtggtggctggcggaggccagagtcgcgcagagacgtggagtctgctaagcgattccacaatggacacacgctattctgggaagaaatggccggccccaacggatacggggggagaagaagacactgaggaccagggactcactggagatgaggccgaaccattcctggatcagagcgggggtccgggcgcacccactactccacgcaagttgccatcacggccgcctccccattatccggggatcaagaggaagaggtccgcacccacatcccggaagctgctttcagacaaaccacaagacttccagattagagtacaagtgatagagggtcgccagctgcctggagtgaacataaaacctgtggtgaaagtcacagctgccgggcaaacaaaacgaacacgcatccacaagggcaactcacctctgtttaatgaaacactgttcttcaatcttttcgattcacccggcgagctgtttgatgagccaattttcataacagtggtggactccagatccttgaggaccgatgctctccttggggaattcaggatggatgtgggaacgatctatagagaaccccggcatgcctacctgcgcaagtggctgctccttagcgaccccgacgatttcagcgctggtgctcgaggatacttaaaaacgtccctctgcgtgttgggccctggcgacgaagcccccttggaaaggaaggaccctagtgaggacaaggaggacattgaatctaatttgctccgcccaactggcgttgctcttcgcggcgcacatttctgcctcaaggtgtttcgggccgaggatttgccacagatggatgatgccgtgatggacaatgtcaagcagattttcgggttcgagtctaataaaaagaaccttgtcgatccatttgtggaagtctcttttgctggtaaaatgttgtgctccaagattttagagaagacggcaaacccccagtggaaccagaatatcaccctccccgctatgttcccttccatgtgcgagaagatgaggattagaattatagattgggaccgtctgacccataatgatattgtggcaacaacatacttaagcatgagcaagatcagcgcacctggcggagaaattgaagttgacgactacttaggctttcttccaacattcggaccatgctacataaacttatacgggtctcctcgtgagttcacaggctttcctgacccgtatacagagctgaacaccggaaaaggagagggggttgcatatagagggcgactgttactgtctctggagacgaagcttgtggaacactcagaacaaaaagtggaagacttacccgctgacgatatcttacgcgtcgagaaataccttcgaaggcgaaaatattcactcttcgctgcgttctactctgctaccatgctgcaggacgttgatgatgctattcaatttgaggtgagtatagggaactatggcaataaattcgatatgacgtgccttccgctcgccagcaccactcagtatagccgtgccgtcttcgatggctgtcactactactacttgccctgggggaatgttaagccagtggtggtgctctctagttattgggaagacatcagccatcggatcgagacgcaaaatcagctgctcggcatcgctgacaggttagaagctggtcttgaacaggtgcacttagcccttaaggcgcagtgttcgaccgaagacgtggatagtcttgtggcccagcttacagatgaacttatcgccggctgctcgcagcccctgggagacatccacgagacgcccagcgctacccacctggatcagtacttatatcagctaagaacacaccacttaagccagatcactgaagccgccctggctcttaagctggggcatagcgagctgcctgcagcactcgagcaggcagaagattggttgttgagactgcgggccctcgctgaggaacctcagaactctttgccggatattgtgatctggatgcttcagggcgacaagagagtggcctatcagcgtgtccctgcccaccaggtgctgttttctcggcgtggggccaactactgtggcaagaattgtggaaaattacaaacgatttttttaaagtaccctatggaaaaggtgcccggagcaagaatgcctgtccagatccgcgtgaagctttggtttgggctctccgtggacgagaaagagttcaatcaattcgccgaaggaaagctcagcgtctttgcagagacttatgagaacgaaaccaagctggctttagtaggcaactggggcactacgggtctcacctaccccaagttttccgacgtcacgggtaaaatcaagctgcccaaggattcattccgtcctagtgctggctggacttgggccggggattggtttgtctgtcctgagaagactctactgcatgatatggacgcaggtcatctgagtttcgtagaggaggtgttcgagaatcagactcgtctaccgggaggtcagtggatttatatgtcagacaactatacggacgtaaacggagagaaagtgcttccaaaggacgatatagagtgcccactcggttggaagtgggaggacgaagaatggagcacggatttgaatcgcgctgtggacgagcaggggtgggaatattctattaccataccccccgaacggaaacctaagcactgggttcccgcagaaaagatgtattacacgcaccgccgtcgcagatgggtgcggctacgcaggagggacctatcccagatggaggccctgaaacggcacaggcaggccgaggcggagggagaagggtgggagtacgcctctcttttcggttggaagtttcaccttgagtatcggaaaaccgatgcatttagacggagaaggtggcgccgtaggatggagcccctggagaaaactgggcccgccgctgtgttcgccctggaaggagccttaggcggagtgatggacgataagagcgaagacagcatgtctgtatccacattaagctttggtgttaacagacccacaatttcatgcatttttgactacggaaaccggtatcatctgcgctgctacatgtatcaggcacgcgacctggccgcaatggacaaagattctttctctgacccatatgccatcgtatcctttctgcaccaatcacaaaagacggtcgtggtgaaaaacaccctcaaccccacttgggaccagacacttattttttacgaaatcgaaattttcggggaaccggcaacagtggctgagcagcctccttcaatagtagtggagctatacgatcatgacacatatggggcagacgaatttatgggccggtgcatttgccagccttctctggaacggatgccgagattggcttggtttcccttgaccaggggctcccagccttcaggagaactgcttgcctcattcgagttgatacagagggaaaaaccagccattcaccacattccaggtttcgaggtacaggaaacctcgcgaatccttgacgagagcgaagacaccgacctgccctacccccccccacagagggaggccaatatctacatggtgcctcagaacattaaacctgccttgcagaggacggcaatagagatactggcctggggcctaaggaatatgaaatcgtatcagctggctaatatctcctccccctcactggtggtagagtgcggaggtcagaccgtgcagagctgcgtcatacggaacctcaggaaaaacccaaattttgacatatgtacgctttttatggaagtaatgcttcctagggaggagctatattgtccccccattaccgtcaaagtcattgacaatcggcagtttggccgcaggccagtcgtggggcaatgcacaattagaagcctggagagctttctgtgcgatccgtactcagctgagtcaccatcaccacaggggggacctgacgacgtgtcactgctgtcacctggcgaggacgtcctgatcgatattgatgacaaagaaccactcatcccaatccagttggcggacggactgagctccctggccccgacaaataccgcttctccaccctctagccctcacgaggaagaatttatagattggtggtccaagttctttgcatctattggggagcgagaaaaatgcggctcttatctggagaaggacttcgatacgctgaaggtgtacgacacacagctggagaacgttgaggcattcgaggggctgtccgacttctgtaatacatttaagctctaccggggtaaaacacaggaagaaaccgaggatccctcggtgataggagaattcaaagggctgtttaagatctatccgcttcccgaggaccccgccatccccatgcctcctcgacagttccaccaactggccgctcagggaccacaagagtgcctagtgcggatctacatcgtccgagcgtttggtttgcagccaaaggatcctaacgggaaatgtgatccttatattaaaatcagcatcggtaaaaagtctgtatcagatcaggacaactacatcccctgcactctcgaacccgtgttcggaaaaatgttcgagctgacctgcacactccctctggaaaaagatctgaagattactctttatgactacgacttgctgagcaaagacgagaagatcggagaaacagtcgtagatcttgagaataggctactgagtaagtttggagctcgatgtggcttgccccagacatactgcgtttcaggtcccaatcagtggcgggaccagttgagacctagccagctactacacctcttttgccagcaacatcgagtgaaagcccccgtttatcgaactgacagggtgatgtttcaggacaaggagtacagtattgaggaaatcgaagcaggtaggatacccaacccacaccttggccccgtggaagagagacttgcattgcacgtgctgcaacagcagggcttggtgcccgagcacgttgaatctcggccattatacagcccattgcagcccgacatcgaacaggggaagttacaaatgtgggtcgacctgtttcccaaggcactcggtaggcccggacctccatttaatattactcctcggcgggctaggcgcttctttttgaggtgtatcatttggaatacccgggacgtcatccttgacgacctctccctcaccggcgagaaaatgtccgatatttacgttaagggttggatgatagggttcgaggagcataagcagaagactgacgttcactacaggtctctcgggggagaaggcaacttcaattggcgctttatcttcccctttgattacctaccagctgaacaagtttgtacaatcgctaaaaaggatgcattttggagacttgacaagaccgagtcaaaaataccagcccgagtggtttttcagatatgggacaacgataagttttcatttgatgacttcctggggtctctccagcttgatctaaacagaatgcccaagccagccaagaccgccaaaaaatgtagcttagaccagctggatgacgcctttcatcccgagtggttcgtctctctgtttgaacagaagacagttaagggctggtggccatgtgtggctgaagagggggagaagaagatacttgccggcaaactggagatgacgcttgagatagttgcagagtccgagcatgaagaacgtcccgccggtcaaggcagggatgagccgaacatgaatccgaagctggaggaccccaggcggcccgacaccagctttctgtggttcacatctccttataaaactatgaagtttatcttgtggcgccggtttaggtgggccatcatcttgttcattattcttttcattctgctgctgtttctggcaatctttatatacgcgtttccgaattatgccgctatgaagttagttaaaccatttagttag

SEQ ID NO: 2481 - DNA, 6297 bp, synthetic construct
  misc_feature 1..6297: note = source = /note="Description of Artificial Sequence: Synthetic coding sequence"
  source 1..6297: mol_type = other DNA
atgctctgctgcctgctagttagagcctccaatttgccgtcagccaagaaagaccgtcgcagtgacccggtggcatccctgacattcaggggagtaaagaaacggactaaggttattaagaatagtgtgaacccagtgtggaatgaaggatttgagtgggatctgaaaggaatacccctagatcaggggagtgagctgcatgtggtggtgaaagaccatgaaaccatgggtcgcaatcgcttcctgggggaggcaaaagtgcctctacgggaggtcctggctaccccatctctgtccgcaagttttaatgcccctcttcttgatacgaaaaagcagccaaccggcgcatcgttggttctgcaagtatcttatacacctttgccgggggctgtcccgctatttcccccacctacaccactggaaccatcccctaccttgcccgacctggatgtcgtggcaggcggcgggcagagtagggctgaaacctggagtctgctttcagactctacaatggatacgaggtatagtggcaaaaaatggcctgctcccaccgacaccggaggagaggaagacaccgaagaccagggcttgacgggggacgaagccgagcccttcctggaccagtctggcggccctggggctccaaccacccccaggaagctaccctctaggccccctccacactatcccgggatcaaaaggaaaagatcggcacccacttcccgtaagcttctgagcgacaaaccacaagacttccaaatcagggttcaagtgatcgaaggccgccagttaccgggagtgaatatcaaacccgtcgtgaaggtgacagcagcaggacagaccaaacggacgcggattcacaaaggaaactctccactgtttaacgagacactgttttttaacctgttcgatagcccgggtgaattattcgatgaacctatttttatcactgttgtggactcaagatccctgagaaccgacgcacttttaggtgagttcaggatggacgtgggtaccatataccgcgagcctcgtcacgcgtatttgcggaaatggttgttgttgagcgaccctgatgacttctctgctggggctcgggggtacctgaagacatcactgtgtgtcctgggcccaggggacgaagctccgctggaacgtaaggacccttccgaggacaaagaggacatcgaatcaaatctgctccggccaactggcgtggctttacgcggcgcccatttctgcttaaaagtgtttcgcgcagaggatctgccgcaaatggatgatgccgtcatggataatgtgaaacagatatttggatttgaatcgaacaaaaagaacctagtggacccttttgtcgaagtgtcttttgctggtaagatgctgtgcagtaaaatcctcgagaaaacagccaacccacagtggaatcagaacataactttgcctgctatgttcccctcaatgtgcgaaaagatgaggattaggatcatcgactgggacagactgacgcacaatgacatagtggcgactacctacttgagcatgtctaagattagcgctccaggaggagaaattgaggttgatgattatttgggtttcttgcccaccttcggcccttgctacattaacctgtacggctccccaagggaattcaccgggttcccagatccttatacagaactgaatacggggaaaggagaaggcgtagcctaccggggcaggctgctgctgtcactcgaaaccaaactggtggagcacagcgaacagaaagtggaagatctccccgccgacgatattttgcgggtagagaagtaccttcgtaggagaaaatactccctgttcgccgcattctattcggctaccatgctgcaggacgtagacgatgccatccagttcgaagtgtctattggcaactacggtaacaagtttgacatgacgtgcctccctctggcgtccaccacgcagtacagtcgggcggtatttgacggttgtcattactattatttaccatggggtaatgtaaagccagttgtcgtgctgtcctcttactgggaagatattagtcaccgcattgaaacccagaaccaactccttgggatcgccgacaggttagaagctggattggagcaggtgcacctcgcgctgaaggcccagtgttcaacagaggatgtggactctctggttgcccaacttacggacgagcttatcgcagggtgcagtcagcccctgggcgacattcacgaaaccccttcagccacgcatctggaccagtatctgtatcagctccgcacccaccacctgtctcagattactgaggcagccctggccttaaagttgggacattcagaacttcccgccgccttggagcaagccgaggactggctgttgcggctgcgggcgctcgctgaggagcctcagaattctctccctgacattgtcatctggatgttgcagggggacaagagagtggcctatcaaagagtccctgcacaccaagtgttgttcagcaggcggggggccaattactgtggcaaaaactgcggcaagctgcagacaatctttcttaagtaccccatggagaaagtcccaggggcaagaatgcccgttcagatcagagttaagttatggttcggactctctgtagacgaaaaggagttcaatcagttcgctgaaggtaaactgagtgtgttcgcagagacctacgagaacgagactaaacttgccctggtgggaaattgggggactactgggctcacctacccaaagttttccgatgtgaccggcaaaatcaaactgccaaaagattctttcaggccctcagccggctggacctgggccggggactggtttgtgtgcccagaaaaaacattactgcatgatatggacgccggccatttatcttttgtcgaggaggtgttcgagaaccagacaagactccctggcgggcagtggatatacatgagcgataattatactgacgtaaatggtgagaaggtcctgcccaaggacgacattgaatgtccgttgggctggaagtgggaggatgaggagtggagcacggacttgaaccgcgcagtggatgagcagggctgggaatattcgattaccatccctccagagagaaagccaaagcactgggtacctgctgaaaagatgtactacacgcaccgccggcgaaggtgggtcaggctcagacgcagggatctgagtcagatggaagcactgaaaaggcacaggcaggccgaagctgagggagagggttgggaatacgcctcactgttcggttggaagttccacctcgaatacaggaaaaccgatgcattccgccgacgcagatggagacgccgcatggaacccttagaaaagaccggccccgcagcagtgtttgccctcgagggagcgctcgggggagtgatggacgacaagtccgaagactccatgtcagtgtctactctgtcctttggtgtgaaccggccgaccatttcatgcatcttcgattatggaaataggtatcatttgcgttgttacatgtatcaagctcgggatctcgccgcaatggacaaagatagttttagcgatccgtacgcaatcgtgagttttctgcaccagtcacagaaaacagtggtcgtaaaaaatactctcaaccccacttgggatcagacacttatattttacgaaatcgagatttttggggagccggcaacagtggccgaacagccgccttccatcgtagtggaactttatgatcacgatacatacggcgcggatgagttcatgggccgatgcatctgccagccctcacttgaaagaatgcctagactagcatggttcccattgacgcggggcagccagcctagcggcgagctgctcgcaagcttcgagttgatccagagggaaaagccagcaattcaccatatcccaggatttgaggtgcaagagacttccagaatcctggacgaatctgaggataccgacttgccttatccccctccacagagggaagcgaatatctacatggtgccccaaaacataaagcctgccctgcagaggaccgccatagagatcttggcttgggggcttagaaacatgaaaagttaccaacttgccaacatctctagcccttctcttgtcgtggaatgtggaggacagacggtccagtcttgcgttataaggaacctgcgcaaaaatcctaattttgatatctgcacgcttttcatggaagtgatgctaccgcgcgaggagctctactgccctcccattaccgtaaaagtaattgacaatcgccagttcggccgacggccagtggtgggccagtgtaccatccgctccctcgaatcatttttatgcgacccctatagtgctgagagtccatccccacagggggggccagatgacgtcagcctgttaagccccggagaggacgtcctgatcgatatcgatgacaaagagccgcttattcctatccaggaagaggagtttatcgactggtggagtaaattcttcgcatccattggagagcgcgagaaatgtggatcttatctggagaaggattttgataccttaaaggtgtatgacacccagcttgagaatgtggaagctttcgaggggctgtctgacttctgcaacacattcaaactttacagagggaagacccaggaggagacagaggatccatccgtgattggcgaatttaaggggttgttcaaaatctaccccttgcccgaagatcccgccataccaatgccacctaggcagtttcatcagctcgcagctcagggtccccaggaatgtctcgttcggatctacatcgtgagggccttcgggctgcagcccaaagaccctaacgggaaatgtgatccctatatcaagatctccattgggaaaaagtctgtgtccgatcaggacaactatattccatgcaccctggagccagtattcgggaaaatgttcgaactgacctgcacacttccgcttgaaaaggacctgaagattactctctatgactacgatcttttaagcaaagacgaaaagattggcgagactgtcgtggaccttgagaaccgactgctatccaaattcggtgccaggtgtggcctgcctcagacctactgcgtgtcaggccctaaccagtggcgcgaccagttaaggccttcgcagttgctgcacctgttttgccagcagcacagagtcaaagcccctgtatacagaaccgacagagttatgttccaggataaagagtatagcattgaggagattgaagccgggcgcatccctaacccacatctgggcccagtggaagagcgacttgccctacatgtgttacaacagcagggccttgtcccagagcatgtggagtctaggccactgtactcacccctgcagccggacatcgagcagggaaaactgcagatgtgggtggacctgttccctaaagcgctgggtaggcctgggccaccctttaatattactcctaggagggcacgccggttcttccttcgatgcatcatctggaacacaagggacgtgatactggacgacctgagccttaccggcgaaaaaatgtcagacatctacgtcaaggggtggatgatcggctttgaggagcataagcagaagactgacgttcactatcgctctcttggtggcgagggcaactttaactggaggttcatctttcctttcgactaccttcccgctgaacaggtgtgtacaatcgccaagaaagatgccttctggcggttagacaagaccgaaagtaagatccctgcccgagtcgttttccagatatgggataacgacaagtttagtttcgatgactttctgggaagcctgcagctggacctaaacagaatgccaaaaccagcaaaaacggccaaaaagtgcagcctagatcagttggacgatgctttccaccccgagtggtttgtatctctgttcgagcagaagacagtcaaaggctggtggccatgtgtggccgaggaaggagagaaaaaaatcttagccggcaagttagagatgacgcttgaaattgttgccgaaagcgagcacgaggagcggccagccggccagggacgagatgaacccaacatgaatccaaagcttgaggacccacgacggcctgataccagcttcttatggtttacttctccctataagaccatgaagttcatcctttggcgtaggttccgatgggcaatcatcctctttataatcctgtttattttactgttgttcctggccatctttatctatgcctttcctaactacgctgctatgaagctggtcaagcctttctcctag

SEQ ID NO: 2482 - DNA, 6336 bp, synthetic construct
  misc_feature 1..6336: note = source = /note="Description of Artificial Sequence: Synthetic coding sequence"
  source 1..6336: mol_type = other DNA
atgttgcgagtgttcatcctatatgctgagaacgtacatactcccgataccgacataagcgatgcctactgctctgccgtctttgcgggtgtgaaaaaacgaacgaaagtgatcaaaaatagcgtgaaccccgtctggaacgagggtttcgaatgggacttaaagggaattcctctagatcaaggctctgagctgcatgttgtcgttaaagaccacgagacaatgggtagaaataggtttcttggtgaagcaaaggtccccctgcgcgaggtcctggccaccccctccctctcagcttccttcaatgctccattgctcgacaccaaaaaacagcctacgggagcaagcctggtgttacaggtcagttacacacctctgccgggagctgtgccgctctttccgccgcctacccctttggagccctctcccacgttgcccgatctggacgtggttgccggcggcgggcaatcccgcgccgaaacatggtcccttctttccgatagcactatggacacacgttacagcgggaagaaatggccagctcctaccgacactggtggtgaagaagacaccgaagatcagggactcactggcgatgaagctgagcccttcctggaccagtcgggtgggcctggcgcgcctacgactccccggaagctgccgtcccggcccccccctcattacccaggcatcaagaggaaacgcagcgcacctacctctagaaaactcctctcagacaaaccccaagatttccagattagagtccaggtcattgaggggagacagctccctggtgtgaatattaagcccgtagtaaaagtgacagctgcaggccagacaaaaagaacccggatccacaaaggaaactctccgctcttcaatgagacactgttcttcaatttatttgatagccccggcgagctgtttgacgagcccattttcattaccgtggtagactccaggtcattgagaaccgatgctttgctcggcgaatttaggatggacgtcggcacgatttatcgggaacctcggcacgcctaccttcgcaagtggctgcttctgtctgaccctgacgacttttcagccggcgctcgcgggtatttaaaaacctcactgtgcgtgctcgggcctggggatgaagctcctctcgaaagaaaggacccctccgaggacaaggaagacatcgagagtaatctgctaagaccaaccggtgtggctctgcggggcgcacacttctgcttgaaggtgttccgcgctgaggacttgccacagatggacgatgccgtaatggataacgtgaagcagatcttcggcttcgaaagtaataagaaaaacctggtggatccatttgtggaggtttcctttgccggaaagatgctgtgcagcaagattctcgagaagacagcaaaccctcagtggaaccagaatattactcttcctgccatgtttcctagcatgtgcgaaaagatgcggattcgaatcatcgactgggacagactgacccacaacgacattgtggccacaacatatctttcgatgagcaagatctcagcaccaggcggcgagatcgaggaggagccggcaggggcagtgaaaccaagtaaggcaagcgacctggatgactatctggggtttttgcctacattcggcccatgctacattaatctgtatgggtctccaagagaattcacaggctttcccgatccatacacagagctgaacactggcaaaggcgaaggtgtcgcctaccgcggcaggttactgctctccttagaaacgaaactcgtcgaacactctgagcaaaaagtcgaagatcttccagccgatgacatcctgagagtggaaaaataccttcgacggagaaaatatagcctcttcgctgccttttactcagccactatgctgcaagatgtggacgatgcaatccaattcgaggtaagcatcggcaactacggcaacaagtttgatatgacgtgcttacccctcgcctctacgacgcagtactccagggctgttttcgacgggtgccactactattatcttccctggggcaacgtgaaacccgtagttgttcttagttcttactgggaagatatctctcacaggattgagacgcaaaatcaattattggggatcgccgatcgccttgaggccggcctggaacaggtccacctggccctgaaagcacagtgtagtactgaggacgttgacagcctggtagcgcaactcactgatgagctgattgcgggatgttcacagcccctgggggatatccatgagacgccttcagccactcacctggaccagtatctttaccaattaaggacccaccacctttctcaaattaccgaagctgcgctggcactgaagcttgggcattccgagctacctgctgcactcgaacaggccgaggactggctgctgaggctgcgagccctggccgaagaacctcaaaatagcctcccagacattgttatttggatgctgcaaggggacaagagggtagcctaccaaagagtgcctgcccaccaagttttattttcccgtagaggggctaactactgtggcaaaaattgtggtaaattgcagactattttcctgaaatatccgatggagaaggtgcccggtgccagaatgcccgttcagattcgagttaaattgtggtttggcctttccgtcgacgagaaggaatttaatcagtttgcagaagggaaactgtccgtgttcgccgaaacttacgaaaacgaaactaagctagcgctggtgggtaactggggcaccaccgggctcacatacccaaaattctcagacgtgactgggaaaattaaactgcctaaggacagcttcaggcctagcgccggctggacatgggctggcgactggtttgtctgtccagaaaaaaccctgttacacgacatggacgcaggccatctgagctttgtggaagaggtgtttgagaatcaaacaagactgccgggcggccagtggatatacatgtcagataattacaccgacgtcaacggagagaaggtcctgccaaaggatgacatagagtgcccgctgggatggaaatgggaagatgaagaatggagcacagacctgaatagagcggtcgatgagcaaggatgggagtactccatcactatccccccagaaaggaaacccaagcattgggttcccgcggaaaagatgtactatacccaccgcagaaggagatgggtaaggcttagacgccgggatctcagtcaaatggaggctttgaaaaggcaccgtcaggcagaagctgaaggcgagggatgggaatatgcctcactgtttgggtggaaatttcatttagagtaccgcaagactgatgcattccggagacggagatggcgccgtcgcatggaacctctagagaagacaggtcctgccgctgtgtttgccttagaaggcgcactcgggggggttatggatgataaatccgaggatagcatgagcgtttccactctgagcttcggcgttaatagaccaaccatctcatgcatttttgactacggcaaccggtaccacctccggtgctacatgtaccaagctagagacctggctgctatggacaaagatagcttctctgatccttacgctattgtgagctttctgcatcaatctcagaaaacagtggtcgttaagaatacactgaacccgacctgggaccagacactcatcttctatgaaattgagatcttcggagaacctgccacggttgccgaacagccccctagtattgtggtggaactgtacgatcatgatacttatggcgcggatgagttcatgggacggtgcatctgccagccctccctagaaagaatgccgagactggcgtggttcccgctgacacgcggatctcagcccagcggggaactgttagcttcgttcgagctaatccagcgcgagaaacccgccattcaccatattcccgggtttgaggtccaggagaccagccggatcctcgatgaaagtgaggatacagacctgccgtatccccccccgcagagagaggccaatatctatatggtacctcaaaacataaaacccgccctccagaggaccgccatcgaaatattagcttgggggctgcggaacatgaagtcttaccaactcgccaacatctcaagcccatctcttgtggtggagtgtggcggacaaacggtgcagagttgcgtgataaggaaccttaggaaaaaccccaatttcgacatttgcacactgttcatggaagtgatgctgccccgtgaagaactttactgtcctcctatcacagtgaaagtcatcgacaatcgtcagttcggacgccgccctgtcgtcggacagtgtacgatccgatcgctcgagtccttcctgtgtgatccctactcagccgaaagcccgtccccccaagggggccccgacgacgtgtcgctcttgtcccccggcgaagatgtcctaatcgacattgacgataaagagccacttatacctatacaggaagaggaattcattgactggtggagcaagttcttcgcttctattggcgagagagagaaatgcggcagctaccttgagaaggacttcgatactctgaaagtatatgatacacagctcgagaacgttgaggcgtttgaaggcctgtctgatttttgcaacacattcaagctttacagggggaagacccaagaggagaccgaggatccctctgtaatcggagagtttaagggcctttttaaaatatacccccttcctgaagaccccgccattccgatgcctccccggcagtttcaccaactagctgcccagggaccccaggaatgtctggttcggatttacatagtgagggcttttgggcttcaacccaaagaccccaatggcaagtgtgatccatatataaagataagtatcgggaagaagtctgtgtcagaccaagataattatataccttgcaccttggaacccgtgttcggtaagatgttcgagctcacatgcactttgccccttgaaaaggatctgaaaatcacactctatgattacgatctgttgtctaaggacgagaaaattggtgagaccgtcgtggatttggagaaccggctgttatccaagttcggagctaggtgtggcctgccacaaacatactgcgtgagcggtccgaatcagtggcgagatcagctccgaccatcccagctgttacatctgttttgccagcagcacagagtgaaagccccagtatacaggacggaccgagtaatgttccaggataaggagtactcaatcgaagagatcgaggcgggcagaattcccaacccgcatttagggccagtggaagaacggctagctctgcatgtcctgcagcagcagggcttggtgcccgagcatgtcgaatctcggcccctctactcacctcttcagcccgatattgaacaggggaagctacaaatgtgggtcgacctgttccccaaggccctcggtaggccaggcccgccctttaatataacgccccgtcgcgcccgcagattctttttaaggtgtataatctggaacacacgggacgtgatcctggatgacttatcacttactggcgagaaaatgtctgacatctatgtgaagggatggatgatcggatttgaagaacacaagcagaagaccgatgtgcactaccgcagtcttggcggagaaggcaacttcaattggcgattcatcttccctttcgattacctgcccgctgagcaggtctgcactatcgccaagaaggatgcattttggcggctcgataagaccgagtcaaaaatacccgctagagtggtgttccagatctgggacaacgacaaattctccttcgatgattttttaggctccctgcagcttgacctcaaccgcatgcctaaaccggcgaaaaccgccaagaaatgcagcttggaccagctggatgacgcatttcaccccgagtggtttgtgtccctcttcgagcaaaagacagttaagggttggtggccttgtgtggccgaagagggcgagaagaagatcctggctggcaaacttgaaatgaccctggagattgtggctgagtcagagcacgaggaacgtccagctggacaggggcgggatgagcctaatatgaatccaaaactggaagacccgcgcaggccagatactagctttctgtggtttacatctccgtataaaacaatgaagttcattttgtggcgtcgattccggtgggcgattattctgttcattattttgttcattctgcttttgtttctggctattttcatctacgctttcccgaattacgcagccatgaagctggtgaagccctttagctag

SEQ ID NO: 2483 - DNA, 6306 bp, synthetic construct
  misc_feature 1..6306: note = source = /note="Description of Artificial Sequence: Synthetic coding sequence"
  source 1..6306: mol_type = other DNA
atgctcagagtgtttattctgtatgccgaaaacgtccacaccccagataccgacatctcagatgcctattgttcagcagttttcgccggagtaaagaagaggaccaaagtcatcaagaatagtgtcaacccagtgtggaacgaggggtttgagtgggatctgaagggcattccgctggatcagggatccgagctccacgtagtggtgaaagaccacgaaaccatgggcaggaatcgtttccttggcgaggcaaaagtcccactcagggaagtcttggccaccccatcactgtccgcaagcttcaatgccccgctactcgatactaaaaagcagccaacgggtgcctccctagtgctccaggtatcctacacccctctccccggcgctgtaccactcttcccccctcccactcctctggagcccagccctacccttcctgatctcgacgtcgtagctgacaccggcggagaggaggacacagaggaccaggggctgacgggtgacgaagctgaaccctttttggatcagagcggggggccaggcgcaccgacgactccccggaaactgccatcacgtcctcccccccactatccgggcatcaaacgtaaacgctccgccccaaccagccggaaactgctatccgacaagccgcaggactttcagatacgggtgcaggttatcgaaggccgccagctacccggcgtcaacattaagccggtggtcaaggtgaccgccgcaggacagacaaaacggactcgaatccataagggcaattctccgctgttcaacgagactttgtttttcaacctcttcgactcccctggggagctatttgacgagccaatcttcattacagtggtggactcaaggtcccttcggactgatgcgctattgggcgaattcagaatggatgtgggtaccatctaccgggaacctcgccacgcctacctgaggaaatggctcctcttgtccgacccagacgacttttctgcgggagcacgcggctacctgaagactagcctgtgcgtgttggggcctggagatgaggcgccactggagcggaaggatccgtcagaggacaaggaggacattgaatctaacctgctgcgacccacaggggtagcattgagaggtgcacatttctgcctgaaggtatttagagccgaggatctgccacagatggatgatgccgttatggataatgtgaaacagatcttcgggttcgagagtaacaagaagaacctagtggacccttttgtagaggtgagcttcgctggtaagatgctgtgctctaaaattctggagaagacagccaacccgcagtggaaccagaatatcaccctcccagcaatgtttccgtcgatgtgcgagaagatgaggattcggattatcgactgggaccggttgacacacaatgacatagtggccaccacctatctgtctatgtcaaagattagcgcacctggtggggagattgaggaggaacccgccggcgctgtgaagccctcaaaagccagtgatctcgatgactatctcggtttcctgcccactttcggcccctgctatatcaacctgtatggtagcccccgtgagttcactggctttcctgatccatatacagagctcaacacagggaaaggcgagggcgttgcttaccgtggccgactactgctctcactggagacgaaattggtcgaacattctgaacaaaaggtggaggacctgcctgctgatgatatcttgcgcgtggaaaagtatttaaggcggcgcaagtactctcttttcgctgctttctattcggcaacaatgctgcaagatgtggatgacgctattcagttcgaggtcagcatcgggaattacgggaataagttcgacatgacctgtctgccgctcgctagcaccactcaatattccagagccgtcttcgatggctgtcattattattaccttccctggggcaacgttaagccggtcgtggtgctcagtagctactgggaagatatcagtcatcggatcgagactcagaatcaactcttaggcatcgctgacaggttggaagctggacttgagcaggtacacttagcattgaaagctcaatgtagcacagaggacgtggattccttggttgcacaactgacagatgagttaatcgccggctgctcccagcccctgggagacattcatgagacccccagcgctacacatttggaccagtacctgtaccagctgaggactcaccatctgagtcagataaccgaagctgctttagcgctaaaacttggccacagcgaactacccgcagcactcgagcaggcagaggactggcttctgcgcctcagggccctcgcggaggaaccccaaaattcactgcccgacatcgtaatttggatgttgcaaggagacaagagagtcgcctaccagcgagtgcccgcccatcaagtactgttcagccgtcggggtgccaactattgcgggaagaactgtggaaagctgcaaacaatctttctcaagtatcctatggaaaaggtacccggcgctcggatgcctgtccagatcagagtcaaattgtggttcggcctgtccgtggacgagaaagaatttaatcagtttgctgaggggaaactgtcagttttcgcagagacctacgaaaacgagaccaagctcgcactcgtcggcaactggggtacgactggccttacctacccaaaatttagcgatgtgactggaaagattaagctgccaaaggattccttcaggccatctgctggctggacatgggcgggcgattggttcgtgtgcccggaaaaaactctgctacatgatatggacgcgggacacctcagtttcgtggaagaggtgtttgaaaatcaaacccgcttgcctggcgggcagtggatttatatgtccgataattataccgacgtgaacggtgagaaggtcctacccaaggacgacattgagtgccccctaggctggaagtgggaggacgaggaatggagcacagatctgaaccgggccgtggacgaacagggttgggagtactccatcaccattcctcctgagcgaaagccgaaacactgggtgccggcagaaaagatgtattatactcacagacggcgtcgatgggtgcgcttgagaaggcgggacctgagccagatggaggctttgaaacggcaccgccaggctgaggctgagggagagggatgggagtacgcatcgctattcggatggaaattccaccttgagtacagaaagaccgacgcctttcgaagacgacggtggcgccgcagaatggaacctctcgagaagacagggcccgccgctgtgttcgcactggaaggcgcattaggcggagtgatggacgataaatcggaggactccatgtctgtctctacattgtccttcggagtgaacaggcctactatcagttgcattttcgattacggcaatcggtatcacctacgttgctacatgtatcaagctcgggatctcgctgctatggacaaggattcttttagcgatccatacgctatcgtgagcttcctgcaccaatcgcagaaaaccgtggtcgtgaaaaataccctcaacccaacttgggaccagactctcatcttttatgagatcgagatcttcggggaacctgccactgtcgccgaacagccgccgagtatcgtggtcgagctatacgaccacgacacttatggcgctgacgagtttatgggccgctgtatttgccagccttccctagagcgtatgccacgactggcgtggttcccactgactagaggttcccagcccagcggcgaattacttgccagcttcgaactgattcagcgtgagaagccagccattcatcacatacctggatttgaggtgcaagagaccagccgtatcttggacgaaagtgaggatacagatctcccttaccccccccctcaacgagaggcaaacatctacatggtgccacaaaatatcaagccggcattgcagaggactgctatcgaaatccttgcttgggggctgcgcaatatgaaatcgtatcagctagctaacatttcatccccatctctggtggtggagtgcggagggcagacggtgcagtcatgtgttattcgcaatctgaggaaaaacccaaatttcgacatttgcaccctgtttatggaggtgatgctcccgcgggaggaactatattgcccccccatcacagtgaaggttatcgataacagacagtttgggcgtcggccagtcgtgggtcagtgcactatccgatctcttgaatcctttctgtgcgatccgtattcagccgagtcaccaagtccccagggtggccctgacgatgtgagcctcctgagccccggagaggatgtcctcatcgacatcgatgataaggaaccactcattccaattcagctagctgatggcctgtctagcctagcgccaacgaacacggcctctcccccttctagcccccatgaagaagaatttattgactggtggagcaagttttttgcctctataggagagcgcgagaagtgcggcagctaccttgaaaaagactttgataccctcaaagtgtatgacacccaattagaaaacgttgaggcattcgagggactcagcgatttttgcaatacatttaagctctacaggggcaagacccaggaagaaaccgaggacccctctgtgattggagagttcaaaggccttttcaaaatctatccactgcccgaggatccggcaattcccatgcccccaaggcaattccatcaacttgctgctcagggccctcaggagtgtctggtgcgcatctatatcgttcgcgcattcggccttcagcccaaagacccaaatggtaaatgtgatccgtacattaaaatctcaatcgggaagaagagcgtgtcggaccaagataattacatcccttgcacgttagagccagtgttcggaaaaatgtttgaactgacgtgcacgctgcccctggaaaaggatcttaagattactctgtatgattacgacttgctgagcaaggacgagaaaatcggcgagacagtcgtcgacctcgagaacaggcttctttctaagttcggcgcgcgatgcggcctcccacagacttattgcgtgtcagggcccaatcagtggcgcgatcagctgcgtccatcccagctgttgcaccttttttgtcagcaacacagagtgaaagcccccgtctaccggaccgatcgcgttatgtttcaggataaggaatactccatcgaggagatcgaggcaggacgcatccctaaccctcacttaggaccagtggaggaacgactggctttgcacgtcctgcagcagcagggcctggtcccggagcacgtcgagtctcgtcctctatactcaccccttcagcccgacatagagcagggaaaactgcaaatgtgggtcgacctcttcccgaaggccttaggacgacccggacctccatttaacatcactccacgaagagctagacgcttctttctgaggtgcatcatctggaacacccgagacgtgattctggacgacttgtccctgaccggagagaagatgtcagacatatacgtaaagggctggatgatcggcttcgaggagcataagcagaaaaccgatgttcactataggtcccttggaggggagggtaatttcaactggaggtttatctttcctttcgattacctgcccgcagaacaagtatgcactatcgcgaagaaagacgcattttggaggttggataagacggaatccaagatccctgctcgagtagtgtttcagatatgggataacgacaagttctccttcgatgactttctcggttcattacagctggaccttaaccgcatgccaaagccagcaaagactgcaaagaaatgctctttggaccagctggacgatgccttccatccagagtggttcgtgagtctgtttgaacagaagactgtgaaaggatggtggccgtgcgtcgctgaggaaggggaaaagaagatcctggctggcaaactggaaatgactctcgaaattgtggccgagtctgaacacgaagaacgcccagctggacagggcagggacgagcctaatatgaacccaaagcttgaggatcctcgtaggcccgacacctccttcctttggtttacaagcccatacaaaactatgaagtttatcttgtggcgacgattcagatgggctatcattctgtttattatattgttcattctgctcttgtttctggccatatttatttacgcgttccctaattatgccgccatgaaactcgtcaaacccttttcctag

SEQ ID NO: 2484 - DNA, 447 bp, synthetic construct
  misc_feature 1..447: note = source = /note="Description of Artificial Sequence: Synthetic coding sequence"
  source 1..447: mol_type = other DNA
atgggctatcctgaggtggaacgcagggagctcctcccggccgcagctcctcgggaacgcggtagccagggatgcggatgcggtggagcgccagctcgagctggtgaaggcaacagttgtctgttatttctggggtttttcggactttcccttgctctgcatctgctgactctttgctgttatcttgagcttcggtccgaacttcgtcgagagcgtggtgctgagagccgcctcggcggtagcggaaccccaggcaccagcggtactctgtccagcttgggaggcctggatcctgattcccccattacgtcacaccttggacagccaagtccgaagcaacagccattggaaccaggcgaggcggccttgcactccgactcacaagatgggcaccaggactttgattacataatctcattctcatacgggctgcagggcttctgctag

SEQ ID NO: 2485 - DNA, 1176 bp, synthetic construct
  misc_feature 1..1176: note = source = /note="Description of Artificial Sequence: Synthetic coding sequence"
  source 1..1176: mol_type = other DNA
atggggtatccggaggtcgagcggagggagcttctccctgctgctgcgcccagagagaggggatctcagggctgcggatgtggcggggcccctgcaagggccggcgagggaaactcatgcctattgtttctggggttctttggtctgtccctggctctgcacctgttgactttatgctgctatcttgaactgagatcagaacttaggagggagcggggggccgaatcacgtctgggaggctcaggcactcccggaacttctgggacactgtctagccttggcggcctcgacccggacagcccaattacatcccatttgggccaaccatctccgaaacaacagcctctcgagccaggtgaggccgccctacatagtgactcacaggatgggcaccaaatggcactactcaattttttttttcctgacgaaaaaccatactcggaggaagaaagtagaagggtaagacgtaacaagaggtcaaaatctaatgaaggcgccgatgggccggtgaaaaataagaagaagggaaagaaagccgggccccctggcccaaatggtccccctggtccacccggacctcccggcccccagggtcctcccgggattcctggcatccctggaataccgggaacaaccgtgatggggcccccgggaccccctggacctccagggccccagggaccccccggactccagggtccctcaggggcggcagacaaggccggtaccagggagaatcaaccagccgtcgtgcacttacaggggcaggggagcgctatacaggttaagaacgacctgagcgggggggtcctgaacgactggtcaagaatcactatgaacccaaaggtattcaaactccacccccgatccggagaattggaagtgctcgttgacggcacctacttcatatacagccaggtcgaggtgtattacataaatttcaccgattttgcgtcctatgaagtcgtagtggatgagaagccttttctccagtgtaccaggtcaattgagaccggtaagaccaactacaacacctgctatacggcaggtgtgtgtctgctgaaagcaaggcagaaaatcgccgtaaagatggttcacgcggatattagcatcaatatgagcaaacatacaacatttttcggggctatcaggctgggggaagcacccgcttcttag

SEQ ID NO: 2486 - DNA, 1170 bp, synthetic construct
  misc_feature 1..1170: note = source = /note="Description of Artificial Sequence: Synthetic coding sequence"
  source 1..1170: mol_type = other DNA
atgggctatccagaggttgaaagaagggagctgctccctgccgccgccccacgtgagagagggtcccaagggtgcggctgcggaggggctcccgcccgggctggcgagggcaattcatgcctgttatttttgggtttcttcgggctgtctttggccttgcacctgctgaccctgtgctgctatctggagctgaggtctgagctgaggcgcgaacggggcgccgagagtcgcctcggaggctcagggaccccgggcaccagcggtaccttatcctctctgggcgggctggacccggatagcccaattacatcccatcttggtcagccttccccgaaacagcagccactagagcccggcgaggctgcactccattccgacagccaggacggtcatcagatggcccttctgaacttcttctttccggacgagaaaccttacagcgaagaagaaagcagaagggtgaggaggaacaagaggagcaaatctaacgagggggccgacggcccagtcaagaataagaagaagggtaaaaaggctggaccccctgggcctaatgggccccccgggccgcccggaccgcccggccctcaaggcccgcctggcatcccaggaattccaggcataccaggcaccaccgtgatgggcccacccggacctccaggtccacccgggcctcagggtcccccaggcctgcaggggcccagcggagctgcagataaggcgggaacccgagaaaaccagcctgccgttgtgcacctccagggccaaggctccgccatccaagttaaaaacgacttgagtggaggagttttgaacgactggtctcggattaccatgaatccaaaggttttcaaacttcacccaaggagtggcgagctggaagtgctcgtggacgggacatatttcatttactctcaggtatattatattaactttacggacttcgcgtcctatgaggttgtggttgacgagaagcccttccttcaatgtacccgcagtatcgaaaccggcaagacaaattacaatacttgctacaccgctggtgtgtgtctactgaaggcaagacagaagattgccgttaaaatggtccacgccgacatttctatcaatatgtcaaaacataccaccttttttggtgcaatccgcctcggtgaagcccccgccagttag

SEQ ID NO: 2487 - DNA, 408 bp, synthetic construct
  misc_feature 1..408: note = source = /note="Description of Artificial Sequence: Synthetic coding sequence"
  source 1..408: mol_type = other DNA
atggggtaccccgaagtggaaaggcgcgagctgctgcccgcggccgctcctcgagagagaggctctcagggatgtggctgcggtggcgctcctgctagggcaggggagggcaattcctgccttttgttcctgggctttttcggcctgtctctggcactgcacctgctcaccctgtgctgttacctggaattgaggagcgagctgcgacgagaacgcggggccgagtctaggctgggtggaagcggcactcccggcacctcaggcaccttgtccagtctgggaggtctcgacccggatagcccgatcaccagtcatttgggccaacctagccccaaacagcagccactggaaccaggtgaggcagccctccactccgactcccaggacggacaccagggacaccaatag

SEQ ID NO: 2488 - DNA, 1161 bp, synthetic construct
  misc_feature 1..1161: note = source = /note="Description of Artificial Sequence: Synthetic coding sequence"
  source 1..1161: mol_type = other DNA
atgggatatcctgaagtggaacgtagagagctgctcccggccgccgctcccagagagcgggggtcgcagggatgcgggtgcggcggtgcccccgcacgcgccggcgagggaaattcctgcttattattcctcgggttcttcggtttaagtctcgccttgcatctccttaccttgtgctgctatttagagctgaggtctgaactgaggagggaaaggggcgcggaatcacgcttgggaggatctggaactcccggaacctcagggactctatcctccctgggcggacttgatccagacagcccaataaccagccaccttggccagccaagccctaaacagcagcccctggagccaggcgaagcagctttacacagcgatagtcaagacggacatcagatggccttgctgaattttttcttccccgacgagaagccatactccgaggaggaatctcgtagggtccggagaaataagcgctctaagtctaacgaaggggcagacggccccgtcaaaaacaagaaaaaaggaaagaaggccgggccaccagggcccaacggcccccctggcccaccaggtccccctgggccccaggggccacctggaatccccgggattccaggaatccccggcacaacagtgatgggccccccagggccccctggtcccccgggcccccagggtccaccaggcctccaggggccgagcggagcagcggataaagccggtacgcgagagaaccagcctgctgtggtccacttgcagggccagggcagcgctatccaagtgaagaatgggggggtacttaacgactggtctcgcattaccatgaatcccaaggtttttaagttgcacccaaggtccggtgagttggaggtcctcgtggacggaacgtattttatctatagtcaggtgtactatatcaactttaccgactttgccagctatgaagtggtggtcgatgagaaaccgtttctgcaatgcacgcggtccatcgagactggaaaaaccaattataatacatgttacactgctggtgtttgcctgttaaaggcacgacagaaaatagctgtgaagatggtgcacgctgacataagcataaacatgagtaaacacaccaccttttttggagcgattaggctcggcgaagctcccgcttcctag

SEQ ID NO: 2489 - DNA, 447 bp, synthetic construct
  misc_feature 1..447: note = source = /note="Description of Artificial Sequence: Synthetic coding sequence"
  source 1..447: mol_type = other DNA
atggggtatcccgaagttgaaagaagagagctcctcccagctgcagccccacgtgagcgcgggagccagggatgtggatgcggcggagcacccgctagagcaggcgaaggtaactcttgtttattgtttctggggttttttggcctgtcactagccctccatctgctgaccctatgctgctatctggaactgcggtcagaactgcgcagggagcggggagctgagtctcgtttgggagggtccggcacaccggggacctccgggaccttatcctctctggggggacttgaccccgacagcccaatcacgtcgcatctcggtcaacccagtccaaaacagcagccactagaacccggtgaggctgctctacattccgattcccaagacggccatcaggactttgattacatcatttcattctcctacggattgcagggcttttgctag

SEQ ID NO: 2490 - DNA, 3429 bp, synthetic construct
  misc_feature 1..3429: note = source = /note="Description of Artificial Sequence: Synthetic coding sequence"
  source 1..3429: mol_type = other DNA
atgttagtgctccggtgccggctaggaacatcgttccctaagctggacaatttagtgcccaagggaaagatgaagattctcctcgtgtttctgggcctactgggcaacagcgttgccatgcctatgcacatgccacggatgccgggtttcagttccaaatcagaggaaatgatgcgatataaccagtttaactttatgaacggcccacatatggcccatctgggccccttttttgggaatgggctacctcagcaattcccccagtatcagatgcccatgtggcctcaacccccacctaacacatggcaccctcgtaagagttcggcacccaagcggcataacaagactgaccaaacccaggaaactcaaaagcccaaccagacacagtccaaaaaacccccacagaaaagacccctgaagcagccgagtcacaaccagccccaaccagaggaggaagctcaaccaccccaggccttcccccctttcggcaatggattgttcccataccaacaacccccttggcagataccacaacgtttacctcctcccgggtacggccggccccccatctccaacgaggaggggggaaatccttacttcggctatttcggatatcacgggtttggtggtcgccccccctactacagcgaggagatgttcgagcaggattttgagaagcccaaggaagaggaccctccaaaagctgaatcccctggcaccgagcccacggccaacagcacggtcactgaaaccaacagcacacaacccaatcctaaagggtctcaaggcgggaacgatacttcacccacggggaacagcacgcctggcctcaacactggcaataaccccccagcccagaacgggattggtccacttcctgccgtgaacgcctcggggcagggagggccgggcagccagattccctggcgccctagtcagccgaatatccgagagaaccatccctatcccaatataaggaactttccatccggtcggcagtggtattttacaggtaccgtcatggggcaccgccagaatagaccattctacaggaaccagcaggttcagagaggtccccgttggaacttttttgcctgggaacggaagcaggtagccagacctggaaacccagtttaccacaaagcatacccgcccaccagtcgaggcaactaccctaattacgcaggcaatccagcaaatttgcgcagaaagcctcagggccccaacaagcaccctgttggcacaaccgttgccccccttggtccaaagcccggtcctgtcgtcagaaatgagaaaatacagaacccgaaggaaaaacccctgggcccaaaagagcagatcatcgtgcccaccaagaatcccacttctccttggcggaactcccagcagtacgaggtgaataaatctaattataagttacctcactctgagggctacatgcctgtgccaaacttcaactccgtggatcagcacgaaaactcatattacccaaggggcgactcgcgtaaagttcccaactctgacgggcagacccaatcccagaatttgccaaaaggtatcgttctgggctctcgaaggatgccatacgagtccgagaccaatcagagcgagttgaagcattccagctatcagccagctgtgtatcccgaggaaatcccatcccccgctaaggaacactttccagccgggcgtaacacatgggatcaccaggaaataagcccgcctttcaaagaggaccctggccgtcaggaggagcatctgccacatcccagccacggatcccgcgggtcagtgttttatccagagtacaacccttatgatccaagagaaaactccccttatctgcgcggaaacacttgggatgagagggatgacagtcctaataccatgggtcaaaaggagtcacccctgtaccctattaacacccccgaccagaaggaaatcgtgccatataatgaagaggacccagtggatccgaccggagatgaggtgtttcctgggcagaataggtggggtgaagagctctccttcaagggtggccctactgtgcgacattatgaaggcgagcagtacacctcgaatcagcctaaagagtacctgccctactcattggataatccctctaagcccagagaagatttttactattccgagttttacccttggagtcccgacgagaattttccgagctacaacaccgcatcaaccatgcccccacctatcgagtctagaggctactatgtgaacaatgccgccggtccggaggagagtacactgtttccatcccggaactcctgggaccatcgcattcaggctcagggccagcgggaaagaaggccctacttcaataggaatatatgggatcaggcgactcatcttcagaaggcccccgcccggcctcctgaccagaaggggaaccagccatactattccaacactcccgccggcctgcagaagaatcctatttggcatgaaggcgagaatttaaattacggaatgcaaattaccaggatgaactccccagaaagggagcactcctcctttccaaattttattcccccaagctatccaagtggacagaaagaagcccatttgtttcatctatcacagcggggttcttgctgtgcgggtagcagcactggccctaaggataacccactggcgcttcaggattatacgccctcctacggactggctcctggtgaaaaccaggatacctccccactgtatacagacggaagtcatactaagcagactcgggacatcattagcccaacatccatactccccggacagaggaacagcagtgagaagagagagtcccagaacccctttcgagacgacgtaagcacgctgcgacgaaatacaccctgttctattaaaaatcaattggggcagaaagaaatcatgcccttccctgaggcttctagcctccagagcaagaatacaccatgtctgaagaatgacctgggcggcgatggcaataatatccttgaacaggtgttcgaagacaatcagctgaatgagaggaccgtagacctcacacccgaacagctggtgataggtacgcccgacgaaggatccaaccccgaggggatacaaagccaagtgcaggaaaacgagtccgagaggcagcaacagcgaccatccaatatacttcatttgccttgtttcgggagtaagctagcaaagcaccactcctccaccacgggcactcccagctccgatggtaggcagtcccctttcgacggcgactctataacaccaaccgagaaccccaacaccctggtcgagctagctacagaggagcaattcaagtctataaacgtggaccctttggatgctgacgagcactccccttttgagttcttacagcgaggtacaaacgtccaggaccaggtgcaagactgcctcttattgcaggcctag

SEQ ID NO: 2491 - DNA, 582 bp, synthetic construct
  misc_feature 1..582: note = source = /note="Description of Artificial Sequence: Synthetic coding sequence"
  source 1..582: mol_type = other DNA
atgggcgtgcacgaatgtcccgcctggttgtggctgcttctatctttactcagtctgcctctgggtctgcctgtactgggcgcaccacccagacttatatgcgactcccgggtactcgaacggtaccttcttgaagcaaaagaggctgagaacataactaccggatgcgctgagcactgcagcctcaatgagaacattacagtaccggatacaaaagtgaatttctacgcatggaagaggatggaggtgggacaacaggcagttgaggtctggcaggggctggcgctgctgtcagaggcagtcctaagaggacaggcgctcctggtgaactcgagtcagccatgggaacccttgcagctccatgttgataaggccgtcagcggattaagaagtctcaccaccctcctcagggctctgggagcgcaaaaggaggccataagcccgccagacgctgccagcgcagcgcccctcagaactatcaccgctgatacatttcgtaagctgttccgcgtctacagtaacttcctgcgagggaagctcaagctatacacaggtgaagcttgtagaacaggcgaccgctag

SEQ ID NO: 2492 - DNA, 192 bp, synthetic construct
  misc_feature 1..192: note = source = /note="Description of Artificial Sequence: Synthetic coding sequence"
  source 1..192: mol_type = other DNA
atgccatcttcagtgtcctggggcattctgctgcttgctggactgtgctgccttgtacctgtctccctcgcccatggcgaggggactttcacatctgatctgagtaagcagatggaggaagaagcagtcaggctattcatcgagtggttgaaaaacggggggcccagttccggcgctccgcccccttcctag

SEQ ID NO: 2493 - DNA, 1050 bp, synthetic construct
  misc_feature 1..1050: note = source = /note="Description of Artificial Sequence: Synthetic coding sequence"
  source 1..1050: mol_type = other DNA
atggaagctgtcaaggctgaagcttgggagggcgcagcagtggctcaagacctactggctttgggttatggtggtgtaccaggagctgcctctcgcggagcctcttgccccgactttcgggggctgtgtgtgagactggcggccgagctggccacactaggagcactggagcaacagcgggaagccggggccgaggtgctttctgccggtgacggcccaggggccgaggaggactttctccgtcagctgggaagcttactccgggagctgcattgtcctgaccgggcattgtgtggcggagacggggctgccgccctccgcgaacctggagccgggctgcggctcctcaggtttctgtgctctgagcttcaagccactcgcctgttgtgtcttcggtccctcctggatccctcaccgcgtccaccgttgggcgaaggggtcgtagagggggccggaatggtgcaggagttggatctgacgctacaggctctgggtctcccacgcccagccccaggaacaccagcctcacagctgcttcaggaacttcacgcaaaaattagcgaactgcaaccgtccctccctcccggatctctgcagcccctgctttcatgctcccttgacgcgccaaggtgggaagcattagaatccctatcgcagagcctgagagatcagtatagatgccggcgatgtcttctgctgaagcgcttggatctgacaacctcagctttccactggagcgatagagctgaggcccaaggggaggccatgcgggccgtcctcatcccaataagggaggtcctcactcccgagagtgatattagtattgctcacgtactggctgcaagggccgatttatcttgtcttgtcccggccacctcagtagctgtgagaagaggcacctgctgcgccataaacaaagtgctcatgggcaacgtgcccgataggggaggcaggcccaacgaacttgaaccaccgatgcctacttggcgctcacgccgagaggatggtggcccacagtgttggggacgcaagaagaaaaagaaaaaatag

SEQ ID NO: 2494 - DNA, 804 bp, synthetic construct
  misc_feature 1..804: note = source = /note="Description of Artificial Sequence: Synthetic coding sequence"
  source 1..804: mol_type = other DNA
atggaggcagtaaaggctgaagcatgggagggggctgcagttgcccaagacctcctcgccttaggctatggtggtgtcccaggggcggcgagccggggggcctcctgtcccgattttcgaggactgtgcgtgagactggcagccgagctggctaccttaggcgccctggagcagcagcgagaggccggagccgaggttttgagcgcaggagacggcccaggggccgaagaggatttcctgaggcagctgggtagtttattgcgggagctccattgtcctgacagggcactgtgcggtggggacggagcagcagctctgagagagccgggagctggcctgcgtttgctgcgtttcctttgttcagagcttcaggctactagacttctctgtctcaggtccctactcgaccctagccctagaccaccactcggtgagggggttgtggagggggccgggatggtacaggagctcgacctcactctccaggcgttgggcttgccccgccctgctccaggtacgcccgcgagccagttacttcaagagctacacgccaaggaggccttggagagtctgtcccagagcttgagagaccaatatcgatgccgtaggtgtcttctgctgaaacgtctggacctgactacatcggcattccactggtcggatagagctgaggtgctcatgggtaacgtaccggatcgaggcgggcggcctaacgagctggaacccccaatgcccacttggcggtcgcggcgtgaagatggtggtccccagtgctgggggcgcaaaaaaaaaaagaagaagtag

SEQ ID NO: 2495 - DNA, 2601 bp, synthetic construct
  misc_feature 1..2601: note = source = /note="Description of Artificial Sequence: Synthetic coding sequence"
  source 1..2601: mol_type = other DNA
atgttttccatgaggatagtttgtctagtcctttcggtggtgggtactgcctggaccgcagacagcggcgaaggcgacttccttgccgagggcgggggggtccgcgggccaagagtcgtggagcgacaccaaagcgcctgcaaggatagtgactggcccttttgttctgacgaagattggaattataagtgtccctccgggtgcaggatgaaaggcctgattgacgaggtgaatcaggatttcactaataggatcaataagctcaaaaactcgttgtttgaataccagaagaacaataaagacagccactcattaaccaccaacatcatggagatcctacgtggcgactttagtagcgcgaataatcgtgacaacacctacaaccgagtctcagaagatcttagatcaaggattgaggttctcaaaaggaaggtgattgagaaggttcaacacattcagcttttacagaagaacgtaagggcacagctcgtggacatgaagaggctcgaggtcgacatcgatattaagatcagaagctgcagaggctcatgcagccgcgctctggcgcgggaagtggaccttaaggactacgaagaccagcagaaacagctggaacaggtgattgcaaaagatctgctgccatcgcgtgatcgccagcatctgcctcttatcaaaatgaaacccgtacctgacctggtgcctgggaacttcaaaagtcaattacaaaaggtgcccccggagtggaaagccctcacggatatgccccagatgagaatggaactggaacgacctgggggtaatgagataacacggggtggttccacatcctatggtactgggagcgaaacagaaagcccgcggaaccccagctccgcggggtcctggaattctggatcctccggaccaggatccactgggaatcgcaaccccgggtccagcggtactgggggcaccgcgacctggaaaccaggaagttcagggcccggaagcaccggtagttggaattccggaagttctggtactgggtctaccggcaatcaaaacccgggcagcccgcggccaggatccacagggacatggaaccccggcagtagcgaaagaggctcagccggccattggacctctgagtccagtgtgtccggcagtacgggacaatggcacagcgagtctggctcctttcggcctgattctccaggatccggcaacgcccggcctaacaacccagactgggggacttttgaggaagtttcaggcaatgtctctcccggaacaaggagagagtaccataccgaaaaacttgtgacgagcaaaggcgataaggagctccggacaggcaaggagaaggtgacctcggggtcgacaaccactactaggcgctcttgctcaaagactgtgaccaagacagtcataggcccggacgggcacaaagaggtgactaaggaagttgtaacaagcgaggatggatctgactgccctgaagcgatggacctgggaactctctctggcatcgggacattagatggctttcggcatagacacccagacgaggctgcatttttcgacacagcgtcgacgggcaagaccttccctgggttcttttcgcctatgctgggcgagttcgtcagcgagacagagtctcgcggaagtgaaagtggaattttcacaaatacaaaagagtcaagttctcatcaccctggtatcgctgagttcccaagcagaggcaaatcctcatcatattccaagcagtttacgtcctccacaagctacaatcgtggggattccacgtttgagagcaaatcttacaagatggccgatgaagctggatctgaagccgatcacgaaggtacacacagcacaaagcgcggccacgccaaatcacgccctgtgagagattgcgatgatgtgctgcagacacacccgtccgggacgcagtccgggatcttcaatattaagctccccggctcctcaaagatattctcagtttactgcgatcaggagacgagcttaggaggttggctgttgattcaacagcgaatggatggctcacttaactttaaccgtacgtggcaggattataagcgtggattcggcagcctcaacgatgaaggtgaaggcgagttctggttgggtaacgattacctacatcttctgacccaacgggggtctgtcttgagggtggagctggaagattgggccggtaacgaggcctacgcagagtatcactttagagtgggtagcgaagccgaaggctacgccctccaggtcagctcgtatgaaggtacagccggcgatgcattaatcgagggaagcgtggaagagggagccgagtatacctcccacaacaacatgcagttctccactttcgaccgtgatgctgaccagtgggaggaaaactgtgccgaggtttacggcggggggtggtggtataataactgtcaggcagcgaacctgaacggcatctattatcctggaggaagctacgatcctcgaaacaattcaccatacgagatcgagaacggagtagtgtgggtgtccttccgtggcgctgattattctctgcgcgccgtccgaatgaagatcagaccacttgtgacccaatag

SEQ ID NO: 2496 - DNA, 1935 bp, synthetic construct
  misc_feature 1..1935: note = source = /note="Description of Artificial Sequence: Synthetic coding sequence"
  source 1..1935: mol_type = other DNA
atgttttccatgcggattgtttgcttggtgctatccgtagtgggcacggcatggacagcagattctggcgaaggagactttctggccgagggtgggggagtacgaggcccccgcgtcgtggagagacaccagagcgcttgcaaggacagcgattggcccttttgcagtgacgaggactggaactacaagtgtccgtctggctgtcgcatgaagggccttattgatgaagtgaatcaggatttcacaaatagaatcaacaagttgaagaacagcctctttgaataccagaagaacaataaggacagtcacagtctgacaaccaacatcatggagatcctaaggggcgacttcagtagcgctaacaatcgtgacaatacctataatagggtgtcagaagaccttagatctcggatcgaagttctcaagcgcaaggtcatcgagaaggttcagcacattcagctgctacaaaagaacgtgagagctcaacttgttgacatgaagagacttgaagtagacatcgatattaagattaggagttgtagagggtcatgttctcgggctctcgctagagaagtggatttaaaggactacgaggaccaacagaagcagctcgagcaagttatagcaaaagatctgctccccagcagggaccggcagcatcttcccttgattaagatgaagcccgtccccgacctggtgccaggtaatttcaaatcccagttgcagaaggtgcctcccgaatggaaagccctgactgatatgccccagatgagaatggagttggagagacccgggggcaatgaaattactcggggcgggtccacctcatatggaaccggatctgagaccgagtcacccaggaatccatcttcagcaggttcatggaactctggctcatcaggccccggaagtacagggaacaggaaccctggatcaagcggcacgggcggcactgccacttggaagcctggttcttctgggcctggctcaaccggctcctggaattctggttcttcagggaccggatcgacgggaaaccaaaatccagggagccctagacccggatccactggcacctggaacccaggaagctccgagaggggtagcgcggggcattggacatcagagagttccgtgtcgggatccaccgggcagtggcatagcgagtcaggctccttccggcccgactcacctggatctggaaatgcccggccaaataacccagactgggggacatttgaggaggtctctggaaatgttagccctggtacacggagagagtaccatacagaaaaactcgtgacatcaaagggagacaaggagctgcgaaccgggaaagagaaagtcacttcaggtagtactacgacaacccgccgatcatgttccaaaacagtgacaaaaactgttattggtccagatgggcacaaggaagtaacaaaggaagtcgtgactagcgaggatggttccgactgccctgaagctatggacctgggtaccttgtctggcatcggtacgcttgacggcttcagacaccgccacccagatgaagccgccttcttcgataccgcgtccaccggtaagacgtttcctggctttttctccccgatgttgggagaattcgtgtcagaaacagagtcccgcgggagcgaaagcgggattttcactaacacgaaagaaagcagttctcatcatccgggcattgccgaattcccaagcaggggcaagagcagctcctattcaaaacagtttacaagtagcacttcatataaccgcggggattcaacctttgagtccaagagttataaaatggctgacgaagctggatccgaagctgatcacgagggcactcatagcaccaagcgcggacacgccaagagcaggcccgttagaggtatccatacctccccactaggtaaacccagcttgtcaccttag

SEQ ID NO: 2497 - DNA, 870 bp, synthetic construct
  misc_feature 1..870: note = source = /note="Description of Artificial Sequence: Synthetic coding sequence"
  source 1..870: mol_type = other DNA
atgttttccatgaggatcgtatgtctggtcctcagcgtggtgggtacggcctggacagctgacagtggagagggggatttccttgccgagggaggaggagttcgtgggcccagggtggttgaacgccaccagagcgcctgcaaagatagtgactggccattttgctctgatgaggattggaactataaatgtcccagtgggtgccgaatgaaaggcctcattgatgaggtgaaccaggactttacgaacagaattaataaactcaagaactcattgttcgaatatcagaagaataataaggatagtcacagcttgacgacaaatataatggagatcctgagaggtgatttcagctcagcaaacaatagagataatacatacaatagagtgagtgaagatctgcgctcccgaattgaagtgctaaagcgaaaggtgatcgagaaggttcaacacatccaattactgcagaaaaacgtgagagctcagctggtggatatgaagagactggaggtggacattgacatcaagatccgttcttgtaggggctcttgctcaagagcattggcccgggaagttgacctgaaagattacgaagatcagcaaaaacaactcgagcaggtgatcgcgaaggatcttctacctgtcgtaaatttgcaggttacagccaataatctccttgtggcccgcgtgactacagaggagactcctcacctgaaagctagagcaataaagtggcagatgcggcctgaagtgaaacccattatgaaggagcacatcgcacccagagaggctatgctgaacctcgcactctctgaagtgtctactctactcctgtggggcagtctaccatgcccaccccgcctcagctag

SEQ ID NO: 2498 - DNA, 1476 bp, synthetic construct
  misc_feature 1..1476: note = source = /note="Description of Artificial Sequence: Synthetic coding sequence"
  source 1..1476: mol_type = other DNA
atgaaacggatggttagttggtcttttcacaagcttaagaccatgaaacacttactgttacttctgctctgcgtttttctagtcaagtctcaaggcgtgaatgacaatgaagagggtttttttagcgctaggggccaccggccattggacaagaaacgggaagaggcccccagccttcggccagcaccccctcctatatccggcggcggatatagagctcgccctgcaaaagcggcggcaacacagaaaaaggtggaacgaaaggcaccagatgctggaggctgccttcatgctgaccccgacctgggagtactatgtccgaccggctgccaactgcaggaagccctactgcagcaggaacgacctattcggaattctgttgatgagctgaataataacgtagaagccgtgtctcagacgagctctagttctttccagtatatgtatcttctgaaggatctgtggcagaagcggcagaaacaggtcaaggataacgaaaatgtcgtgaatgaatactcttccgaactggagaagcatcagctgtacatcgatgagactgtcaacagtaatatccctacgaatctccgggttctgcgatctatattggaaaacctccggtcaaaaatacagaagcttgagagtgacgtttcagcccagatggaatattgtcgcacgccctgcacagtgagctgtaacataccagtagtctccggcaaggaatgtgaagaaattatccgcaaggggggcgaaacatctgagatgtatctgatccagcctgatagttccgtgaagccatacagagtatactgtgatatgaacactgagaacgggggttggacagtgattcaaaatagacaagatgggtcggtcgattttggccgcaagtgggatccatacaaacagggttttggcaacgtggccaccaacaccgacgggaaaaactattgtggactgcccggagaatactggttgggtaacgacaaaattagtcagctcacgaggatgggtcccaccgagctcctgatcgagatggaggattggaaaggggataaggtgaaggcccattatgggggcttcaccgtgcaaaacgaggctaacaagtatcagatttcggtgaacaaatatcggggaaccgcgggaaatgcacttatggatggagcatctcagctgatgggcgaaaatcgcacaatgacaatccacaatggcatgtttttttccacgtatgacagagacaatgacgggtggctgacctccgacccccggaagcagtgctcgaaggaggacggaggcgggtggtggtacaatagatgtcatgcagcaaatcctaacggtaggtattactgggggggccagtacacttgggacatggctaaacacggcacagatgatggcgtggtatggatgaattggaagggatcctggtacagcatgcggaaaatgtcgatgaaaatccggccatttttcccacagcagtag

SEQ ID NO: 2499 - DNA, 1425 bp, synthetic construct
  misc_feature 1..1425: note = source = /note="Description of Artificial Sequence: Synthetic coding sequence"
  source 1..1425: mol_type = other DNA
atgaagcgcatggtcagctggagcttccataaactcaaaacaatgaaacacctgctgcttctcctgctgtgcgtgtttctcgtcaaatcccagggagtaaacgataatgaggaagggttcttctccgcccgtggacaccgtccacttgataaaaaacgggaagaggcacgccccgcaaaggccgctgcaacccagaagaaagtcgagcggaaggcacctgatgcgggcggatgtctgcatgcggatccggacctgggagtgctctgcccaacgggatgtcaactgcaagaggctttactgcaacaggaacgcccgattcgtaactcagtggatgaattgaacaacaatgtggaagcggtcagccagacgtcttcctctagtttccaatacatgtacttactcaaggatctttggcagaagaggcagaagcaggtcaaagataacgaaaacgtggtcaacgaatactcaagcgaactggagaaacaccagctctatatcgacgagacagtgaattcgaacatacctacaaacctacgggtactgcggagtattcttgaaaacctccgttccaaaatccagaaattggaaagcgacgtctcggcacagatggaatactgccgaaccccctgcacagtgtcatgtaatatcccggtggtgtcggggaaggaatgtgaggagatcattagaaaggggggggaaacgtccgagatgtatctcatacaacccgactcctccgtgaaaccttaccgggtgtactgtgatatgaacacagagaatggcggctggactgtgatccagaacagacaagatggctcagtggacttcggaaggaagtgggacccttacaagcaaggcttcggaaacgttgccactaatacagatggcaagaactactgcggcctgcctggtgaatactggctcgggaacgacaaaatttcccagttaacacggatggggcctaccgaacttttaatcgaaatggaagactggaaaggagacaaagtgaaggcacattacggaggcttcaccgtgcaaaacgaggctaataagtaccagatctccgtgaacaagtacagaggcaccgccggcaacgctttgatggatggcgcttcccagctcatgggagaaaatagaacaatgacaatacacaatgggatgtttttttctacctatgaccgggacaatgatggttggctaacctccgacccaaggaaacaatgctcgaaagaggacggtggtgggtggtggtataatcgctgtcacgctgcgaacccaaatggtaggtattattggggtggccaatacacatgggacatggcaaagcatggcactgatgacggggttgtttggatgaactggaagggaagctggtacagcatgcgtaagatgtccatgaaaattcgacctttcttccctcagcagtag

SEQ ID NO: 2500 - DNA, 1362 bp, synthetic construct
  misc_feature 1..1362: note = source = /note="Description of Artificial Sequence: Synthetic coding sequence"
  source 1..1362: mol_type = other DNA
atgtcctggtccctgcacccccggaacctcatcctttacttctatgcactcttgttccttagttctacgtgtgttgcttatgttgctacacgggacaactgttgcatactggatgagagatttgggagttattgtccgacaacttgtggcatagcggattttctatctacctatcagaccaaggtggataaagaccttcagtcgttggaagacatcctgcaccaggtggaaaacaagacctccgaggtgaagcagttaatcaaagcaattcagctaacctacaatcccgacgagtcatcaaagccgaacatgatcgacgcagcaacattgaagtcacgcaagatgctggaagagatcatgaagtacgaagcaagcatcctgactcacgacagttccataagatatctacaggaaatctataatagtaacaaccagaaaatcgtcaatttgaaagagaaagtggctcagctggaagctcagtgccaggaaccttgcaaagacaccgtgcaaatccacgatatcaccgggaaggattgtcaggacattgctaacaaaggggcaaagcagtctggcctttactttattaagccattgaaagcaaatcaacaattcctagtgtactgtgagatcgatggatcaggaaatggttggaccgtcttccaaaaacgcctggatgggagcgtggacttcaagaaaaactggattcagtataaggaggggttcggacacttgtctccgacaggcaccacagagttttggctgggaaacgaaaagattcacctgatcagcactcagagcgccattccttatgccctacgcgtggaactggaagattggaacggccggacatcaactgctgactatgccatgttcaaggtgggaccagaggccgataagtataggttgacttacgcatacttcgcgggtggcgacgccggagacgcgttcgacggctttgatttcggggatgatccctccgataaattctttacttctcataacggcatgcagttcagcacttgggacaatgacaacgacaagtttgagggcaactgcgctgaacaagatggatcagggtggtggatgaataaatgtcacgctgggcacctgaacggcgtgtattaccagggaggtacatattcaaaagcttccactcctaatggctacgacaacggcatcatatgggcaacttggaaaaccagatggtacagcatgaagaagactacaatgaaaataataccgtttaatcggctgactatcggagagggacagcaacaccatctaggcggcgcgaaacaggtgcgccccgaacacccagcagaaaccgaatatgactccctgtacccagaagacgacctgtag

SEQ ID NO: 2501 - DNA, 1314 bp, synthetic construct
  misc_feature 1..1314: note = source = /note="Description of Artificial Sequence: Synthetic coding sequence"
  source 1..1314: mol_type = other DNA
atgagctggagtttacacccacgtaatctcatcctgtatttttacgctctcctgtttctttcatctacgtgtgtggcatacgtagcaacgcgagataattgttgcattttggacgagcgtttcgggtcttattgtcctaccacttgcggcatcgcagatttcctgtccacctaccagactaaggtggacaaagacttgcagtctctggaggatatattgcaccaggtggaaaataagacttccgaagttaaacagctgatcaaggctattcagttgacatataaccctgacgagtccagcaagcctaatatgatcgacgccgcaacactgaaatctagaaagatgttggaggagattatgaaatacgaggccagcattctgacacacgattcctctatccggtacctgcaggagatctacaactctaataatcaaaaaatagttaatttgaaggagaaggtcgcgcagctcgaggcccaatgtcaagaaccgtgcaaggacacagtccagatccacgatatcacggggaaagattgccaagacattgcgaacaaaggcgctaaacaaagcggtctttacttcatcaagcccctgaaggctaatcaacaattcctggtgtactgtgagatagacggcagcggtaatggctggaccgtgtttcagaaacgactggacggcagcgtggatttcaagaaaaactggatccagtataaggaggggttcggccacttgtctcctaccggaactactgagttttggttgggtaacgagaagattcaccttatcagtacacagtcggcaataccttatgctctccgagtagaactggaggactggaatggcaggaccagtacagctgactatgccatgttcaaggttggtccagaggctgacaaatacaggctgacatatgcatacttcgcagggggggatgctggggatgcctttgacggattcgacttcggtgatgaccctagcgacaagttcttcacaagccataatggaatgcaattcagtacatgggacaatgacaacgataagttcgagggcaactgtgcagagcaggatggtagtggctggtggatgaataaatgtcacgctggccacctaaatggagtgtactatcaagggggtacatattctaaggcttccacgcccaacggatacgacaatggaataatatgggcaacttggaagacaaggtggtacagtatgaagaagacaacaatgaaaattattccgttcaaccgtctgactataggggaaggacaacagcatcatctggggggggctaaacaagctggcgacgtttag

SEQ ID NO: 2502 - DNA, 2892 bp, synthetic construct
  misc_feature 1..2892: note = source = /note="Description of Artificial Sequence: Synthetic coding sequence"
  source 1..2892: mol_type = other DNA
atgctttcaggggaacggaaggaaggcggatcgcctagattcggcaagctgcaccttccagtaggcctgtggatcaatagtcctaggaagcagcttgctaaattaggcagaaggtggccttcagccgcttccgttaaaagcagttctagtgataccgggagccgctcctcggagccgctgccacctcctcccccacacgtcgaactgcgtcgtgtgggcgctgtgaaggccgctgggggggcgtccggttccagagccaagcgtatctcacagctctttcggggatcgggcaccgggaccacaggctcgtcgggcgctggagggcccgggactcctggcggcgcgcagaggtgggcatctgagaagaagctgcccgaactggctgccggcgttgctcctgagccccccctggcgacacgcgcaaccgcgcctccaggagtgctgaagattttcggtgctggccttgcatccggggctaactataagtccgtgctggctaccgcccggagtaccgctagggaattggtagccgaggctcttgaaagatatggcctcgccgggagtccaggcggcgggcccggcgagagctcctgcgtggatgccttcgctctgtgtgacgctctgggccgcccagcagccgcgggcgtggggtctggcgagtggcgcgccgaacacctcagggtgctgggagacagtgagcgacctctgttggtgcaggagctctggagagcccgaccaggttgggcaaggcggttcgagctccgcggccgcgaagaggcccgcagactggagcaggaggcttttggcgccgcagattccgaaggcacaggcgccccctcatggagaccccagaagaacagatcccgcgctgccagcggaggcgcggccctggcatctccaggtcctggtacaggctcaggggcccccgcaggctcaggcggaaaagaaagatcagaaaatctatcactgcgcaggtcagtgagtgagctgagcctgcagggacgcagacgtaggcagcaggaaaggaggcagcaagcactgtccatggctccaggggcggcagatgctcaaataggaactgcggacccaggagatttcgaccagctcacccagtgtttaattcaggcaccatctaatcgtccatactttcttcttctgcaaggctatcaggacgcacaggactttgtggtatatgtaatgaccagggaacagcatgtttttggtagaggcgggaacagctccgggcgcggcggctcacctgcaccgtacgtggacacattccttaatgcccccgatattctgccacgccactgtacagtgcgtgccggtccggaacaccctgccatggtgagacctagcaggggagctccggtaacccacaacggttgcttactactgagggaggccgaactacaccccggggatttactcggactcggagagcacttcttgttcatgtacaaagacccccgcaccgggggatccggccccgctcgccctccctggcttcctgcccgccctggagcgacacctccaggcccggggtgggccttttcctgtcgcttgtgtggacgcggtctgcaagaacggggggaggccctggcggcttatctcgatggacgagagcccgtgctcagattccggcccagggaggaggaagctctcctgggtgagatcgtgcgcgccgctgcagccggaagtggtgatctcccgccactcggccctgcaacccttctcgccctgtgcgttcagcattctgcaagagaactcgagcttggtcacctcccccgtctcctggggagactagcgagattaattaaagaagccgtctgggaaaaaataaaagagatcggagaccgccagcccgaaaatcaccctgaaggtgtgccagaggtgcctctaacgccagaagcagtgtctgtcgaactgcgcccattaatgttgtggatggctaacacaacagagctgctctcattcgtgcaggagaaagtgttggagatggagaaggaagccgaccaggaggatccccagctgtgcaacgacctggagctatgtgacgaagcgatggccctgcttgacgaggttattatgtgcactttccaacagagcgtgtactatctgactaaaacgctgtattctaccttgcccgctctgctcgactcaaatccatttaccgccggagctgagttacctggcccaggagccgagctaggagcaatgcctcctgggcttcggccaacgctcggagtctttcaggcagcactcgagttaacctcccagtgcgaactgcatcccgatctggtgagtcagacattcggatacctctttttcttttcaaatgcctcgcttttaaacagtctgatggaacggggccaaggacggcccttctaccagtggtctcgcgccgtgcaaattaggactaatctggaccttgtgctggactggcttcaaggtgcaggactgggcgacatcgccaccgagtttttccggaaactctctatggccgtgaacctcctttgcgtcccccgcacctctttgctgaaagcttcttggtcaagccttcggaccgaccaccccaccctcacccctgctcagctgcatcatctgctgagccactaccagcttggacctggacgcggaccgcctgcagcctgggatcctccacccgctgaaagagaagccgttgacacaggtgacattttcgagagtttttcatcgcacccccctcttattctcccattgggcagcagcagactcagactgacagggccggttaccgatgacgcattgcatcgtgagttgaggagacttcgaagacttctgtgggacttggaacagcaggagttgccggccaactacagacacgggcctcctgttgccactagcccatag

SEQ ID NO: 2503 - DNA, 630 bp, synthetic construct
  misc_feature 1..630: note = source = /note="Description of Artificial Sequence: Synthetic coding sequence"
  source 1..630: mol_type = other DNA
atggattcggacgagacaggattcgagcactctggcctgtgggttagcgtattggccggcctgttgctcggggcatgtcaagctcaccccattcctgattcaagccctctactccaattcggcggtcaggtgaggcagcgatacctgtataccgatgatgctcaacagactgaggcccacttggagataagggaagacggaaccgttggtggcgccgctgaccagtcacccgagtctttgctgcagctgaaagctctcaaacctggagtgatccaaatcctgggggtgaagacatcccgatttctctgtcagcggcctgacggggccctgtacggaagcctgcactttgaccctgaggcgtgctccttccgggagttgctgctggaagacggctacaacgtgtaccagtctgaggcgcacggacttcccctgcacctccccggcaataaaagtccacatagggaccctgcgccacgggggcctgcaaggttccttcctctcccaggtttacctccagcgctgcccgagcctccaggcatcctggcacctcaaccgcctgatgtcgggtcatcagacccactgtctatggttggaccctcacagggacgctctccgtcctacgcgtcgtag

SEQ ID NO: 2504 - DNA, 321 bp, synthetic construct
  misc_feature 1..321: note = source = /note="Description of Artificial Sequence: Synthetic coding sequence"
  source 1..321: mol_type = other DNA
atgcttcgcttcattcaggaggttaatactaccactaggtcatgtgctctctgggacctggaagaggatactgagtatatagtccatgtacaggctatctccattcagggtcaatcccctgctagcgagcccgtcctgttcaagacgccgagggaggcagagaaaatggccagtaaaaacaaagacgaggtcactatgaaggagatgggaaggaaccaacagctgagaaccggagaggttttgatcatcgtagtggtgctctttatgtgggcaggagtgatcgcactgttctgtaggcagtacgatattatcgaagcttag

SEQ ID NO: 2505 - DNA, 414 bp, synthetic construct
  misc_feature 1..414: note = source = /note="Description of Artificial Sequence: Synthetic coding sequence"
  source 1..414: mol_type = other DNA
atgttacgcttcattcaggaggtgaacacaacaaccaggagttgcgctttgtgggaccttgaagaagacaccgagtacattgtacatgtccaggcaatcagcatacagggccaatcacctgcgtcagagccagtgctgttcaagaccccaagggaggcagagaagatggcatcaaagaataaggacgaggtgacgatgaaagagatgggcagaaaccaacagctgcggaccggagaggtgctgatcattgtggtggtgctcttcatgtgggctggcgtaatcgcactgttctgtagacagtatgatattatcaaagacaacgagcctaataataacaaagagaagactaaatccgccagtgaaacttccacccccgaacatcaggggggggggctgttgcgcagtaaaatatag

SEQ ID NO: 2506 - DNA, 390 bp, synthetic construct
  misc_feature 1..390: note = source = /note="Description of Artificial Sequence: Synthetic coding sequence"
  source 1..390: mol_type = other DNA
atgaagacactccaatttttctttcttttttgttgctggaaggccatttgctgtaatagttgcgagctgacaaatattaccattgcaattgaaaaagaggaatgtcggttttgtatatctattaacactacatggtgtgcagggtactgctacacacgcgatctcgtttacaaagacccggcccggcctaagattcagaagacctgtactttcaaggaactcgtttacgagacggttagagtacccggctgtgcccatcatgccgacagcctctacacctatccggttgctacccaatgtcactgtggaaagtgcgatagtgacagcaccgattgcactgtgagagggctgggtccatcctactgctcttttggagagatgaaagagtag

SEQ ID NO: 2507 - DNA, 390 bp, synthetic construct
  misc_feature 1..390: note = source = /note="Description of Artificial Sequence: Synthetic coding sequence"
  source 1..390: mol_type = other DNA
atgaagacactccagttcttcttcctgttttgctgttggaaggcaatttgctgcaattcatgcgaacttacaaacatcaccatcgccatagagaaggaggaatgtagattctgtatttcaattaatacaacctggtgtgccggttactgctacaccagggacctggtatataaggatccagctcgacctaaaattcagaaaacatgcacttttaaagaactagtatatgagactgtccgggtcccaggatgtgctcaccatgcagactcactgtatacctacccggttgcaacacaatgtcactgcgggaagtgtgatagtgatagcactgactgcacagtaagagggctcggtccgagctattgcagtttcggggagatgaaggaatag

SEQ ID NO: 2508 - DNA, 390 bp, synthetic construct
  misc_feature 1..390: note = source = /note="Description of Artificial Sequence: Synthetic coding sequence"
  source 1..390: mol_type = other DNA
atgaaaactttacagtttttcttccttttctgctgctggaaagctatttgttgcaattcatgcgagctgactaatattacaattgccatcgagaaggaagaatgcaggttttgcatttcgattaataccacgtggtgtgccggctactgctatacaagggatcttgtgtataaggaccccgcacggcctaagatccaaaagacttgtaccttcaaggaactcgtctacgaaaccgtgcgggtcccaggatgcgcccaccatgctgactcattgtatacttatcccgtggcgacccagtgccattgtggcaaatgtgactccgattcaactgactgtactgtgcgcggccttggcccctcctactgctcatttggagagatgaaagagtag

SEQ ID NO: 2509 - DNA, 1260 bp, synthetic construct
  misc_feature 1..1260: note = source = /note="Description of Artificial Sequence: Synthetic coding sequence"
  source 1..1260: mol_type = other DNA
atgtccttcatacccgtggccgaagatagtgacttccccatccacaacctcccatatggtgtgttctcaacccgtggcgatcctcgcccaagaataggggtagcgatcggggatcagatccttgacctcagtattattaagcacttgtttaccgggcccgtcttgagcaaacaccaggacgtgtttaaccagccaacactgaatagttttatggggctaggacaggcggcctggaaagaggcccgtgtttttctgcagaatttgttgtctgtatcacaggctcgcctgcgcgacgacacggaactgcgcaagtgcgcatttatttcacaggcaagtgccaccatgcacctccctgctacaattggtgactacaccgatttttactcgtcgagacagcacgcaaccaacgtcggaatcatgtttagggataaggaaaatgccctcatgccaaactggttacatctccccgtaggttatcatggcagggcctcttctgtggtcgttagtggaacaccaattaggcgacctatgggccagatgaaacccgacgactctaagccccctgtgtatggcgcatgtaaactactggacatggaactcgagatggccttcttcgtgggacctgggaatcggttgggcgaaccaatccctattagtaaagcccatgaacatatatttggcatggtcctcatgaacgactggagtgctcgcgatatccaaaagtgggaatacgtgccactcggcccattccttgggaaaagtttcggtactacggtctccccatgggtggtgcctatggatgcactaatgccttttgccgtgcctaaccccaaacaggatccacgcccactgccttatttgtgccacgatgagccatatacctttgatatcaacttgtcggtcaacctgaagggagagggtatgtcacaagccgccacaatatgcaagagtaacttcaaatacatgtactggacaatgttacagcaactaacccatcattccgtcaatggctgcaatttgagacctggcgatctactcgcttcgggcaccatttccgggcctgagcccgagaacttcgggtctatgctggagctgagctggaaggggactaagcccatcgatcttggtaatgggcagacccggaagttcctactggacggtgatgaggtgattatcacagggtactgccaaggcgatggctaccggattgggttcggccagtgtgcaggcaaggttcttcctgctctcctgccttcttag

SEQ ID NO: 2510 - DNA, 1260 bp, synthetic construct
  misc_feature 1..1260: note = source = /note="Description of Artificial Sequence: Synthetic coding sequence"
  source 1..1260: mol_type = other DNA
atgtcattcattccggtcgccgaagacagcgattttcccatccacaatctgccatacggagtctttagtacccgtggcgaccctagaccaaggataggcgtggctatcggcgaccagattctggatctttcaatcattaagcacctctttacagggcccgttctatctaaacaccaggatgtgttcaatcagcccacactgaattcctttatgggcttgggtcaggctgcctggaaggaggcgagagtgttcttacagaatctgttatccgtgagccaggctcggctgcgcgacgatacagagctaaggaagtgtgcatttatatctcaggcgagcgccaccatgcatctccctgccaccattggagattatacagacttctatagcagcagacagcatgccaccaacgtcggcataatgttccgggataaggagaatgcactcatgcctaattggcttcacctccctgttggctaccacggccgcgcctcttcggtcgtcgtgtctggcacccctattcgtaggcccatggggcagatgaagcccgatgattcaaaaccccccgtgtatggcgcctgtaagcttttggacatggagctggaaatggccttttttgtaggaccgggaaatagacttggcgaaccaattcctatctcgaaagcccacgaacacatctttggcatggtcttgatgaatgactggagcgctcgcgacattcagaagtgggagtatgtcccgcttgggccctttttagggaagtccttcggtaccaccgtgtccccttgggttgtgcctatggacgctctgatgcccttcgcggtgccgaatcccaagcaggatcccagaccactgccgtatctctgccatgatgagccgtatacctttgatataaatctgtctgtcaatctgaagggcgaaggcatgtctcaggctgctactatctgtaagtccaacttcaagtacatgtactggaccatgctccaacagctgacccaccattcagtgaacgggtgcaatctcagaccgggggatctgctggcctccggaaccatcagcggtcctgagccggaaaactttggaagcatgctggaactatcttggaaaggcactaaacccatagacctgggcaacggccaaactcggaagtttctgttagatggcgatgaagtgatcatcaccggatattgccagggtgatgggtatcgcattggatttggtcagtgtgcaggcaaggtgcttccggcactgctgccttcttag

SEQ ID NO: 2511 - DNA, 1260 bp, synthetic construct
  misc_feature 1..1260: note = source = /note="Description of Artificial Sequence: Synthetic coding sequence"
  source 1..1260: mol_type = other DNA
atgtccttcatacccgtggctgaggacagcgactttcccatccacaatctgccctacggggtttttagcactaggggcgatccacgcccaagaattggtgtagctattggggaccagatcctcgacttatccatcatcaagcacctctttactgggccagtgctgtccaaacatcaagatgttttcaatcagcctactttaaatagcttcatgggccttggacaggccgcctggaaagaagctcgagtttttctgcagaaccttctaagcgtgagccaggcaaggctccgcgacgacaccgagttacgaaagtgtgcctttatttcacaggcctctgcaaccatgcatctcccagccacaatcggcgactacactgacttttactcatctcgccagcacgcgacaaacgtcgggatcatgtttcgcgataaagagaatgccctcatgcccaactggctgcacctccccgtgggctatcacggcagagcctcttctgttgtggtttccggtacgccaattaggcggcctatgggccaaatgaaacctgacgattctaagcctcctgtctacggcgcatgtaagcttctggacatggagctggaaatggccttcttcgttggacctggtaatcgcctcggggagcccattcctatttccaaggcgcacgaacacatattcggaatggtgttaatgaatgactggtctgcccgggacatccagaaatgggaatatgtccccctgggcccttttttaggaaaatcattcggcactactgtatctccttgggtcgtgcccatggacgccctgatgcctttcgccgtgcccaatcccaaacaagatccgagaccccttccctatctatgtcatgacgagccttacacgttcgacattaatttgagcgtgaacttgaaaggcgagggcatgtctcaggccgctactatatgcaagtctaactttaagtatatgtactggacaatgctccagcagctgacacatcactccgttaacgggtgtaatttacgaccaggggatctgctagcaagtggaacgatttctggccccgagccagagaatttcggcagcatgctcgaactgtcctggaagggtactaaacctatcgacttaggcaacggccagacaaggaaatttctgttagacggcgatgaggtcatcatcactggatattgccagggggatggctacagaatagggttcggccaatgcgccgggaaggtcctccccgcccttctcccaagctag

SEQ ID NO: 2512 - DNA, 759 bp, synthetic construct
  misc_feature 1..759: note = source = /note="Description of Artificial Sequence: Synthetic coding sequence"
  source 1..759: mol_type = other DNA
atggaagctatgtggcttctctgtgtcgctttggccgtcctggcctggggcttcttgtgggtgtgggattcttcagagcggatgaagtccagggaacaggggggccgcctgggggctgagtcccgcactctcctggtaattgcccacccagacgacgaggcaatgttttttgctccaacggtgctcggactcgctcgtctgcgccactgggtgtacctcctgtgcttctccgctggtaattactacaatcaaggggagactcggaagaaggaactcttacagtcctgcgatgttctgggtatccccttaagtagcgtaatgattattgacaatagagattttccagatgatcccggtatgcagtgggacactgagcatgtggccagagttctgctacagcatattgaagttaacgggatcaacttggtcgtcacatttgatgctgggggcgtatctggacacagcaatcacatagccttgtacgctgcggtcagagcgctgcactctgagggcaaactgcccaagggctgctctgtgctcaccctgcagtcagtgaatgtgttaagaaaatacattagtctgctggatctgccgctcagcttgctgcacacgcaggatgttctctttgtgctcaatagtaaggaagtcgcacaggcgaagaaagccatgtcttgccacaggtcccagcttttatggtttcgaaggttgtacataatcttttccaggtatatgcgaattaattcgttgtccttcctgtag

SEQ ID NO: 2513 - DNA, 1203 bp, synthetic construct
  misc_feature 1..1203: note = source = /note="Description of Artificial Sequence: Synthetic coding sequence"
  source 1..1203: mol_type = other DNA
atggcggcattacgacagccacaggtggcagagctccttgccgaagcgcggcgggcctttagagaggagttcggagctgaacctgaactcgccgtgtccgcccccgggcgggttaatttgattggggaacacaccgactacaatcagggccttgtgctacccatgagggacagactattccccacgctcgagggaagaaagaggggatccggccgggaacgagtgcgggggaggctgctggcccaggctcgccctctgggcgccggcgcgccaaggctgcaaccagggtccatgtttcccctgaactgcgaggccttatgtgccacgcaaaagggcacattacgagctagcggccatcggggtgccccaactgcagatctcggagagcgatccctcctggctcaaccagtccagttcacagaagaagagaccggaggtgcatttagacccatctgttcccttgggtctgctcaggctagctctcctccatgccccaccgctcagggtcgagtccaggacggcctagtgtccctactcactacgtctgagggagctgacgaacctcagagactgcagttcccgctacccacagcccagcgatcactcgaacctgggacaccgcggtgggcgaactatgtgaaaggcgttatccagtattacccggcagcccccctcccaggatttagtgccgtcgtagtgagtagtgtgcccctgggcggggggttaagtagctccgccagtctggaggtggccacgtatacattccttcaacaactgtgcccggacagtggaacaatagcggccagggcccaagtctgccagcaggccgagcacagctttgccggcatgccgtgtggaatcatggaccagttcatatcccttatgggccaaaaaggccacgccctgctgattgattgcaggagcctggagaccagcctcgtgcctttaagcgatcccaaactggccgttcttatcacaaacagcaatgtgagacacagtttagcctcatctgagtatccagtcagaaggaggcaatgcgaagaagtcgcaagagcattgggaaaggaaagtttgcgcgaagtgcaattggaagaactggaagccgcgcgtgatctcgtgagtaaagagggatttaggagggctcgccacgtggttggggagataaggagaacagcagacggtgccaaagtgctgtgcctatag

SEQ ID NO: 2514 - DNA, 1269 bp, synthetic construct
  misc_feature 1..1269: note = source = /note="Description of Artificial Sequence: Synthetic coding sequence"
  source 1..1269: mol_type = other DNA
atgtgcgcccccccaaggggcgctccgccagagcatccggctccgacaggcctgtgccgatcttcttgtgctgaactgcaggctcgggttatggctgccttacgacagccacaggtcgctgaattgctggctgaggctcggcgagcctttagagaggaattcggtgctgagcccgagcttgcggtgtctgccccagggagagtcaaccttatcggcgagcatactgactacaatcagggactcgtccttcccatggccctggaattgatgactgtgttagtcggctctcctagaaaggacggattggtttcattgctgactacctcagagggcgccgatgaacctcaaaggttgcaatttccactgcccactgcccagagatcactcgaacctggaacccccaggtgggccaactacgtgaagggagtcatccagtactacccggccgcacctcttccaggattttccgccgtagttgtgtcctccgttccgcttggtggaggtctctccagctcggcctctcttgaggtggccacgtacacattcctacagcagctctgccctgatagcggaacgatcgctgctagagctcaagtttgccagcaggctgaacactccttcgctggtatgccgtgcggaattatggatcagttcatcagcctgatgggccagaagggccacgctctgctgatcgactgccgtagcctggaaaccagcctcgtgccactatctgatccaaagctcgccgtcctaattacaaacagcaacgtcaggcattccctggcttctagcgagtaccccgtgaggcgaaggcagtgcgaggaagtggctagggccctcgggaaggaatctctgcgcgaggtccagctggaggagctggaagctgctcgtgatttggtgtctaaggagggctttcgcagggctagacatgtcgtgggggagatcaggaggacggcacaggctgcggcagctctgcggcgcggtgactacagagctttcggcagactgatggtcgagagccacagatccctcagagatgattatgaagtgtcttgcccagagttggatcagcttgtggaggcagccttggccgtgccgggggtttacggctctcgcatgacgggcggaggattcggcggctgcaccgtcacgctccttgaggccagcgcagctcctcacgcaatgagacacatccaggaacattatggcggcacagccacattctacctttctcaggcagccgacggcgctaaggttttgtgcctgtag

SEQ ID NO: 2515 - DNA, 1179 bp, synthetic construct
  misc_feature 1..1179: note = source = /note="Description of Artificial Sequence: Synthetic coding sequence"
  source 1..1179: mol_type = other DNA
atggccgctcttcgacagccgcaggtggccgagcttctcgccgaagcgcgccgcgcatttcgcgaggaatttggcgctgaacccgagctggccgttagcgccccaggccgggtaaacctcattggtgagcataccgattacaatcagggcttagtgctgccgatggctctcgaactcatgactgttctggtaggctcacctagaaaggacggattggtgagtctactcacgacaagtgaaggggcggatgagcctcaacggctgcagtttccactccccacagcgcagcgttctctagagcctggcaccccccggtgggcaaattacgtcaagggagtgattcaatattaccccgctgctccgttgcctggatttagcgctgtggtcgtgtcatcggtgccccttggagggggactttcgtctagcgcatccctggaggtcgccacatatacattcctgcagcagttatgtcccgatagtggcactatagcagcacgcgcacaggtgtgccagcaggctgagcacagctttgctggtatgccttgcggaattatggaccaattcataagtctgatgggacagaaggggcatgcactgctaatcgactgtcgctctctggaaacgtccctggtccctctatccgatcctaaactggctgtgttgataacaaactcaaatgtcagacattcactggcatccagtgagtacccagtccgcagacgccagtgcgaggaagtggcacgtgcattgggcaaggaaagcttgcgtgaagtccagttagaggagctcgaggccgcccgcgacctggtgtcgaaggaggggttcagaagagcaaggcacgtggtgggagagatccggaggacagcccaggctgcagccgccctcaggcgcggcgactaccgggcatttgggagacttatggtcgaatctcaccgatcactccgggacgattacgaggtgtcttgtcctgagcttgatcagctggttgaggccgcgttggctgtaccaggtgtttacgggtcccgcatgacgggaggcggtttcggcggctgcaccgtgactctcctcgaagcctccgcggcgccccacgcaatgaggcacatccaagaacattacggcggaactgccaccttctacctgtcccaggcagctgatggcgcaaaggtcctgtgcctctag

SEQ ID NO: 2516 - DNA, 1569 bp, synthetic construct
  misc_feature 1..1569: note = source = /note="Description of Artificial Sequence: Synthetic coding sequence"
  source 1..1569: mol_type = other DNA
atggccgctgtggtggcggctacgaggtggtggcagctgctcctcgtcctgagcgccgccggcatgggtgccagtggcgccccacagcctcctaatattttgttactgttgatggacgatatggggtggggtgacctgggcgtgtatggtgagccatctcgagagacgcccaaccttgatagaatggcagcagaggggctcttgttccctaatttttactccgctaatccattatgcagccctagtcgcgcagccttgctgactggaaggttgccgatccgtaacggattttataccaccaacgcacatgctagaaacgcatatacaccccaagagattgtgggcggcatcccggatagtgaacaactgctccccgaactgctgaagaaagcgggatacgtctccaagatagtgggaaagtggcacctgggacataggccgcagttccaccccctgaagcacggctttgacgaatggtttgggagcccgaattgtcacttcggaccttacgacaataaggccaggccgaacattcccgtctatagagactgggagatggtgggacgttactacgaagagtttccaataaacctgaagacaggagaagcaaatctcacccagatatacctccaggaagctttggatttcatcaagcgccaggcaagacatcatcccttttttttatattgggcagtggacgccacgcatgctcctgtgtatgcctcaaagccctttcttgggacttcacagcgtggccgctatggggacgccgtccgcgaaatagatgattccatcggtaagatcctggaattactgcaagacctccatgtggcagataatacctttgttttctttacatcggataacggtgctgctctcatttccgctcccgaacagggaggatctaacggcccattcctgtgcgggaagcagaccacctttgaggggggaatgcgagaacccgcactggcgtggtggcccggacatgtcacagccggacaggtgtcccaccaattaggcagtattatggatctcttcactacaagtctggccctggctggtctgacacctccctctgacagggctatcgacggcctgaaccttctgcctaccctcctacaaggccgtttgatggaccggcctatcttttattacaggggagatactctgatggccgccaccctggggcagcataaagcccacttctggacctggaccaatagttgggagaattttcgccagggaattgacttttgtccaggccagaatgtctctggggtaaccacccataatctcgaagaccatactaagcttcctctgatattccatctggggagagaccccggggaacgtttcccgctctccttcgcatccgccgagtatcaggaggcgctgagccggatcaccagcgtcgttcaacaacaccaggaggccttggtgccagcccaaccacaactgaacgtctgcaattgggcagttatgaactgggccccacccggatgtgagaagctcgggaagtgcttaacaccgcccgagagtatccccaagaaatgcctctggtcacattag

SEQ ID NO: 2517 - DNA, 261 bp, synthetic construct
  misc_feature 1..261: note = source = /note="Description of Artificial Sequence: Synthetic coding sequence"
  source 1..261: mol_type = other DNA
atggcagctgtggtggccgccacaagatggtggcagttgctgttggtcctgagcgccgctggcatgggagcctctggtgcgcctcagccacccaatattctgttgcttctcatggatgacagaggtcgccattgttcgcaagacgggtaccccagtgccatggcctccacgccacctactccaatgccagagactcccactcaccgtcgtcgattatgggccgcttcccagacccgcagttcttcctgccggtctttttag

SEQ ID NO: 2518 - DNA, 1344 bp, synthetic construct
  misc_feature 1..1344: note = source = /note="Description of Artificial Sequence: Synthetic coding sequence"
  source 1..1344: mol_type = other DNA
atggcagccgtggtggcagccaccagatggtggcagttgctgttagttcttagcgccgcaggaatgggggcctccggcgcaccagggcagagggcttataccccccaggagatcgtaggggggattccagattccgagcaactgttacctgagctcctaaagaaagccggttatgtgagtaaaatagtagggaagtggcatcttgggcacaggcctcagttccatcccctgaaacacggcttcgatgagtggtttgggagccctaactgccatttcggaccttatgacaataaagcccggcccaacataccagtgtaccgagactgggaaatggtaggtcggtattatgaggaattcccaattaacctgaagactggggaagccaacctgacccaaatatacttgcaggaagccctggacttcatcaagagacaagcccgccaccacccattctttctgtattgggcagttgatgccacccacgcccccgtatacgcttccaagccgttcctgggcacttctcagcggggtcggtacggggatgctgtgagggaaatcgacgacagtataggtaagatcctcgaattgcttcaggatctgcatgtggccgataatacgttcgttttttttacgtcagacaatggagctgctttaatctcggcccccgagcagggagggtcaaacgggcccttcctttgtggaaagcagacaacattcgaggggggtatgagagagcctgctcttgcttggtggcctgggcacgtgacagcaggccaggttagccaccaactggggagcatcatggatctgttcactacaagtttggccctcgcggggctgactcctcctagtgatcgcgcaatcgacggtctgaacctgctgccaacactgctgcaagggagactgatggacagacctattttctattaccgaggagacactctaatggcagccacgttggggcagcataaggctcatttctggacgtggactaactcatgggaaaatttcagacagggtatcgacttttgccctggccagaatgtgtccggggtcaccacacataacctggaagaccacaccaagctcccactcattttccatctgggtcgggatcccggggaaagatttcctctgtcattcgcatccgccgaataccaggaagccctgtcgcggatcacaagtgttgtccagcagcatcaggaagccctggtcccagcccagcctcaactgaacgtgtgcaattgggccgtgatgaattgggctccccccggctgtgagaagttaggaaagtgcctgactccgcctgagtcaatacccaaaaagtgcctgtggagccattag

SEQ ID NO: 2519 - DNA, 1140 bp, synthetic construct
  misc_feature 1..1140: note = source = /note="Description of Artificial Sequence: Synthetic coding sequence"
  source 1..1140: mol_type = other DNA
atgagtaggagtggaaccgacccccagcagaggcagcaggcaagtgaagccgacgctgccgccgccacgtttcgggcaaacgaccatcagcacattagatataatcccctacaagatgaatgggtgcttgtctcagcccatcggatgaagcgaccctggcagggccaagtggagccacagctcctgaaaacggttccacggcacgacccccttaatccactgtgtcccggtgcgatccgggccaacggagaagttaaccctcagtacgacagtacatttctgttcgataatgactttcctgcactgcagcctgatgcaccaagccccggccccagtgatcacccactgtttcaggcaaagtcagcgcggggggtctgcaaggttatgtgcttccacccatggtctgatgtcaccctgcccctgatgtctgtccctgaaatcagagctgttgtcgacgcctgggctagtgtgactgaagaactaggcgcccagtatccttgggtgcagatattcgagaataagggtgcaatgatgggctgctctaacccacatccacactgccaggtgtgggcttcttcatttctgccagatattgcacagagggaggagcgatctcaacaggcgtacaagtctcagcacggagagcctctcctgatggaatattctcgccaggagctgttgagaaaagaacggctcgtgctgacttctgagcactggctcgtgttggtgccgttctgggctacctggccctatcagaccctgctgttaccccggcggcacgtcagacggctgccagaactaactcctgctgagcgggacgacctcgcctcgattatgaagaagctgctcaccaaatatgataatctgttcgaaacctctttcccttacagtatgggctggcatggggcccctaccggctctgaggccggggccaactggaatcattggcagttacacgcacactattacccacctttgcttaggagtgccaccgtccggaaattcatggtcgggtacgaaatgctggcacaggcgcagcgcgatctcacccctgaacaggctgccgagcgcctgcgtgctctgccagaagttcactatcatctcggacagaaggatagggaaactgccaccattgcctag

SEQ ID NO: 2520 - DNA, 813 bp, synthetic construct
  misc_feature 1..813: note = source = /note="Description of Artificial Sequence: Synthetic coding sequence"
  source 1..813: mol_type = other DNA
atgaccctgagtaccctgtgtgttctagggccatccgaacccactgagagcaaagtgatgtgctttcacccttggtcagacgtgactctgccccttatgagcgtgccggagatccgcgccgttgtggacgcctgggctagcgtcaccgaagaactgggcgcccagtatccatgggttcagatcttcgagaataagggggctatgatgggttgtagcaatccccatccccattgccaggtgtgggctagctctttcttaccagacatcgcccagagagaggagcgaagccagcaagcttataagtctcaacatggagagcccctgctgatggagtattctaggcaggagctgctaaggaaagagaggcttgtcctaacctccgaacactggctggttcttgtgccattctgggccacgtggccctaccaaactttactgctgccaagaaggcacgtaagaaggctgcctgagctgacacccgcggaacgagatgacctcgcttcaatcatgaaaaagttgctgaccaaatatgacaacctgtttgagacttcatttccctactcaatgggatggcacggcgccccgaccggctcggaggctggcgccaactggaaccactggcagctgcacgctcattactaccctcccctcctgcgctctgccactgtgcggaaatttatggtaggttacgaaatgttagcccaagcccaacgcgatttgacccctgagcaggctgccgaacggctccgcgccctgcctgaagtccactaccaccttggccagaaggaccgcgagacggccaccatcgcctag

SEQ ID NO: 2521 - DNA, 255 bp, synthetic construct
  misc_feature 1..255: note = source = /note="Description of Artificial Sequence: Synthetic coding sequence"
  source 1..255: mol_type = other DNA
atgagccgatcaggtacagatcctcagcaacggcagcaggcttccgaggctgatgccgcggcagccacctttagggctaacgatcatcaacacattaggtataatcccctgcaggacgaatgggtgctggtgtctgctcataggatgaagaggccatggcagggccaagtagagcctcagctgctcaagacagtcccacgccatgatcccctcaatccattgtgccctggtgccatcagggcgaatggcgagtag

SEQ ID NO: 2522 - DNA, 2229 bp, synthetic construct
  misc_feature 1..2229: note = source = /note="Description of Artificial Sequence: Synthetic coding sequence"
  source 1..2229: mol_type = other DNA
atgagccctcagaagcgcgtcaagaacgttcaggcccagaacaggacgtcccagggcagttccagcttccaaacaacactgagtgcctggaaggtcaagcaggaccccagcaactcaaaaaacatcagtaagcatgggcagaacaacccagttggtgattatgagcacgctgacgatcaggccgaggaggatgccctgcagatggccgtagggtacttcgagaagggcccaattaaagcgtcccagaacaaagacaagactctcgaaaaacacctgaagaccgtggaaaatgtggcctggaaaaacggcctagcaagtgaggagatcgacatcttgctcaatattgccctgagtggtaaattcgggaacgccgtgaataccaggattcttaagtgcatgattccagctaccgtcatttccgaggatagtgtcgtgaaggccgtatcctggctgtgtgttgggaagtgttctggcagcactaaggtcctgttctatcgatggttggtagccatgttcgacttcatcgatagaaaggaacagattaatctactttacggtttcttttttgccagcctgcaggatgacgcgctgtgcccctatgtttgccatcttctctatcttttgaccaagaaggaaaacgtgaaacctttccgcgtgagaaagctcttggacctgcaggcaaaaatgggaatgcagccccatttacaggcactgcttagcttgtataaattctttgctcctgcactaatctcggtttctctgccagtcaggaagaaaatttactttaaaaacagtgaaaacttgtggaagacagctcttctggcagtgaagcaacgcaatagaggtccttctccagagccgctgaagcttatgctgggaccagccaatgtccgtcccctgaaacggaagtggaattcactctccgtgattcccgtgctgaactcgagctcctataccaaggagtgcggcaagaaagagatgtctttgtccgactgtctgaacagaagcggatcatttccactggagcagcttcagtcctttcctcagctcttacagaatatccattgcctcgaactcccgtcccaaatgggaagcgttctcaacaattctctcttgctgcattacatcaattgtgtccgtgacgagcccgtgctcctccgtttctattactggctgtcccagaccctgcaagaggagtgcatttggtataaagtaaataactatgaacatggtaaagaatttactaacttcctagatacgattatccgggctgaatgctttcttcaggagggtttttacagctgcgaggcatttctttacaagagcctgcctctgtgggatggcctgtgttgtaggtcacagttcctgcagttagtgagctggattcccttttcgagtttctcagaggtgaagccactgctatttgatcacctcgcacagctgttttttaccagtacgatctacttcaaatgctcggtgctgcagagcctcaaggagttgcttcaaaactggctgctctggctgagtatggacattcatatgaagcctgtgaccaactctccactggagacaactttagggggtagcatgaatagcgtgtcaaaacttatccattacgtcgggtggctgtcgacaacagccatgcgcctggaaagcaacaatacttttctgttgcactttatcctcgacttctacgagaaggtgtgcgatatctatattaactataacttacccctggtagtgctttttcctcccggaatcttctattctgcactgctgagcctggacaccagcatactcaaccagctttgtttcattatgcatcgctacagaaagaatctcacagcagccaaaaagaacgagctagtgcaaaagaccaagagtgagtttaatttctcttcaaaaacttatcaggagtttaatcactatcttaccagtatggtgggctgcttgtggaccagcaagccttttggcaaaggcatctatatcgaccccgaaatactcgaaaagactggcgttgccgaatataagaactccctgaacgtcgtgcaccatccctctttcctgtcatacgcggtatcttttctgctccaggggaagaagtggagctggtatctagattacttgtttagtcagggcctccaaggtctgaagctctttatcagatcctcagtacaccactcaagtatcccccgcgctgagggaattaactgcaacaaccagtattag

SEQ ID NO: 2523 - DNA, 636 bp, synthetic construct
  misc_feature 1..636: note = source = /note="Description of Artificial Sequence: Synthetic coding sequence"
  source 1..636: mol_type = other DNA
atgaagctatgggacgtagtagctgtctgtctcgtgcttttgcacacagcctccgcattccccctgccagccggcaagcgcccccccgaggccccagcagaagaccgatccctcggcagaaggagagctcctttcgctctgtctagcgatagcaatatgcccgaggactatccggaccaattcgacgacgtaatggacttcatacaggccacaatcaagcgcctcaagcgatcaccagacaaacagatggctgtgctgccaagaagggaaaggaaccggcaggcagcagctgccaaccccgagaactccaggggtaaggggaggcgggggcaaaggggtaaaaataggggctgtgtgctgacggccatccacctgaacgtaacagatctgggactgggctatgaaacaaaagaagagctgatttttagatactgttccggatcatgtgacgccgccgaaaccacatatgataagattctgaaaaatctgagccggaatcgacgacttgtgagcgataaggtgggacaggcctgttgtaggccaatcgctttcgatgacgacctctcctttttggatgataaccttgtatatcatatcttacgaaaacactccgcaaagcgctgtggctgcatctag

SEQ ID NO: 2524 - DNA, 558 bp, synthetic construct
  misc_feature 1..558: note = source = /note="Description of Artificial Sequence: Synthetic coding sequence"
  source 1..558: mol_type = other DNA
atgaagctttgggacgtcgtagcagtctgcctggtgctcctacacaccgcttccgcgtttccgttacctgctgccaacatgccggaggattaccctgatcagtttgacgatgtgatggatttcatccaagctacaattaagcggctgaaaagaagtcctgataagcagatggccgtgctgcctcgcagggagcggaacaggcaggccgctgcagcaaatcccgagaattcacggggcaaaggaagaagaggccagagaggtaaaaaccgcggctgcgtgctgaccgcaatacatctcaatgtgacggatctaggcttgggatacgagaccaaagaagaactcattttccgttactgtagcggatcttgtgacgccgctgaaactacatacgataagatcctgaaaaacctaagccgcaatcgacgactggtgtccgacaaagtcggccaggcctgctgtagaccgatcgcctttgatgacgatctgtccttcctggacgataatttggtctatcatattctcagaaagcattcggcgaagcgatgcgggtgcatctag

SEQ ID NO: 2525 - DNA, 687 bp, synthetic construct
  misc_feature 1..687: note = source = /note="Description of Artificial Sequence: Synthetic coding sequence"
  source 1..687: mol_type = other DNA
atgcagtcccttcctaactctaatggagctgccgccggcagagattttaagatgaaactgtgggacgtggtcgccgtgtgtctggtgttactacataccgcaagcgctttccccctgcctgcaggcaagcgacccccagaggcacctgccgaggatcgatccctggggcgtaggcgagcgccttttgccttgtctagcgactccaatatgcctgaagactatccagaccagtttgacgatgtcatggatttcattcaggcaaccatcaagcggttgaagaggagcccagacaaacaaatggctgtcttgccacgtagggagcggaacaggcaggccgccgccgcaaacccggaaaattcacgaggaaagggaaggagggggcagcgtggtaagaaccgcggctgcgtgctcaccgcgatacacctgaacgtgacagatctcggtttagggtatgagacaaaggaggagctgatattccggtattgctccggcagctgcgatgcggcagagactacttatgacaagatcctcaagaacctctcacggaaccggaggctcgtgtctgacaaagtcggtcaagcatgttgccgccccatcgcattcgatgatgatttaagcttcctcgatgacaacttagtgtaccatatcctgcgtaagcatagcgcgaagcggtgtggctgcatctag

SEQ ID NO: 2526 - DNA, 186 bp, synthetic construct
  misc_feature 1..186: note = source = /note="Description of Artificial Sequence: Synthetic coding sequence"
  source 1..186: mol_type = other DNA
atgaaattgtgggacgtggtcgccgtttgcctggtgctcttacatactgcttcggccttccccttgcccgccgccaatatgcccgaggactacccagaccaatttgacgatgtgatggatttcatccaagccacaatcaaacgccttaaaaggtcccctgacaagcagatggccgttctgccatag

SEQ ID NO: 2527 - DNA, 186 bp, synthetic construct
  misc_feature 1..186: note = source = /note="Description of Artificial Sequence: Synthetic coding sequence"
  source 1..186: mol_type = other DNA
atgaagctttgggatgtggtggctgtgtgtttggtcctcttacacaccgcttcagcgttccccttgcccgccgcgaacatgccggaggactacccagaccaattcgatgatgttatggattttatccaggctaccatcaagcggctcaaaagatccccagacaaacagatggctgttctgccatag

SEQ ID NO: 2528 - DNA, 558 bp, synthetic construct
  misc_feature 1..558: note = source = /note="Description of Artificial Sequence: Synthetic coding sequence"
  source 1..558: mol_type = other DNA
atgaagctctgggatgttgtcgccgtatgcttggttttactgcacactgcttcagcttttccgctgcctgcagcgaatatgcctgaagattaccccgaccagtttgatgatgtcatggatttcatccaggctaccattaaacgcctgaaaagatccccagacaagcagatggcagtccttccccgcagagagaggaatcggcaggctgccgcagcaaatcccgagaattctagaggcaagggaagacgaggacagcgcggcaagaatagggggtgcgtgctgaccgccatccatctgaacgtcaccgacctgggcctcggctatgagactaaggaagaactgatctttagatactgttcaggatcttgcgatgcggctgagactacttacgacaaaatactgaagaatctcagtaggaatagacgcctcgtgagcgataaggtgggtcaggcatgttgtcgtcccatcgcgtttgatgacgatctgagcttcctggacgacaacctggtgtaccatatactccgcaagcacagcgcaaagcggtgcggctgtatctag

SEQ ID NO: 2529 - DNA, 609 bp, synthetic construct
  misc_feature 1..609: note = source = /note="Description of Artificial Sequence: Synthetic coding sequence"
  source 1..609: mol_type = other DNA
atgcagtcacttcctaactcgaatggcgcagcagccggccgtgacttcaaaatgaaactatgggacgtggtggcggtttgcttggtgctcctccacacagcctcagcatttccactgcctgccgctaacatgccagaagactaccctgatcagttcgacgatgtcatggacttcatccaggcgacgatcaagcggctgaagcgctcccctgacaaacagatggcagtcttgccccgtcgggaacggaacaggcaggccgccgccgcgaatccggagaattctcgcggcaagggaagacgtggtcaacggggcaagaaccgaggctgtgtactgactgccatccacttaaatgtcacagacctgggactcggatacgagacaaaagaggagttgatcttccgctattgcagcggttcatgtgacgccgccgagaccacatacgataaaatcctgaagaacctgagtcgcaaccgacgcttagtgtcagataaagtgggccaggcctgctgtaggcccatagcttttgatgatgacctgtccttcctggatgataatttagtctaccatatcctgagaaaacattcagcaaaaaggtgcgggtgcatctag

SEQ ID NO: 2530 - DNA, 543 bp, synthetic construct
  misc_feature 1..543: note = source = /note="Description of Artificial Sequence: Synthetic coding sequence"
  source 1..543: mol_type = other DNA
atgaagagtatctatttcgtggccggcttgttcgtaatgctggttcagggatcatggcagcggtctctgcaagacacagaggaaaaaagtaggagtttctcagcttcccaggcagatccattgtctgacccggatcaaatgaacgaggataagcgccattcacaggggacatttacttccgactattcaaagtacctggatagccgccgggcacaggacttcgtccaatggctgatgaacaccaagcgcaacagaaataatatcgcaaaaagacacgatgaattcgagcgccacgctgaaggtacatttacaagcgatgtcagcagctatctggaaggccaggctgctaaagagtttatagcctggttagtgaagggccgtggaaggcgcgatttccccgaggaggtggcaatcgttgaagaacttggcagacggcatgcggatggaagtttttctgatgagatgaacacaatcctggataacctagccgcacgggacttcattaattggttgatccagacgaagatcactgataggaaatag

SEQ ID NO: 2531 - DNA, 543 bp, synthetic construct
  misc_feature 1..543: note = source = /note="Description of Artificial Sequence: Synthetic coding sequence"
  source 1..543: mol_type = other DNA
atgaagtcaatttatttcgttgctggcctgttcgtgatgctggtccagggctcctggcaaaggagcttgcaggatacggaggagaagtctcgctctttttcagcttcccaggccgaccccctctctgaccctgatcaaatgaacgaagacaagcgtcatagccagggcacattcacgtcagattattctaagtacctggacagtcgtagagcccaggactttgtgcaatggctgatgaatacaaagcgaaacagaaataacatagctaagcgccacgatgagtttgaacgacacgctgaaggaacatttacgtctgacgtttccagttatttggagggacaggccgcaaaagagtttattgcctggcttgtgaaagggcgtgggcgacgcgatttcccagaggaagtcgctatcgtggaggagctggggaggcgccacgcagatggctctttttctgacgagatgaacacaatcctcgataatctggccgctagagacttcattaattggctcattcagacaaagataaccgataggaaatag

SEQ ID NO: 2532 - DNA, 2262 bp, synthetic construct
  misc_feature 1..2262: note = source = /note="Description of Artificial Sequence: Synthetic coding sequence"
  source 1..2262: mol_type = other DNA
cgggcacccgaccgccggggaagcccacgcttggcatcgacccgactgggggcactacgcctgaggcccagtaggcgggtacctgctagagccccggcccctgctcaggctcccctgcccctaggaccgcggttattaggcctgcgaaggaacatggccgcccctatgacgccagccgcccggccagaggattacgaggccgccttaaatgcagctcttgcggacgtcccggaattggctcgcctgttggagattgacccttatctgaaaccctatgctgttgacttccagcgccggtataaacagttcagtcagattcttaaaaatattggcgagaacgaaggtgggatcgacaagttttctcgaggatatgagagcttcggtgttcaccgttgcgcagacggcgggctgtattgcaaggagtgggcaccaggagctgagggtgtttttctgactggggattttaacggatggaatccatttagttatccatataaaaaactggactacgggaagtgggaactgtacatacctcccaaacagaataaaagcgtgctggtgccacacggatccaagttaaaagtcgtgataacttctaagtcgggggaaattttgtacagaatttccccttgggcaaaatacgtggtgcgcgagggagacaacgtgaactatgattggatccactgggatcctgagcactcctacgagtttaaacacagccggcctaagaagccaagatccctgcggatctacgaatcgcacgtgggtatctcttcacatgaagggaaagtagcctcttacaagcattttacatgcaatgtcctcccacggataaagggcctgggatataattgtatccagctgatggccataatggagcatgcatattacgcttcattcggctatcagattactagtttctttgcagccagctcccgctacggaacccccgaagaactgcaggagttggttgacactgctcattccatgggtattatagtcctcctcgacgtggtgcacagccatgcttctaagaacagcgccgacggtctcaatatgttcgacgggactgactcttgctattttcatagcgggccccgaggtactcacgatctatgggactcacgtttgttcgcgtactcatcatgggagatcctgcgttttttgctgtctaacatccggtggtggctggaagagtaccgcttcgatggcttccggttcgatggcgtcacctctatgctttaccaccatcacggggtgggccagggcttctcaggcgattactcagagtattttggtctccaagtggatgaggatgctcttacatacttaatgcttgccaatcatttggtccacacactgtgtcccgatagcataacaattgcagaggacgttagtgggatgcctgccttgtgctcaccaattagtcagggcggcggaggctttgactatcggttagcgatggcgatccctgataaatggattcagctgctcaaggaatttaaggatgaagattggaacatgggcgacatcgtttacacgctcacaaaccggcgatatctcgaaaagtgcattgcctacgcagagtcacatgatcaggctttagtgggcgacaaaagcctcgccttctggctgatggatgcagaaatgtacaccaatatgagtgtactgaccccgttcacacccgtgatcgatcgcggaattcagctccataagatgataaggctgatcacccacggcttgggcggggagggctacctgaattttatgggaaacgagtttgggcatcccgaatggttagattttccacgaaagggaaacaatgagtcgtatcattacgcgcggcgccagttccatctcaccgatgatgatctattacgttacaagttccttaataacttcgaccgcgacatgaacaggctggaagaaaggtatgggtggctggcagctccacaagcttatgtctctgagaaacacgagggcaacaagattatagcattcgagcgagcaggcttgctattcatttttaactttcatccgtcgaagtcatatacagactatcgagtcggaaccgccctccccggcaagttcaaaatcgtgctggatagtgacgctgccgagtatggcggacatcaaaggctcgaccacagtaccgacttcttctccgaggccttcgaacataacggcagaccctatagcctcctcgtgtatatcccaagccgcgtcgcgttgattctgcagaatgttgacttgccaaattag

SEQ ID NO: 2533 - DNA, 2109 bp, synthetic construct
  misc_feature 1..2109: note = source = /note="Description of Artificial Sequence: Synthetic coding sequence"
  source 1..2109: mol_type = other DNA
atggctgcccccatgacaccagctgcaagaccagaagattacgaggccgctctcaacgccgccctggcagacgtgcctgagctcgcacgactcctcgaaatcgatccctacctgaagccgtacgcagtcgacttccagcgaaggtacaaacagttttcacagatcctcaagaatattggcgagaatgaaggaggtatcgacaaattcagcagaggctatgagagcttcggcgtgcacagatgtgccgacggcggcctttactgcaaagaatgggcacctggtgcagagggcgtgttcctgactggggactttaacggatggaatcctttctcatacccgtataaaaagttggattatggcaaatgggagctgtacatccccccaaagcagaacaagtctgtgctcgtgccccatggatccaaacttaaagtagtgatcacatccaagagcggcgagattctgtatcgcattagcccttgggccaaatacgtggttcgtgagggtgacaatgtcaactatgattggatacactgggaccctgagcactcctatgagtttaaacactccagaccgaaaaagccacgatccctccggatttacgagagccacgtaggaatctcctcccatgagggcaaggtagcctcctacaaacacttcacatgcaatgtgctgcctcgtataaaggggcttggttacaattgcatacagttgatggcaataatggagcacgcatattacgccagtttcgggtatcagatcactagcttcttcgctgctagctctcgctatggcactcctgaagaactgcaggagctcgtggatactgctcacagtatgggtattatagtgttgctggacgtggttcacagtcacgccagcaaaaattctgccgatggtctgaacatgtttgatggaacggactcgtgctactttcattcaggcccacggggcacccacgatctgtgggattcacgactgtttgcctattccagctgggagatacttcgatttctgctcagtaatataagatggtggctggaagagtatagattcgacggcttcagatttgacggcgtaaccagcatgctctaccaccaccacggcgtggggcagggttttagcggggactattccgagtattttggtctgcaggtggacgaggacgccttaacgtatctgatgttggcgaatcaccttgtgcacacgctgtgcccagacagtatcaccattgcagaagatgtgtccgggatgcctgccttgtgttcccctatcagtcagggtgggggaggcttcgactacagactcgccatggccattcccgataagtggatccagttgctgaaggaattcaaggatgaagactggaacatgggcgacatcgtttatactttgaccaatcgtcgttatttggagaaatgcatagcctatgctgaatcacatgaccaagcactcgtcggcgacaaatcgttggcattctggctcatggatgccgaaatgtatacgaatatgagcgtccttaccccctttaccccagtgatcgaccgtggcattcaactccacaaaatgattcggcttatcacacatgggctcgggggagaaggctacctgaattttatgggaaacgagttcggacatcccgagtggctggattttcctaggaaggggaacaacgaaagttaccactatgcccgccggcagtttcacctgaccgacgatgatctgctgaggtataaattcctcaacaactttgaccgcgatatgaacagattagaggagcggtacggttggttggctgctccacaggcctacgtatctgagaagcacgagggcaacaagattatcgccttcgagcgcgccggcctcttattcatcttcaactttcatccatctaagagctatacggattaccgcgtcggtacggccctccccggtaagtttaagatcgtgttagatagtgacgcagccgagtatggggggcatcagcgtcttgaccattcgaccgatttcttttcagaagccttcgaacacaatggccgcccgtactccctcctcgtgtatataccatcccgcgtggcattgatcctgcagaacgttgacctgcccaattag

SEQ ID NO: 2534 - DNA, 1398 bp, synthetic construct
  misc_feature 1..1398: note = source = /note="Description of Artificial Sequence: Synthetic coding sequence"
  source 1..1398: mol_type = other DNA
atggcgattatggagcatgcttattacgcatcatttgggtaccaaatcactagtttcttcgccgcgtcaagccgctacggcaccccggaggaacttcaggagttagtcgacactgctcattcaatgggcatcattgtacttttggatgtggtgcactcacacgcatcaaagaatagcgccgatgggttaaatatgttcgacggtacagatagttgttactttcattctggcccaagagggactcatgatctgtgggactctcggttgttcgcctattcctcatgggagattctacgcttccttctttccaacattagatggtggctggaagaatatcgtttcgacgggttcaggttcgacggggttacttctatgttataccaccaccacggagtcggacaaggctttagcggcgactactctgagtactttggccttcaggtagacgaagacgctctgacatacctcatgctggccaaccatctagtgcacactctgtgccccgatagcattaccatcgccgaagacgtgtccggcatgccagcactctgtagtcctatttcacagggcggcggcggctttgattacaggctggcaatggccattcctgataaatggatccagcttctgaaggaattcaaggacgaggattggaacatgggcgatatagtatacacactcactaaccgtcggtatctggagaagtgcattgcgtatgcggagtcacatgatcaagctctggtcggggacaagagcctggccttctggctcatggacgcagagatgtataccaacatgtctgttctaaccccctttactccagtgattgacaggggtatccagttacacaagatgatccggctgattacacacggtctcgggggcgaagggtacctgaactttatgggcaatgaattcggacatccggaatggctggattttccacgcaagggaaacaacgaatcctatcattatgccagacgccagttccatcttaccgacgacgatctgctgcggtacaagtttcttaacaacttcgaccgggatatgaatagattggaggaacgatacggttggctggcggcccctcaagcttacgtgagtgaaaagcacgaaggaaataagataattgcattcgaacgggcagggctcctgttcatctttaattttcatccaagtaagagctatactgactatcgggtcggcacggccctgcctggtaagtttaagattgtcctagacagcgatgcggccgaatacggagggcaccagaggctggaccatagtactgactttttttccgaagccttcgagcataatggacggccgtacagcttgttggtctacataccctccagggtggccttgattctccagaatgtcgacttaccaaactag

SEQ ID NO: 2535 - DNA, 1074 bp, synthetic construct
  misc_feature 1..1074: note = source = /note="Description of Artificial Sequence: Synthetic coding sequence"
  source 1..1074: mol_type = other DNA
atggaggaaggcatgaatgtgctccacgatttcggaattcaatccactcattaccttcaggtcaactaccaagacagtcaggactggttcatcctggtgagcgtgatcgctgacttacgcaatgccttctacgtacttttccctatctggtttcatcttcaggaagctgtgggtatcaagttactttgggtggctgtgattggggattggctaaatctggtcttcaaatggatcctatttggccaacgcccatattggtgggttctggacaccgattactattcaaacacctctgtccccctgattaaacagtttccggttacatgcgagactggacccggttccccaagcggccacgccatgggaaccgccggcgtgtactacgtgatggtgacaagcaccctttctatcttccaaggtaaaatcaagccaacctaccggttccgctgtctgaatgtaattctgtggctcggattctgggcagttcaactaaatgtttgcctgtcacggatctacctcgcagcacacttcccccaccaagtggtggcgggcgtgctgagtgggattgccgtggcagaaacgttttcccacattcacagcatatacaacgcctccctgaaaaagtattttttgatcactttcttcctgttttcctttgctattggattctatctgctccttaagggactgggcgtggatcttctgtggactctggagaaggctcagcggtggtgtgaacagcctgagtgggttcatatcgatacgacccccttcgcttccctcttgaagaatctcggtacgttgtttggcctaggcctggcccttaattcttctatgtaccgagagtcgtgcaaaggaaagttaagcaagtggctgccatttcgcctgagcagcatcgtcgcctcccttgtgcttctgcatgtgttcgacagcctcaagccccccagccaggtcgagctagttttctacgtgctgtctttctgtaagagtgccgtggtccccctggcctccgttagcgtaattccctattgcctcgcgcaggtgctagggcagccccacaaaaaatccttatag

SEQ ID NO: 2536 - DNA, 2859 bp, synthetic construct
  misc_feature 1..2859: note = source = /note="Description of Artificial Sequence: Synthetic coding sequence"
  source 1..2859: mol_type = other DNA
atgggagtgcggcacccaccatgctcacaccggctactcgcggtttgcgccctcgtcagcttggctacggccgcgctgctcggacatatcctcctgcatgattttctgctggtcccccgggaacttagcggcagttccccagttctggaggaaacccaccctgctcaccagcagggggcatctcgcccagggccaagagatgcacaggcccaccccggccggccacgcgctgtgccaacccagtgcgacgtgccgcccaatagcaggtttgattgcgcccctgataaggctatcactcaagagcagtgcgaagcgaggggttgctgctatatcccagccaaacagggtctacagggcgcacagatgggacagccgtggtgcttttttccgcccagttacccatcttataaattagagaatctgtcctcatcagaaatgggctataccgccaccttgactcggaccacccctacattcttcccaaaagacattctgaccttgagattggacgtgatgatggagaccgaaaatagactgcatttcaccatcaaggaccctgcgaatagacgctacgaggtccctctggaaactcctcatgtccatagccgcgcccctagccccctctatagcgtggaattctctgaggagccttttggtgtaattgttaggcggcagttagacggccgtgtgctcctgaacactacagtggcgcctctgttctttgccgatcagtttctgcagttaagtacaagcttaccttcccagtatatcacaggactcgcagagcatctgtcaccgcttatgctgagcacatcgtggacaagaatcacgttgtggaaccgggatctggcaccgacccccggtgccaacctgtatggatctcatccgttctatctggccctcgaagatggagggagcgcacacggcgtcttcctgctcaatagtaacgccatggatgtggtgctgcagcccagccctgccctgtcatggcgatcaaccgggggaatactggacgtgtatatttttctggggcctgagccaaagtcagtggtgcagcagtacctggacgtggttggctacccatttatgccaccctattggggcctgggcttccacctctgccggtgggggtactccagcactgctattacccggcaggtagtagagaatatgacccgggctcacttcccgctcgatgtccagtggaatgacctggattatatggactcacgacgtgactttacgttcaataaggatggcttccgagatttcccagcgatggtacaggagctgcatcaggggggccgacgttatatgatgatcgtggaccccgcaatcagtagttcaggccctgccggctcatacaggccctacgatgagggtctccggaggggtgtgttcattactaacgagacaggccagccacttattggtaaagtatggccaggatctacagcctttcccgactttaccaatccgacggctctggcctggtgggaggacatggttgctgagttccacgatcaggtgccctttgatggcatgtggattgatatgaacgagcctagcaatttcatccgaggaagcgaagatggctgtccgaataacgagctcgagaaccctccctacgtcccaggggtcgtaggcggcactttgcaggctgccactatctgtgcgtctagccaccagttcttgagcacacattataatttgcataatctgtatgggcttacagaggctatcgcgtctcacagggcccttgtgaaggcgcgcgggactcgtccctttgtgattagcagatccacatttgcaggacatggccgctacgctggacactggacaggagacgtttggtcttcttgggagcagctggcctcatccgtccccgagatcctgcagtttaatctcctcggggtacccttagtcggcgcagacgtttgcggttttctgggcaatacaagcgaggagctttgtgtaagatggactcagctcggtgcattctatccttttatgcgcaaccataactcgctgctgtcgctcccgcaagaaccgtactcattctcagagcccgcccaacaggcaatgaggaaagcactgacccttcgatatgctctcctcccccatctgtacacattattccaccaggctcatgtcgctggggaaactgtggccagaccactctttttagaatttcctaaagattcatccacctggactgtggaccaccaactgttgtggggggaggctctgctgatcaccccagtgttacaggcaggcaaagcagaggtgactgggtattttccccttggaacatggtacgacctgcagaccgtcccagtggaagcgctggggtccctgcctccaccccccgctgcaccccgtgaacccgctatccacagtgagggccaatgggtgactttgccagcccctttggacacaatcaatgtccacttaagagctggctatatcatcccgctgcaagggcccgggctgaccactaccgagtctaggcaacagcctatggcgcttgctgtagccctaacaaaggggggggaggcgcgtggagagttgttttgggatgatggcgaaagcttagaagtccttgaacgaggagcttacacccaggttattttcttggccagaaacaataccatagtcaatgaattagtcagggtcacatctgagggcgctgggctgcagctccaaaaggtcaccgtactgggggtggccacggcaccccagcaggtgctgtctaatggcgtgcccgtctcaaacttcacttacagtcctgatacgaaagtattagacatctgcgtcagcctcctcatgggcgagcagttcctcgttagttggtgttag

SEQ ID NO: 2537 - DNA, 2859 bp, synthetic construct
  misc_feature 1..2859: note = source = /note="Description of Artificial Sequence: Synthetic coding sequence"
  source 1..2859: mol_type = other DNA
atgggagttagacatcccccgtgttcgcaccgtttgctggccgtgtgtgccctcgtttctctggcaacagctgcgttgctcggacatattctgttacacgacttccttcttgtccctcgtgagctgtctggaagcagcccggttctcgaagagactcatcccgcacaccaacaaggcgcttcacgccccggccctcgcgacgcccaggctcaccccggtcgtccccgcgccgtgccaacacagtgcgatgtgccgcctaattcccgctttgattgcgctcctgacaaggctattactcaggaacaatgtgaggccagggggtgctgttacatccctgctaagcaaggtctgcagggcgctcaaatgggccagccatggtgttttttccccccatcatatccatcttacaagctggaaaatctaagttccagcgagatgggatacacagcaacactaactagaaccactccaaccttttttcctaaagatatattgactctcaggcttgacgttatgatggagacagagaacagactgcattttacaatcaaggatccggccaatcgtcggtacgaggtgccacttgagacacctcatgtccactcccgggcaccgagccctttatattcagtcgaattttcagaagagccttttggcgtgattgtccgaagacagctggacggccgggttctattaaatacaaccgtcgctcccctcttctttgctgatcagtttctgcaactgtctacgagtctcccaagccagtacattacaggactggctgaacacctgtccccactgatgctgtcaacttcctggacccgtattacgctctggaaccgggacttagcgcctacccccggggccaatctctatggttctcaccctttttatctggcccttgaagatggtggtagtgcccatggtgtctttctgctcaacagtaatgccatggatgtcgtgctccaaccctccccggctctcagctggcgctcaaccggcggcattctcgatgtttacattttcctgggccctgagccaaaatcagtggtgcagcagtatttggacgtggtcggttacccattcatgccaccttactggggactcggatttcacttgtgcaggtggggctattcaagcaccgcaatcacaagacaggtggtcgagaacatgacgcgcgcccatttccctctggacgtccagtggaatgacctggactatatggacagtaggcgggacttcacatttaacaaagatgggtttagagactttcccgcgatggttcaggaactacatcagggggggagacgatatatgatgatcgtggatcccgccatctcttctagcggccctgccggctcctacagaccgtacgatgaaggcctgagaaggggcgtgtttatcacaaacgagacaggacagcccctgataggcaaggtttggcccggctccaccgccttccccgatttcacaaaccctacggcgttagcctggtgggaagacatggtggccgaatttcatgaccaagtgcccttcgatggcatgtggatcgatatgaacgagccatcaaattttataagaggcagcgaagacggctgccccaataatgaactagaaaaccccccatacgtgcctggcgtcgtgggtggtactcttcaggccgccactatctgcgcctcctctcatcaatttctgtcaacccactataatctgcacaacttgtatggactgacggaggctattgctagccaccgcgcactggttaaggcccgtggcactcggccttttgttatctcgcgtagcacctttgccggccatgggagatatgcagggcactggacgggggatgtctggtcatcgtgggagcaactcgcatcctcggtccctgaaattctgcagttcaacctcctcggggtgcctctggtgggggctgacgtctgcgggttcctgggtaacacaagtgaggagttgtgcgttcggtggacccaactgggcgcgttttacccgttcatgcggaaccacaactctctcctatcactgccacaggaaccgtactcattcagtgagcctgctcagcaggcgatgagaaaggccctcactctgcgctatgccttgctcccgcatctctataccttgttccaccaggcacacgttgccggagagactgtggctcgtccactgttcctagagttccccaaagatagctcaacctggacggtggaccaccagctgctctggggcgaggcactgctaattacccctgtactgcaagcagggaaggccgaagtgactggctattttcctcttggtacctggtatgaccttcagacagtgcctgtggaagccctggggagtctccctccgccccccgctgcccccagagaacccgctatccatagcgaaggtcagtgggttacactccccgcccctctggatacaatcaacgttcacctgagagccgggtacatcatcccactccaaggacccgggctgactactacagaaagccggcagcaacccatggctcttgccgtggcgcttaccaaggggggcgaggctcgcggcgaactgttttgggatgatggcgaatccttagaggtactggagcggggcgcttatacacaggtcatctttctcgcccggaataacactattgtcaacgagttggttagggtcacaagcgagggggcaggcctccaacttcagaaggtgactgtcctaggagttgccacagctcctcagcaggtgctgtccaacggcgtgcctgtgtctaatttcacatatagccccgacacaaaagtactggacatttgcgtgagtctcctgatgggcgagcagttcctggtctcctggtgttag

SEQ ID NO: 2538 - DNA, 1611 bp, synthetic construct
  misc_feature 1..1611: note = source = /note="Description of Artificial Sequence: Synthetic coding sequence"
  source 1..1611: mol_type = other DNA
atggagttcagctccccttctcgggaagagtgccccaagcccctgagcagggtcagtattatggcagggagccttaccgggctccttctgcttcaggccgttagttgggcctctggcgcgcggccttgcatccccaagagcttcgggtactcctccgtcgtttgtgtctgtaacgctacttactgtgattctttcgaccctccaacctttcccgcgctgggcacattctcccgctacgagagcacacgcagcgggcgccgcatggaattaagtatgggacccatccaagcgaaccacactgggactggcttgctgctcactttgcagcccgagcagaaatttcagaaggtgaagggctttgggggggctatgaccgacgctgccgctctgaacatcctggccctaagtccacccgcccagaatctgctccttaaatcttacttcagcgaggagggtatcggctataacatcatccgtgtacccatggccagctgcgactttagtatccgcacctacacctacgcagacacacctgacgactttcagcttcataactttagcctccctgaagaagatacaaagcttaagattccactcatccacagagccctgcagttggcccagcgtcccgtctcgctcctcgccagtccttggacttcccccacatggctgaagaccaacggtgcagtgaatgggaagggatctctgaagggacaaccgggggatatatatcaccaaacttgggccaggtatttcgtgaaattcctggatgcctatgccgagcacaaactgcaattctgggccgtgaccgccgaaaatgaacccagcgccggtctgctgtcaggctaccccttccagtgcctggggttcactcctgaacaccagagggattttatcgctcgcgacctgggtccgactctcgccaattccactcatcataatgttaggcttctcatgttggacgaccagcggcttttgttacctcactgggcaaaggttgtactcaccgatcctgaagccgcaaaatacgtgcatggaatagcagtgcattggtatttggacttcctggcaccagccaaggcgacactcggcgaaacacatcggctgttccccaacaccatgctcttcgcaagtgaggcctgcgtcggcagcaagttttgggagcaatccgtgcggctgggaagttgggacaggggaatgcagtactcacattccattattactaaccttttatatcacgtagtcggctggacagattggaaccttgcattgaatcccgaggggggtcctaactgggtaagaaactttgttgattcgccaattattgtggacatcacaaaggatacattttataaacaacctatgttttatcatctcggtcatttctcaaagtttattcctgagggcagtcagcgggttggactggttgcgagccaaaagaatgacttagatgcagtcgctctgatgcatccggatgggtccgctgttgtagtggtcctgaaccgcagctcgaaggacgtgccactcaccattaaagatccagccgtcggattcttggaaactatctcgcctggttatagcattcatacctatctgtggagaaggcagtag

SEQ ID NO: 2539 - DNA, 1611 bp, synthetic construct
  misc_feature 1..1611: note = source = /note="Description of Artificial Sequence: Synthetic coding sequence"
  source 1..1611: mol_type = other DNA
atggagttcagcagcccaagccgggaggagtgccccaagccgctgagtcgggtatccattatggccggctccctgacggggctactactgcttcaggccgtcagctgggccagcggagcgcggccctgtatacctaaatctttcggttactcctctgtggtttgcgtctgcaacgctacatactgcgatagcttcgaccctcctacttttccggctctaggaactttcagtcgctacgagagtactaggtccggacggcgtatggaactgtccatgggcccaattcaggctaaccacactgggactggactgcttttgaccctgcagccagagcagaaatttcaaaaggttaaagggtttggcggggcgatgacggatgctgccgcccttaacattctcgcgcttagtccacccgctcaaaacctgctgctgaagtcctatttcagcgaggaaggaatcggttacaatattatcagggtgcccatggcatcttgtgactttagtataaggacatatacctatgcagatactcctgacgactttcaactccacaacttcagcttgcctgaggaggataccaaactgaagatccctctgatacaccgcgcattacagctcgctcagaggcccgtgtctctgctggcctccccatggacatccccaacatggctgaagacaaacggagcggtgaatggcaagggcagcctcaaagggcaaccgggtgatatctaccaccagacctgggccaggtattttgttaagttcctcgacgcctatgcagaacacaaattgcagttctgggccgttacagccgaaaacgagccaagcgcaggcctgctgagcgggtacccattccagtgcctcggattcactcccgaacaccagcgtgacttcattgctcgggatcttggtcccaccttggctaattctacccaccacaatgtgcggctcctcatgctcgacgaccagcgcctactcctaccgcactgggcaaaggtagtgttgaccgatcctgaggcagccaagtacgtccacggcattgcagtccactggtacctcgatttcctcgcaccagcaaaagcaaccctaggcgagacgcatcgactgttccctaataccatgctgttcgccagtgaagcttgcgtcggaagtaaattctgggaacaaagtgttcggctgggctcctgggataggggtatgcaatacagccatagtataatcacgaaccttctgtaccatgtggtgggatggactgactggaacttagcactcaacccggaaggaggtccaaactgggtgcgcaattttgtggattccccaattatcgtggatattacaaaagacaccttttacaagcaaccgatgttctaccacttgggccactttagcaagttcattccagaggggagccaacgcgtgggactggtcgcatcacagaaaaatgatctggacgctgtcgccctgatgcaccccgacgggagtgccgtcgttgttgttttaaatagaagctccaaagacgtgcctttgaccatcaaggacccggcagtgggtttcctggagaccatatcccctggttactccattcacacttacctgtggagacgtcagtag

SEQ ID NO: 2540 - DNA, 1566 bp, synthetic construct
  misc_feature 1..1566: note = source = /note="Description of Artificial Sequence: Synthetic coding sequence"
  source 1..1566: mol_type = other DNA
atggagttctcctctccctcacgggaagagtgtccgaaaccgttgtccagagtaagcatcatggctggatctcttacgggcctgttgttgttacaggccgtgtcttgggccagcggagcaaggccttgtattcccaaatctttcgggtactctagtgtagtgtgtgtgtgcaacgctacgtattgcgactcttttgatcctccaaccttccctgccctcggtacattctccaggtacgagtcaacgcgctccggaaggcggatggaactgagcatgggccctatacaagccaatcataccggaactggccttctcttaactctgcaaccagacgccgctgcactgaatatattagcgctgtcgccgccggcacagaatcttctgctgaaatcttatttcagtgaggaaggcatcgggtataacattatacgcgtgcccatggcgagctgcgacttttctattagaacatacacctacgcagatacgcctgacgactttcagctgcataactttagtctccccgaagaagacactaagctaaagatccccttgatccaccgagccctgcaactggcccaacgtcctgtgtccctactggctagcccatggaccagtcctacatggctaaagaccaacggagctgtgaatggtaagggatccctaaaaggacagccaggagatatataccatcagacttgggcgagatacttcgtcaaatttctagatgcctatgctgagcacaagttgcagttctgggccgttacagcagagaatgaaccatccgcagggttgctatcaggttacccatttcagtgcctcggattcaccccggaacatcagcgagatttcatcgcgagggatctgggcccaacactcgcaaacagcactcatcacaacgttaggctgcttatgttggacgatcaacgcctgttactgcctcactgggctaaggtcgtgctcaccgaccctgaagcggccaagtacgttcacggcattgcggtacactggtacttggattttctcgcgcctgctaaagctacactgggcgagactcatcgcctgtttcccaacacaatgctgttcgccagtgaagcctgtgttggctcaaaattttgggagcagagcgtccgactggggagctgggatcggggaatgcagtacagccactcgatcataacaaatcttttataccatgtggtgggctggacagactggaacttggctcttaacccagaagggggacctaactgggtgcgtaactttgtggacagcccaatcattgttgatatcacaaaggatacgttctacaaacagcctatgttttaccacctggggcacttctcgaagtttatacctgaggggagtcagcgtgtgggcctcgtggccagccaaaagaacgatctggacgctgtcgccctgatgcaccctgacggctccgcggttgtggttgtccttaatagatcttcaaaggatgtcccactcactattaaagaccctgccgtcgggttcctggagactatctctccaggctattctattcacacatatctctggcgaaggcagtag

SEQ ID NO: 2541 - DNA, 1464 bp, synthetic construct
  misc_feature 1..1464: note = source = /note="Description of Artificial Sequence: Synthetic coding sequence"
  source 1..1464: mol_type = other DNA
atggagttctcctccccttctagagaggaatgcccaaagcccctgtccagggtgagtatcatggccggatccctcacgggactgctgttattacaggccgtgtcatgggcgtccggtgcacggccatgcatcccaaagtctttcggttacagctccgttgtctgcgtctgtaacgccacttattgtgacagtttcgatccccctacattccccgccttgggtacattctcacggtacgagagcactcgttcaggacgcaggatggagctgtccatgggaccgatccaggccaaccacacaggaacgggcattggctacaacataatccgagtgccaatggcctcatgtgacttttctatccggacctacacgtacgctgatactcccgatgacttccagctgcataatttctcgcttcctgaggaggacacgaagttgaagattccacttatccacagggccttgcagttggcccagcgccccgtgtccctcctggcgtcgccttggactagccctacgtggctcaaaacaaacggcgccgtcaacgggaaggggtctctaaagggccaaccaggagatatttaccaccagacatgggcccgttacttcgtgaagttcttggacgcctatgctgaacataaactgcagttctgggccgttaccgcagagaacgagccttccgctggactcctgtctggataccccttccagtgtctaggcttcacgcccgagcaccagcgcgacttcatagccagggatctcgggccgaccctcgcaaacagtactcaccataatgtacgacttctcatgttagacgatcaacgcctcctccttccccactgggctaaagttgtcctgacagaccccgaggcagcaaagtatgtgcatggaatcgccgtacattggtacctcgattttctagcgcccgccaaagccacactcggggaaacccatcgcttattcccaaacacgatgctttttgcctccgaagcctgcgttggctccaagttctgggaacagtctgttagactgggatcatgggaccggggcatgcagtatagccattccatcataaccaatctactgtatcacgtcgttggatggaccgactggaacctggccctgaatcccgagggaggtccaaattgggtcagaaatttcgtagacagtcctatcattgttgacataacaaaggacacgttttataagcagcctatgttttaccacctcggacacttcagcaagttcattcctgaagggagccagcgcgtgggcctggtggcctcccagaaaaatgacctggatgccgtcgctctgatgcacccggacggtagcgcggtggttgtggttttgaatcgtagcagtaaggatgtacctctgaccatcaaggatcccgcagtgggttttctggagacgatcagtccaggttattccatacatacatacctatggcgccgccaatag

SEQ ID NO: 2542 - DNA, 1350 bp, synthetic construct
  misc_feature 1..1350: note = source = /note="Description of Artificial Sequence: Synthetic coding sequence"
  source 1..1350: mol_type = other DNA
atggagctgtcaatggggccgattcaggccaatcacaccggaacagggcttctccttaccttgcaacccgagcagaagtttcagaaggtgaaaggctttggtggcgctatgacagatgctgcagccttgaacatcttagccttgagtccacccgcccagaacctcctgttgaaatcctacttttccgaggaaggcattggctataatattatacgtgtgccaatggccagctgcgatttctcgatcagaacgtacacctatgctgatactcccgatgattttcaacttcataacttttctctccccgaagaggacacaaagttgaaaattcccctcattcacagagccctccagctggcacagaggccagtcagtctcctagcctcaccctggacttcccctacttggctgaagacgaatggagccgttaacggtaaaggctccctcaagggacagccaggcgacatttatcaccagacatgggcaaggtatttcgtgaagttcctcgacgcttacgccgagcacaaactgcaattttgggccgtgactgcggagaacgaacctagtgctgggctgctgtccgggtacccttttcaatgcttaggctttacccctgagcatcagcgggactttatcgcgagagatctcggtcctaccttggccaatagtacgcaccataacgtgcgattgctgatgcttgatgaccaacgccttctgttgcctcattgggcaaaggtagtattgaccgatcccgaagcagctaaatacgtgcatgggattgccgtgcattggtacctcgattttcttgctcccgccaaggccactctgggagagacccacaggttgtttccgaatacaatgctgtttgcttctgaagcctgcgttggcagcaagttctgggaacagtcagtgcgtctcgggtcatgggaccgtggcatgcagtatagccactccatcattacaaacctgctgtatcatgtggtaggttggaccgattggaatttggctctgaatcccgaaggcggaccaaactgggtccgaaatttcgtggactcacccatcattgtggacattacgaaagatacgttttacaagcagcccatgttttatcacctgggacacttctccaagttcatccccgagggctcacagagggttggcctcgtagcaagccagaaaaacgatctggatgctgtggctctgatgcaccctgacggttctgcggtcgtggtcgtgttgaacagatcgtctaaggacgttcccctaactatcaaggaccccgcggtaggctttcttgagaccatcagtcccgggtactcgatccacacttacctgtggcgccgccagtag

SEQ ID NO: 2543 - DNA, 1482 bp, synthetic construct
  misc_feature 1..1482: note = source = /note="Description of Artificial Sequence: Synthetic coding sequence"
  source 1..1482: mol_type = other DNA
atgacacttaggggatggtcattccaggtgttgcccgagtctaacgctacctattgcgatagctttgatccacccactttccctgctctcggaacctttagtagatacgagagcacacggtccgggcgacggatggagttgagtatggggcctatccaagccaaccacaccggaaccggcttgctgctcacccttcagccggagcagaagttccagaaggtcaaagggtttgggggagccatgaccgatgcagctgcactgaacatacttgcccttagtccgcccgcccaaaacttgcttttaaagagctacttttccgaggagggaattggctacaatattatcagagttccgatggcatcctgcgacttctctattagaacatacacatacgcagacacccctgacgattttcagctccacaacttttcacttccagaggaagatacaaagctcaaaattccactaatccaccgggctctacaactggcgcagcgaccggtttcacttctggctagcccctggacctctcccacttggctgaaaactaacggggccgtgaatggtaaaggcagccttaaggggcaacctggagacatctatcaccagacctgggcgcgctatttcgtgaaatttttggatgcatatgccgagcataagctacagttctgggccgtaaccgctgagaatgaacccagcgctggcctgctaagcggataccctttccaatgtcttgggtttactcccgaacaccagagggacttcattgctagggacctaggacctaccttggctaattcaacacatcacaacgtccggcttcttatgctggatgatcagaggctattattaccgcattgggcaaaggtggtcctgaccgatccagaggcagccaagtatgtgcacggcatcgcggtgcactggtaccttgattttttggccccagccaaggcaacattgggagagacccacagactgtttccaaataccatgttgtttgctagtgaagcttgcgtaggcagcaaattttgggagcaatcagtacgtttgggctcctgggatcgcggtatgcaatactcccactccatcatcaccaatctgctgtaccacgtagtgggatggacagattggaacctcgctttaaaccctgaaggcggaccaaactgggtgcgtaactttgtcgatagcccaatcatagtggatatcacaaaggacactttttacaaacagccaatgttttatcacttggggcattttagcaaatttatccctgaaggctctcagagggtcgggctcgtggcttctcagaaaaatgatctggacgccgtagccctaatgcatcccgatggttctgccgttgtggtagtactgaaccgcagcagcaaggacgtccctctgaccatcaaagatcccgccgtgggctttctcgagacgatttctccgggctattctatacacacctatctgtggcggcggcaatag

SEQ ID NO: 2544 - DNA, 1272 bp, synthetic construct
  misc_feature 1..1272: note = source = /note="Description of Artificial Sequence: Synthetic coding sequence"
  source 1..1272: mol_type = other DNA
atggagttcagcagcccctcgcgcgaagagtgccccaagcccctgagtcgcgtgagtattatggccggctcccttaccggccttcttctgcttcaggctgtgagctgggcgagcggcattggatacaacattatccgggtgcctatggctagctgtgacttcagtattagaacatatacctacgccgataccccggacgactttcagctgcacaatttttctctacccgaagaggacactaaactgaagataccactgatccatagggctcttcagctggcgcagaggcccgtgtccctgttggcatcaccatggaccagtccaacctggctcaaaacaaacggggcagttaacggcaagggatcgctgaagggtcagccgggagatatttatcaccagacatgggcccgctacttcgtcaagtttctcgatgcttacgcagagcataagctgcaattctgggcggtcactgccgagaacgaacctagtgcagggctgctgtctggatacccttttcagtgtttaggcttcactcctgagcaccaaagagacttcatcgcccgcgacctggggcctactcttgccaactctacacaccacaatgtccgacttctcatgctggacgatcagcgactgctgctcccgcactgggcaaaagtcgtcctcacggaccccgaggccgctaaatatgtccacgggatcgcagttcactggtacctggatttcttggctccagccaaggcaaccctgggggaaactcataggctctttccaaacacaatgctgtttgccagcgaggcctgcgtcgggtcaaagttctgggaacagagtgtgcgccttggcagctgggatcgaggcatgcagtactcgcattcgataatcaccaacctgctgtatcatgtcgtcggttggacagactggaatctggccttgaatccggagggcggcccaaattgggtgaggaactttgtggacagtcccattattgttgatattaccaaggatacattttacaagcagccgatgttttaccatttggggcactttagcaagttcatcccagaggggtcccagcgggtgggcttggtcgccagccagaagaacgatctcgatgccgttgcactgatgcaccctgatggatcagcggttgtggtggtcttgaatagatccagcaaagatgttcctcttacaataaaggacccggcggtgggcttcttggagactattagtcctggctattccattcacacatacctttggcggcgccagtag

SEQ ID NO: 2545 - DNA, 2112 bp, synthetic construct
  misc_feature 1..2112: note = source = /note="Description of Artificial Sequence: Synthetic coding sequence"
  source 1..2112: mol_type = other DNA
atgttacggggaaggtccctttcagtgacctcactaggcggcctgccacagtgggaggtggaagagctgcctgtggaggagttgctgctctttgaggtggcttgggaagtgacgaataaagtgggagggatctataccgttatccaaactaaggccaagacaaccgccgatgaatggggggagaactacttcttaattggaccctatttcgaacacaacatgaagacgcaagtggaacagtgtgaaccagtcaacgatgcagtgaggcgggctgtagacgccatgaacaaacatgggtgccaggtgcactttggacgatggttgatagaaggatctccttatgtcgtgttgtttgatattgggtacagcgcttggaatctggatcgctggaaaggcgatctctgggaggcctgttccgtgggcatcccctaccatgaccgggaggccaacgatatgctcatattcggcagcctgaccgcctggttcctcaaggaggtgaccgaccatgcagacggcaaatacgtggtagcacagttccatgagtggcaggccggaattggcctcatcttatctagagcccgcaagctgcctatcgcgaccatatttacaactcacgcaactcttcttgggagatacctgtgcgctgcgaacatcgacttttacaatcatctcgacaagttcaatatcgacaaggaagctggtgagagacagatttaccaccggtactgcatggagagagcctctgtccactgcgcacacgtatttacaacagtgagcgagattactgcgatcgaggctgagcacatgctaaaaaggaagccagatgtagtgacaccaaacggcctgaatgtaaagaagttctctgccgtgcacgagttccagaacctgcacgctatgtataaggctaggatacaggacttcgtccggggtcacttttacggtcatcttgactttgatcttgaaaagactctcttcctcttcatcgccggtcgctacgaattctccaataaaggcgcagacatctttcttgaatccctgagccgactgaatttcctgctccgtatgcataaatctgacattacagtcatggtgtttttcatcatgcccgccaagactaacaactttaatgtggagactctcaagggacaggcagtgcgaaagcaactctgggatgtagcccattccgttaaggaaaagttcgggaagaaattatacgacgctctgctccgaggcgagatccctgacctaaacgatatccttgacagggatgatttaaccatcatgaaaagggccatcttcagtacacagcgccaatctctaccaccggtcaccacacataacatgatagacgattccactgatcctatattgtccactattaggcggattggtctgttcaataatcggactgacagagtgaaagttattcttcaccccgagttcctaagtagcacaagccctctgcttcccatggactacgaagaattcgtgagaggatgtcacctgggagtgttcccttcttactatgaaccatggggctacacccccgctgagtgtacggtcatgggaatcccttcagtcacaacaaacttgtccgggtttggttgctttatgcaggaacatgtagcagaccctactgcctatggcatctacattgtagatagaaggttccgtagccccgatgattcctgtaatcagcttactaagtttttgtacgggttttgcaaacaatcccgcagacaacgtattatacaacgcaaccggacggaacgtctgtctgatctgctcgactggagatatctgggccgatactaccaacacgcccggcacctgactctgtccagggcctttcctgacaagtttcacgtggagctaactagccccccaacaactgaaggctttaagtaccctcgccctagctccgtccctccatctccttcagggtcacaggccagctcaccacagtcctcagatgtcgaggatgaggtggaggacgagcgctatgacgaagaggaggaggcagaacgggatcggttgaacattaaaagtcccttctcactctcacatgtgccacatggcaagaagaaactgcacggcgagtacaaaaactag

SEQ ID NO: 2546 - DNA, 351 bp, synthetic construct
  misc_feature 1..351: note = source = /note="Description of Artificial Sequence: Synthetic coding sequence"
  source 1..351: mol_type = other DNA
atggattactatagaaaatacgctgccatcttcctggtgacgctcagcgtgttcctccacgtgttacattctgcacccgatgtgcaggactgtcctgagtgcactctgcaggagaacccgttcttttcacagcccggcgctccaatcctccagtgcatgggctgctgtttttcccgggcttaccccacccccctgagatctaaaaaaactatgcttgtgcaaaagaacgtgacatctgaatctacctgttgcgtggctaagtcatacaacagggtcacagtcatgggtgggttcaaagtggagaaccacaccgcatgtcactgtagcacatgttattatcataagtcatag

SEQ ID NO: 2547 - DNA, 654 bp, synthetic construct
  misc_feature 1..654: note = source = /note="Description of Artificial Sequence: Synthetic coding sequence"
  source 1..654: mol_type = other DNA
atggcaacagggagcaggacttctctgctgctcgcctttgggctactttgcctcccatggttacaggaggggagtgcatttccaacaattccactctccaggcttttcgacaatgctatgctcagggcgcaccggctccaccaattagccttcgatacgtaccaggagttcgaagaggcctacattcccaaagagcaaaagtactctttcctacagaacccacaaacctccctttgctttagcgaatcaatccctacaccatctaatcgcgaggagacacagcagaagtccaatctagaactccttcggattagccttctgctcatccagtcttggcttgagccggttcagttcttgagatccgtctttgcaaattcgctcgtgtacggagcaagcgattccaacgtttacgacctgctgaaggacttagaggaagggatccagacccttatgggaaggctagaagacggctcccctcggacaggtcagatcttcaaacagacttatagtaagtttgatacgaactcccacaatgacgacgctctactcaagaattacggattgctttattgtttccgcaaagatatggacaaggtggagacctttctcagaattgttcagtgcaggagcgtggagggctcttgtgggttctag

SEQ ID NO: 2548 - DNA, 369 bp, synthetic construct
  misc_feature 1..369: note = source = /note="Description of Artificial Sequence: Synthetic coding sequence"
  source 1..369: mol_type = other DNA
atggctactgggagccgcacttccttgcttttagcattcggccttttatgccttccttggttgcaagaggggagcgcatttcccacgataccgctgtcccgattgttcgataacgcaatgctgcgagcccatcggctgcatcagttggcttttgatacctatcaggaatttcggttagaagacggttccccccggaccggtcagatcttcaagcagacatattccaaattcgacacaaattcccacaacgacgacgcgctgctaaagaactacggtctcctgtactgcttcagaaaagacatggacaaagttgagacattcctccgcatcgtccaatgccggagcgtggaagggtcatgcgggttctag

SEQ ID NO: 2549 - DNA, 534 bp, synthetic construct
  misc_feature 1..534: note = source = /note="Description of Artificial Sequence: Synthetic coding sequence"
  source 1..534: mol_type = other DNA
atggcaacagggtctcgaacctcactccttctagctttcggtctactgtgcctgccttggttgcaggaaggcagtgcctttcccactatccccctgagtcgtcttttcgataacgcgatgctgagggcccatagattacatcaactggctttcgacacgtaccaggaattcaacttagagttgttgcggattagcctcttgctgatccagagttggttagaacctgttcagtttcttcgatcagtcttcgcgaatagcctggtatacggggcaagtgattcaaacgtgtatgatctgctcaaagaccttgaggaagggatccagacattgatgggtcggctggaggatggtagtcctaggaccgggcagatctttaagcaaacttacagcaaatttgatacaaattcacataacgacgatgccctcctgaagaattacggactcctctattgtttcaggaaagacatggacaaagtcgagaccttcctgagaattgtccagtgcaggtcagttgaaggaagctgtgggttttag

SEQ ID NO: 2550 - DNA, 609 bp, synthetic construct
  misc_feature 1..609: note = source = /note="Description of Artificial Sequence: Synthetic coding sequence"
  source 1..609: mol_type = other DNA
atggcaacagggagtcgcacctctctgctgctggcctttggactgctttgcttaccctggctccaggagggttccgccttccccactattcctctgtctagattattcgataacgctatgctccgcgcccatagactgcatcagctggcttttgatacttaccaggagttcaacccacagaccagcctgtgttttagcgagagtattcctaccccaagtaacagggaggaaacacagcagaaatccaacttagaactgctgagaatttcccttctccttattcaatcttggctggaaccagtccagttcttgagaagtgttttcgctaactccctggtgtacggggccagcgatagcaatgtctacgatctactgaaagatctggaagagggtatacaaaccttaatgggtcgcctggaagacggatccccgcgcactggtcagattttcaaacagacatattctaagtttgacaccaacagtcataacgacgacgccctgctgaaaaattacgggctgctgtattgttttagaaaagacatggataaagtggaaacgttccttcgcatcgttcaatgtcgcagcgtagagggctcatgcggattttag

SEQ ID NO: 2551 - DNA, 771 bp, synthetic construct
  misc_feature 1..771: note = source = /note="Description of Artificial Sequence: Synthetic coding sequence"
  source 1..771: mol_type = other DNA
atggctgccggctcaaggacatccttactgctcgcctttgggctgctgtgcctctcttggctccaggaaggctctgcttttccaacaatccccctttctagactgtttgataacgcaatgctgagagcacgccgcctctatcaactcgcctacgacacgtatcaggaattcgaggaagcgtacatcctgaaggagcagaaatacagttttctccaaaatccccagacctctctgtgtttttcggaatctataccgaccccctcaaaccgggtgaagacccagcagaagtcaaatctggagctcctgcgcatctctctattgctaatccagtcgtggctcgaacctgtacagctcctgcgatcggtgttcgccaattctctcgtgtacggcgcctcggactcaaatgtgtatcgtcacctgaaggatctggaagaaggcatacagacattgatgtgggtacgcgttgcccctggcatcccaaatcccggagcccccctggcatctagagactggggagagaaacattgttgtccactgttctcctcccaggcgttaacacaagagaattccccctattcttctttccccttggtgaatccaccaggattatctctgcaaccagggggcgaaggtggaaagtggatgaacgagcgcggacgcgaacaatgcccgtccgcttggcctttacttctgtttctgcacttcgcggaagctggccgttggcagccacccgactgggctgatcttcagtccgtgcttcagcaggtgtag

SEQ ID NO: 2552 - DNA, 654 bp, synthetic construct
  misc_feature 1..654: note = source = /note="Description of Artificial Sequence: Synthetic coding sequence"
  source 1..654: mol_type = other DNA
atggcagcaggatctaggacgagcctgctgcttgcctttggcctgttgtgcctaagttggctgcaagaggggtccgctttccctaccatccctctttcccgtctctttgataacgccatgttaagggctcggcgcctgtatcagctggcctacgatacttaccaagagtttgaggaggcatacatcctgaaagaacagaagtatagctttctgcaaaatcctcaaacctcactctgtttttccgaatctatacctaccccatcaaacagagttaaaacccagcagaagtccaacttggaactcctaaggatttcacttctactgatacaatcttggttagaaccagtacaacttctgcggtctgtgtttgccaattcgttggtctacggcgcaagtgattccaacgtatacagacatctcaaagatctggaggagggcatacagaccttgatgtggcgccttgaggacggaagccctaggaccggacagatattcaatcaatcttatagtaagttcgatacaaaatcccacaacgatgacgctctccttaaaaattatggccttctctattgttttaggaaagatatggacaaggtggagacctttttacgcatagttcagtgtaggagtgttgaaggaagctgcggattttag

SEQ ID NO: 2553 - DNA, 609 bp, synthetic construct
  misc_feature 1..609: note = source = /note="Description of Artificial Sequence: Synthetic coding sequence"
  source 1..609: mol_type = other DNA
atggcagctggatctaggacttccctgttactagcattcggattgctgtgcctgtcttggctgcaggaagggtctgcctttcccacaatccccttatctagattattcgataacgcaatgttaagggcccgtcgcttataccagctggcatacgacacatatcaggaattcaacccccagacttctctctgtttttctgaatcaattccgacgccgagcaacagagtgaaaacacaacagaaatctaaccttgaactcctgaggatatctcttctcctgattcaatcctggttggaacccgtgcaattgctgaggtctgtatttgctaactcgctcgtgtacggagcctccgattccaatgtctatcgtcacctgaaagatcttgaagagggtattcagaccctaatgtggcgacttgaagacggaagtcctcgcacgggacagatttttaaccagagctattcaaagttcgacaccaagtctcacaatgacgacgcattgctcaagaactacggccttctgtattgcttcaggaaggacatggacaaagtggagacttttcttcgcatcgttcagtgtcggtctgtcgagggttcttgcgggttctag

SEQ ID NO: 2554 - DNA, 738 bp, synthetic construct
  misc_feature 1..738: note = source = /note="Description of Artificial Sequence: Synthetic coding sequence"
  source 1..738: mol_type = other DNA
atggccgccggctctcgaacatcacttctgctggcatttgggcttctgtgcctttcttggctacaagaaggaagtgccttccccaccattcccctttccagactgttcgataacgcgatgcttcgggcaaggagattataccagctggcctacgacacatatcaggagtttgaggaggcatacatcctgaaagaacaaaaatacagttttcttcagaatccgcaaacatccctttgcttctcagagtcaattcccactccctctaaccgcgtgaaaacccagcagaaatcaaatttagagctgctgaggatcagtctgctacttattcagagctggttggaacccgtgcaattgttaagatccgtcttcgccaacagtcttgtgtatggtgcgtctgacagcaacgtctaccgtcacctgaaagatctggaagagggcatccagacactgattggctggaagatggcagcccctgggctcggtcggtcctcgattagtcccactgcatccctgacccagaatagaaccaccatgactcattgctccaggaccaccggatgctcaaccgcttccggcaggacatggactcggtctcggcactcgtgtgcttcttgttcagccgcactatggagggctgccgtcgcttcctcttgtccaggtggcataccagtgaccccaccccagtgtctatcctggtcctggaaggtcctcctccaatgtccaccagcactgagctag

SEQ ID NO: 2555 - DNA, 753 bp, synthetic construct
  misc_feature 1..753: note = source = /note="Description of Artificial Sequence: Synthetic coding sequence"
  source 1..753: mol_type = other DNA
atggaaaagggcccagttcgcgccccagctgaaaagccccgcggcgcacggtgttccaatgggtttcctgaaagggatccccctaggcctgggcccagccggcctgccgagaagccaccccgcccggaggccaagtccgctcagccagccgatggttggaagggagagcggccccgttccgaagaagacaacgagcttaacctccctaatctagcagcagcctatagctccattcttagctcacttggtgaaaacccgcagcgccaagggctcctgaaaactccctggagagccgcctcagccatgcaatttttcacaaaaggttaccaggagactatctcagacgtactgaacgacgcaatcttcgacgaagatcacgacgagatggttattgtaaaggatatagacatgttcagcatgtgcgagcaccaccttgtccctttcgtcggtaaggttcacatcgggtatctgccaaacaaacaggtgctgggactgtctaaattagcccgaatcgtcgaaatctacagccggcgactacaggtccaagagcgactaaccaagcaaattgccgtggccataacagaggccctccgaccagcaggagttggagtggttgtcgaagccacccatatgtgcatggtcatgagaggtgtccagaaaatgaatagcaagaccgtcaccagtaccatgctcggagttttccgagaggatcctaaaacccgagaagaattcctaaccctaatccggtcctag

SEQ ID NO: 2556 - DNA, 693 bp, synthetic construct
  misc_feature 1..693: note = source = /note="Description of Artificial Sequence: Synthetic coding sequence"
  source 1..693: mol_type = other DNA
atggagaagggccccgtccgggcccctgctgaaaaaccacggggcgctcgctgctccaacggcttccctgagagagaccccccacgccccggcccttctaggccagccgagaaacccccaaggcccgaagctaagtccgcacagccggccgacggttggaagggtgagcgccctagatcagaggaggataatgagttgaatttgcccaatctcgcagccgcctactcatctattctgtcatccctgggtgagaatccccagcgacagggcttgctcaagactccctggcgagccgcgtccgctatgcagtttttcacgaaaggttaccaggagaccatcagtgatgttttgaatgacgccattttcgatgaggatcacgacgagatggttatcgtcaaagacatcgacatgtttagcatgtgcgagcaccacctggttccattcgtaggcaaggtccacataggatacctgcctaataagcaggtgctgggtctgtcaaaattggccagaatagtagaaatctactctaggaggctgcaggtccaagaaagactcaccaaacagatcgcggtggctattacagaggcgctgcgtccagccggcgtgggtgtggtggtggaggctactaaatccaataaatataacaagggattatcctatttcctgttggccacattcctatggcagtattag

SEQ ID NO: 2557 - DNA, 753 bp, synthetic construct
  misc_feature 1..753: note = source = /note="Description of Artificial Sequence: Synthetic coding sequence"
  source 1..753: mol_type = other DNA
atggagaaaggcccggtccgcgccccagccgagaagccccgtggcgcgaggtgtagcaacggtttcccagaacgcgacccaccgagaccagggcccagtagacctgcagagaagccccctcggccagaggcaaagtctgcgcagccagccgacggttggaaaggagagcgccctaggagtgaggaagataatgaacttaacttgcccaacctggcagccgcatacagcagcatactgtcgtcacttggcgagaatccacagagacaggggctgctgaagaccccgtggagagccgccagcgctatgcaattctttaccaagggctatcaagaaacaataagcgacgtgctgaatgacgcaattttcgatgaggaccacgacgagatggtgatcgtcaaagacattgatatgttcagcatgtgtgagcaccatttggtgccgttcgtgggaaaagtgcacataggctaccttcccaataagcaggtgcttggcctgtcaaagctggcccgtattgtcgaaatctattcaagaaggcttcaggtacaagagcgacttaccaaacagatcgctgtggcaatcactgaggccttgcgcccggcgggagtaggggttgtggtggaggccactcacatgtgtatggttatgaggggagtccagaagatgaacagtaagaccgtgaccagcacaatgctgggcgtgtttcgagaggacccaaaaacaagggaagagttccttactctgatacggtcatag

SEQ ID NO: 2558 - DNA, 642 bp, synthetic construct
  misc_feature 1..642: note = source = /note="Description of Artificial Sequence: Synthetic coding sequence"
  source 1..642: mol_type = other DNA
atggaaaaagggcctgtcagagcaccggcagaaaaaccacggggagctcgctgctctaacgggtttcctgagagggatcccccccgacccgggccgtctcgtcccgctgagaagcctccccggccggaggccaagtctgctcagcctgctgatgggtggaaaggggaacggccgcggtcagaggaggacaatgaactgaatttgccaaatctggccgccgcttacagctctatactgtcaagcctgggtgagaacccacagcggcagggattgcttaagactccctggagagctgctagtgccatgcagttttttacaaaaggatatcaggagaccatttcggatgtgctgaacgacgccatattcgatgaagaccatgatgagatggtgatcgtaaaggatatagacatgttctccatgtgtgagcaccacctggtccctttcgtcggcaaggtacacatcgggtatctccccaacaagcaggtgcttggcttgagcaagctggctcgtattgtggagatatattcccggcgactccaggtgcaagagagactgaccaagcagatcgctgtcgcaatcacagaggctttacgcccagctggtgtcggcgttgtcgtcgaagcaacgtctgcggagccttag

SEQ ID NO: 2559 - DNA, 702 bp, synthetic construct
  misc_feature 1..702: note = source = /note="Description of Artificial Sequence: Synthetic coding sequence"
  source 1..702: mol_type = other DNA
atggagaaaggccctgtgagggcaccagcggaaaagccaagaggagctcggtgctctaatggctttccagagagagaccccccgagaccaggcccatcgagaccagctgagaagcctcctcggccagaggcgaaatcagcccagcctgctgatggctggaagggagagcgaccgcgctccgaggaggataacgaactcaatctgccaaatctggctgcggcttactccagcattttgtcatcacttggtgaaaatcctcaacgacaggggcttctgaagactccatggagggccgccagtgcgatgcaattctttactaaagggtaccaggagacaattagtgacgttctgaatgacgccatctttgacgaggatcatgacgagatggtgatcgtgaaagatatagatatgttcagtatgtgcgaacaccacttggtgccttttgtcggcaaggtgcacattggatatctacctaacaaacaggttcttggactgtctaaactggcacgcatagtggaaatctactcaaggcgcctgcaagtacaagagcggctgaccaagcagatcgccgtagcaatcactgaggcgttgagaccggccggcgtgggagttgttgtggaagccactaaatctaacaagtataacaaaggactgagccccctgttgtcatcttgccatctgtttgtcgcgatcttaaaatag

SEQ ID NO: 2560 - DNA, 1014 bp, synthetic construct
  misc_feature 1..1014: note = source = /note="Description of Artificial Sequence: Synthetic coding sequence"
  source 1..1014: mol_type = other DNA
atgggcccccgcgcccgtcccgctctgctgctcctaatgctcctgcagaccgcggtgctccagggtcggctccttcgtagtcactcactgcactacctattcatgggcgcttctgaacaggaccttggtctaagtttgtttgaagccctgggatacgtggatgatcagttgtttgtcttttacgaccacgaatcgagacgtgttgagccaaggactccatgggtctcttctcgaataagcagtcagatgtggctgcagcttagccagtcacttaaaggatgggaccacatgttcactgtggacttctggactatcatggagaatcacaatcacagtaaagagtctcacactctgcaggtgatcctggggtgtgagatgcaggaagataactctaccgagggctactggaagtatgggtacgatgggcaagaccacttagagttttgtccagacacgcttgattggagggctgcggaaccacgagcttggccaaccaaactcgaatgggagaggcacaaaatacgggctcgacagaatcgcgcctacttggagagagactgtcctgctcagcttcagcagctgctcgaactcggaagaggcgttttggatcagcaggtgcctcccctggtgaaagtgacccaccacgtgactagctccgtaactaccctgagatgtagagcacttaactactatccccagaacatcacaatgaagtggctaaaggataagcagccgatggacgccaaggagtttgaacccaaagacgtgctccctaatggcgacggaacctatcagggatggatcacactggctgtgccaccaggggaggaacagcggtatacctgtcaggtggaacatccgggcctcgatcagccgctgatcgtgatatgggagcctagcccaagcggaacgctggtgattggagtcatctcaggtatcgctgtgttcgtggtcatcctatttatcgggatattgtttatcattttgagaaaaagacagggttcctcgttctag

SEQ ID NO: 2561 - DNA, 771 bp, synthetic construct
  misc_feature 1..771: note = source = /note="Description of Artificial Sequence: Synthetic coding sequence"
  source 1..771: mol_type = other DNA
atgggcccacgggccaggcccgcacttctcctcctcatgctccttcagacagcagttttacagggtcgtcttctgcgctcccacagcctgcattacctattcatgggcgcaagtgagcaggacttgggactgagcttatttgaggctctcggatacgtggatgaccagctgttcgtgttttacgatcacgagtccagacgggttgagcctagaaccccgtgggtcagtagtcgcatttcctctcagatgtggcttcagctaagtcagagtcttaaaggctgggatcacatgttcaccgtcgacttctggactatcatggaaaaccacaatcacagcaaagtgccgcctttagtcaaggtgacccatcatgtcacctcgtctgtgaccactctccggtgccgcgcgctgaattattatccacagaacattactatgaagtggcttaaagataaacagccgatggacgctaaggaattcgaacctaaagatgttctgccaaatggcgacggaacgtaccaggggtggattactcttgcagtgccccccggtgaagaacaaagatacacatgtcaggtggagcacccaggactggaccagcccctcatcgtgatatgggagccatcaccttcaggcaccctcgttattggagtcatttctggaatagcggtattcgtcgtcattctattcatcggaatcctgtttatcattctgcgtaagcggcaagggtcgaggggcgccatgggccactacgtcctggctgagagggaatag

SEQ ID NO: 2562 - DNA, 729 bp, synthetic construct
  misc_feature 1..729: note = source = /note="Description of Artificial Sequence: Synthetic coding sequence"
  source 1..729: mol_type = other DNA
atgggcccccgggccaggcccgccctgctgctactaatgcttttgcaaacggcggtactgcagggaagactgctgcgctcgcactcactccactacttgttcatgggagcctccgaacaagacctcggcctttcgttatttgaggctctcggctacgttgacgatcaactgtttgtcttttacgatcacgagtcaagacgagtggagcctaggacaccttgggtgtcgtcccgtatctcctcccagatgtggttgcagctgtcacagtccttgaagggctgggatcatatgtttacagtcgatttctggactatcatggaaaaccacaaccacagtaaggtgactacattgcggtgcagggccctaaattactacccccagaacattaccatgaaatggctaaaggacaaacagcctatggatgctaaggagttcgagcctaaagatgttctgcccaacggcgatggtacatatcaaggttggataaccctggccgttccccccggcgaggagcaacggtatacttgccaagtggagcatccgggactggatcagcccttaattgtgatttgggagccttccccgtccgggacgctcgtgattggggtgatatctggtattgctgtatttgtcgtgatccttttcattgggatactttttatcattctgaggaaaaggcaggggtcccgtggtgctatgggccactatgtcctggcagagagagaatag

SEQ ID NO: 2563 - DNA, 783 bp, synthetic construct
  misc_feature 1..783: note = source = /note="Description of Artificial Sequence: Synthetic coding sequence"
  source 1..783: mol_type = other DNA
atggggccccgcgctcgccctgctcttctgctcctcatgctgctgcagaccgcggtgctgcagggaagactcctgcagagccacaccttacaggtgatacttggctgtgagatgcaggaggataacagtacagaaggatattggaagtacggatatgacggtcaggaccacttggagttctgccccgacacactggactggcgggcggccgaaccccgagcttggccgaccaaactagaatgggagcgccataagatccgagccagacagaacagagcctatctggaacgagactgtccggcacaacttcagcagcttcttgagttgggcaggggcgtactggatcaacaagtgccacctctggtgaaggtgacccaccacgtcacatcaagtgtgacgaccttgcgatgcagagccttaaattactatccacagaatatcaccatgaagtggctcaaggataaacagcctatggatgccaaggagtttgagcctaaggatgtcttgccaaatggcgacggaacataccagggatggatcaccttggctgtgcccccaggcgaagagcaaagatacacctgccaggtggaacaccccgggctggaccaacctttaatcgtgatctgggaaccgtcaccctccggcacccttgtgattggtgtgatctccggaatcgctgtgtttgtcgtcatcctttttatcggaattctgtttatcatcctgcgaaagcgtcagggaagcagaggcgcaatgggccactacgttctcgctgaaagggaatag

SEQ ID NO: 2564 - DNA, 231 bp, synthetic construct
  misc_feature 1..231: note = source = /note="Description of Artificial Sequence: Synthetic coding sequence"
  source 1..231: mol_type = other DNA
atgggcccaagagcccggccagccctgctgcttcttatgttattgcaaaccgccgtgctccagggaaggctgctccagccctcaccttccggcactctggtgatcggggtgatttccggtattgccgtgttcgtggtaatactgttcataggtattctgttcattatactccgcaaacggcaagggtcgcggggagctatgggccattacgtgttagccgaacgagaatag

SEQ ID NO: 2565 - DNA, 507 bp, synthetic construct
  misc_feature 1..507: note = source = /note="Description of Artificial Sequence: Synthetic coding sequence"
  source 1..507: mol_type = other DNA
atgggtcctagggctagacctgccctcctgctgctaatgctgctccaaacggccgttctacaaggtcgactcctgctcccaccccttgtgaaggtgacccatcacgttaccagttccgttacaactctgagatgtcgcgccttgaattactacccacagaatattaccatgaagtggcttaaggacaagcaacctatggatgctaaggaatttgagccaaaagacgtcctgcccaacggagacggtacatatcagggctggattacacttgcagtgccccccggcgaagagcagcggtacacctgtcaggtggagcatcctgggctcgatcaaccactcatcgtgatctgggaacctagcccctcaggcactcttgtcattggagttataagcgggattgcagtgttcgttgtgatcctatttatcggaatactctttattatactacggaaaaggcaaggtagcagaggagccatgggacactacgtgctggcggagagagaatag

SEQ ID NO: 2566 - DNA, 1047 bp, synthetic construct
  misc_feature 1..1047: note = source = /note="Description of Artificial Sequence: Synthetic coding sequence"
  source 1..1047: mol_type = other DNA
atgggccctcgcgctaggccggccctgctgctgttaatgctgctgcaaacggcagtcctgcagggtcgacttcttcgatctcactctctgcactacttattcatgggtgcatctgaacaagacttaggattgtccttgttcgaggccctggggtatgtggacgaccagttgtttgtgttttatgaccacgagtcgcgcagggttgagcccagaaccccctgggtgtcttctagaatctcctcccaaatgtggcttcaactgagtcagagcctgaaagggtgggaccacatgttcaccgttgacttctggactataatggagaaccacaaccacagtaaggagtcccatactttgcaggtgatccttggttgcgagatgcaggaagacaactccaccgaaggatactggaaatacggctatgatggccaggatcacctggagttctgccccgacacgctggactggcgggcagccgagcctcgggcatggccaacgaaattagagtgggagcgccataaaatcagagccaggcagaatcgtgcctacctggagcgtgactgcccagcgcaacttcaacagttgctggaattgggaagaggggtgctggatcagcaggtccctcctttggtcaaagtgacccatcatgttacgtccagcgtaacaactctacgctgcagagctctcaactattacccacagaatatcaccatgaagtggcttaaagacaagcagcctatggatgccaaagaattcgaacctaaagacgtgcttcccaatggcgatggaacttaccaggggtggatcacactggctgtccctccaggtgaagagcagcggtacacatgccaagtagagcacccgggactcgatcagcccttaatcgtaatttgggaaccctccccctccggaactctggtgattggggtgatcagcggcatcgcggtatttgtggtgatattgtttataggcatcctgtttataattctacgcaaacgccagggcagcagaggcgccatgggtcactacgtgctcgctgaacgtgaatag

SEQ ID NO: 2567 - DNA, 978 bp, synthetic construct
  misc_feature 1..978: note = source = /note="Description of Artificial Sequence: Synthetic coding sequence"
  source 1..978: mol_type = other DNA
atgggcccaagagctcgcccagccctcctgctgcttatgttactacagaccgcggtgctgcaaggtagactactgcctcttggctacgtagacgaccagctcttcgtgttttatgatcacgagagtcgaagggtagaacctcgtaccccatgggtttcgagccgaatcagctcccagatgtggttgcagctgagtcagagtttgaaaggctgggaccacatgtttaccgtcgatttctggactatcatggaaaatcataatcacagtaaggaaagccataccctgcaggtcattcttggttgcgagatgcaggaagataacagcactgagggatattggaaatacggctacgatgggcaggaccaccttgaattctgtcccgacactctagactggcgagcagccgagccacgggcctggcctaccaagttagaatgggagcggcataaaataagggctcgccagaatagagcatatttggaacgggattgcccggcacagttgcaacagctcttagaactgggtcggggagtgctggaccaacaggttccccccttagtcaaggttactcaccacgtgaccagcagtgtgactacgcttcgctgcagggcccttaactattacccgcagaacattactatgaaatggctgaaggataagcagccgatggatgccaaggagtttgaacccaaagatgtcctacctaatggagatggcacataccaggggtggattactttagcagtgcccccaggcgaggaacagaggtatacttgccaggtcgaacacccaggccttgaccagcccctgatagtgatttgggagccttcgcccagtggtactctggtcataggagtgattagtgggatcgctgtttttgttgtgattctgttcattggcatattgtttatcatcctcaggaagcgccagggcagtcgaggagctatgggccattatgttctggctgagagagagtag

SEQ ID NO: 2568 - DNA, 1005 bp, synthetic construct
  misc_feature 1..1005: note = source = /note="Description of Artificial Sequence: Synthetic coding sequence"
  source 1..1005: mol_type = other DNA
atgggacccagagctagacccgccctgttgctgcttatgctactgcagactgccgtgctgcaggggaggcttctaagaagccacagcctgcactacctcttcatgggggccagcgaacaagacttaggactatccttgttcgaggctctgggctacgtcgacgaccaattgttcgtattctacgaccacgaatccagaagggtggagccgaggaccccatgggttagctccaggatttccagccagatgtggttgcaactttcccagtcactcaaaggctgggaccacatgttcactgttgacttttggactattatggagaatcataatcactccaaagagagccatactctccaagtgatcttggggtgcgagatgcaggaggataacagcacagagggttactggaagtacgggtacgacggacaggatcacctcgaattctgcccagacactctagactggagggcagcagaacctcgggcttggccgaccaagctcgaatgggagaggcacaaaatccgggccaggcagaatcgcgcatatctggagcgtgattgccccgcacagctgcagcagttactggagctcggacgcggcgtgttagaccagcaggtcactacattacggtgccgggctctaaattattaccctcaaaacatcacaatgaagtggctgaaagataagcaacctatggacgctaaagaatttgaacctaaggatgtattgccaaacggggacggtacttaccaggggtggatcaccttggccgtcccccctggcgaggagcagagatatacctgtcaggttgagcaccccggtcttgaccagcctctgattgtcatatgggaaccctctccatcggggaccctagtgattggagtcatctccggcatcgccgtatttgttgtcattctgtttatcgggattttgtttatcatccttcgtaagcggcagggttctcggggcgccatgggccactacgtactggccgaacgtgaatag

SEQ ID NO: 2569 - DNA, 1038 bp, synthetic construct
  misc_feature 1..1038: note = source = /note="Description of Artificial Sequence: Synthetic coding sequence"
  source 1..1038: mol_type = other DNA
atgggccctagggcacgacccgctctcttgctgttgatgctgctgcagaccgccgttctgcagggccgcctcctccggtcgcatagtttgcactatctttttatgggggcctctgaacaggacctggggctgtcactgttcgaggcactcgggtatgtggacgatcagcttttcgtgttttatgaccacgagtcccgaagggtggagcctcgcacaccttgggtgtcctcgcggatctcctctcagatgtggctccagctgtcacagagcctgaagggctgggatcacatgttcactgtagatttttggacaattatggaaaaccataaccattcgaaggagagccatacattgcaggttatcctgggatgcgaaatgcaggaggacaactccacagaagggtattggaaatacggatacgacggacaggaccacctggagttttgcccagatacgctagattggcgcgctgccgagcctagagcatggccaacaaaactggaatgggaaaggcacaagattcgggcccgtcaaaatagagcttaccttgagcgcgactgtcccgcccagctccagcagctcctggagctgggccgtggtgtgttagatcaacaagaaggcagcgagtcttcctctctgcctggcaaggtgactactctccggtgcagggccctgaactactaccctcagaatataacaatgaaatggcttaaagacaaacagcctatggatgcaaaggaatttgaaccaaaggacgtactccccaatggtgacggcacctaccagggctggatcacacttgccgtcccacccggcgaagaacagagatacacttgccaggtcgagcatcccggtctggaccagccattgattgtgatttgggaaccctctcccagtggtacgttggtgattggtgtgatttcaggtatcgctgtttttgtagtcattttgttcatcggcattctcttcataatcctgcgcaagagacaggggagtcgcggagcaatgggccattatgtactggccgagcgcgaatag

SEQ ID NO: 2570 - DNA, 741 bp, synthetic construct
  misc_feature 1..741: note = source = /note="Description of Artificial Sequence: Synthetic coding sequence"
  source 1..741: mol_type = other DNA
atgggccctcgcgctcggccagccctgttgctgctgatgctcctccagacggctgtgctgcaggggcggctgctgcagagtcacacgttacaggtcatcctgggatgtgaaatgcaggaggataactctacagaaggctattggaaatacggttatgatgggcaggatcatctcgaattctgcccagatacccttgactggcgagcagccgaaccccgggcctggcccacgaagcttgaatgggaaaggcacaaaatccgggcaaggcagaatagggcttaccttgaaagggactgccctgcacaattacagcagttgctggagctggggaggggagtgctggatcagcaggtcacgacactgcgctgtcgggcgcttaattactatccacagaatatcactatgaaatggctgaaggacaagcaacctatggacgctaaggaatttgaacccaaagatgtgctacctaacggtgatggcacataccaagggtggattaccctcgctgtccccccgggcgaagaacagcgctatacttgtcaggtagaacatccaggcttggatcaacccctgatcgtgatctgggaacctagtccctcgggtacactcgttataggggtaatctctggaatcgccgtctttgtcgtgatccttttcatagggattctgttcattatcttacggaaaagacaagggtctcgcggcgcaatgggacattacgtgctggcggaacgagagtag

SEQ ID NO: 2571 - DNA, 486 bp, synthetic construct
  misc_feature 1..486: note = source = /note="Description of Artificial Sequence: Synthetic coding sequence"
  source 1..486: mol_type = other DNA
atggggccacgtgcccgaccggcccttctcctgttgatgttattacaaactgctgtgttacaggggagactgctgcgctcacactccctgcactacctcttcatgggtgcttcagaacaggatttggggctgtctctgttcgaggcactggggtacgttgatgaccagctgttcgttttttatgaccacgagtctcgacgggtcgaaccccgtaccccctgggtgagctcaaggatttcttcccagatgtggttgcagttgagtcaaagtctaaaaggctgggaccacatgtttactgttgacttctggacaattatggaaaatcataaccacagtaaggagtctcatactctccaggtgatattggggtgtgaaatgcaggaagacaacagcaccgagggttactggaagtatgggtacgatgggcaggtgctgcaggacaccatttacagttccgaggtgtcctcgctgggcattaaattctag

SEQ ID NO: 2572 - DNA, 366 bp, synthetic construct
  misc_feature 1..366: note = source = /note="Description of Artificial Sequence: Synthetic coding sequence"
  source 1..366: mol_type = other DNA
atggagaaccacaatcactcgaaggagtctcatactctgcaggtcatcttaggttgcgagatgcaagaggacaactccacagagggatactggaagtacggctacgatggccaggaccacctggagttctgtccagataccctggattggcgggctgccgagccaagagcttggcctaccaaattagaatgggagagacacaaaattagagccaggcagaacagggcatacctggaacgagactgtccagcccaacttcagcagttgttggagctcggccggggagtgctggaccagcaagtacctcccctcgtgaaagtcactcaccatgtgagtcatccagcacagcctagcaaggaatcttag

SEQ ID NO: 2573 - DNA, 1281 bp, synthetic construct
  misc_feature 1..1281: note = source = /note="Description of Artificial Sequence: Synthetic coding sequence"
  source 1..1281: mol_type = other DNA
atgggagaaccaggccagtcaccgagccctcgatcatcgcacggcagccctccgacactgagcaccttgactcttttgctgctgctctgcggccacgcccacagccagtgtaagattctgcgttgtaatgcagagtacgtgtccagcacactctccctgcggggagggggttcttcgggcgctctgcggggcggcggaggtggcggccggggagggggcgtggggtccgggggcttatgtcgcgccctcaggtcctacgccctgtgcactcggaggactgctaggacatgcaggggcgacctggcttttcattccgccgtccacggcattgaagatcttatgatccagcataactgttcccgccaagggcctacggctccccccccaccacgaggtccggccctacctggtgccggctcaggtctgcccgcccccgacccttgcgactacgagggccgcttttcacgcctgcacggtcggcctcccggctttctgcattgcgccagtttcggagaccctcatgtgaggagtttccaccatcattttcacacttgtagggtccaaggagcctggcctctgctggataacgattttttatttgtgcaggccacttctagccccatggctctcggcgctaacgccacagcgacacgcaagcttacgattatctttaagaatatgcaggagtgcattgatcagaaggtctatcaagcagaggttgacaatttaccagtcgcctttgaggatggttctattaacgggggcgataggcccggcgggtcctcattgagtatccagactgctaaccccggcaatcatgtggagattcaggcagcgtacatcggaacaacaattattatcaggcagaccgccggacaactaagctttagtattaaagtggcagaggacgtagctatggccttttcggccgagcaggacctccaattatgtgtggggggctgccccccttcgcaacgcctctcaaggtccgagagaaacaggcgtggagcaattactattgacactgcaaggcggctctgcaaggaagggctcccagtggaggacgcatattttcactcttgcgttttcgacgtgcttatcagcggtgaccccaacttcacagtagctgcccaggccgcacttgaggacgcaagagcctttttgccagacctggagaaactccatctctttccatctgacgctggagtccctctctcttcagcgaccctccttgccccactcctttcaggtctctttgtgttgtggctctgcattcagtag

SEQ ID NO: 2574 - DNA, 942 bp, synthetic construct
  misc_feature 1..942: note = source = /note="Description of Artificial Sequence: Synthetic coding sequence"
  source 1..942: mol_type = other DNA
atgatccaacacaactgctctaggcaagggcctactgctcctcccccacctcggggtccagctttgcctggagcgggttctggactgcccgcccctgacccgtgtgactatgagggccggttctctaggctgcatggcagaccccccggatttctgcattgcgcatcattcggggatccacacgtcaggagcttccatcaccattttcatacctgcagggtgcagggggcctggccattactggacaacgactttctgttcgtccaggccacgagctccccaatggctctgggggccaacgcaacagccacccgaaaattgaccattatcttcaagaacatgcaggaatgcattgaccaaaaggtctaccaggctgaggtggacaatttgcctgttgctttcgaggacggtagcatcaatgggggcgatcggccgggtgggtcatcactctcaatccagaccgctaatcccgggaatcacgtcgagatacaggctgcgtatattggaacaacaatcattattaggcagacggccggccagctgagcttttctattaaggtggcagaagatgtagccatggcattctcggctgagcaggacctgcaactttgtgtgggaggctgccctccctcgcagagattatccaggtctgagcgaaataggaggggtgcaataacaatcgacaccgctcgccgattgtgtaaggaggggctccccgtggaagatgcctacttccattcctgtgtattcgacgttctcatatccggggatccaaatttcactgtcgcagcccaggcagccctggaggatgcacgcgcgtttctgccagacctggagaagctccacctcttcccctcagacgcaggagtcccgctctcatcagcaaccctgctggcaccccttctgagtgggctgttcgtgctgtggctctgtattcagtag

SEQ ID NO: 2575 - DNA, 282 bp, synthetic construct
  misc_feature 1..282: note = source = /note="Description of Artificial Sequence: Synthetic coding sequence"
  source 1..282: mol_type = other DNA
atgggggaacccgggcagtccccatcgcctagaagctcccatggaagtccacccaccttaagtacccttacgctactgctcctgctgtgtggacatgcgcactcacaatgtaaaattctccggtgtaacgctgagtacgtgtcgagtacactgagcctccggggaggcgggtcttccggggccctgagagggggcggcggggggggtcgcggaggcggagtcggtagcggcggcctgtgtagggctcttcgttcatatgcactatgcaccagaagaacctag

SEQ ID NO: 2576 - DNA, 603 bp, synthetic construct
  misc_feature 1..603: note = source = /note="Description of Artificial Sequence: Synthetic coding sequence"
  source 1..603: mol_type = other DNA
atgcaggagtgtatcgatcagaaggtgtaccaagccgaggtcgataaccttccagtggcctttgaagatggcagtataaatggcggggatcggcccgggggctcatccttatcaatacagactgccaaccccgggaaccacgtcgaaatccaggcagcttatattggcactacaattattattagacagactgctgggcaactgagcttctccatcaaagtggcagaggatgtggctatggcattcagtgcggagcaagacctgcagctgtgcgtgggcggctgccctcctagccagcgactctctcgcagcgagcggaataggcgcggtgcaataacaatcgatacagcgcggcgactgtgcaaggagggattgccggttgaagacgcgtattttcactcttgtgtgtttgacgtgctgatatccggcgaccccaactttaccgtggcagcccaggccgctctcgaagatgcgagggcctttctccccgatttggagaagctgcacttatttcctagtgatgccggggtcccactgtcttctgctacgctgctggctcctctgctgagtggcctctttgtgctgtggctgtgtatacaatag

SEQ ID NO: 2577 - DNA, 603 bp, synthetic construct
  misc_feature 1..603: note = source = /note="Description of Artificial Sequence: Synthetic coding sequence"
  source 1..603: mol_type = other DNA
atgcaggagtgcatcgaccagaaagtgtaccaggccgaggtggacaatctaccagtggcattcgaggatggatcaatcaatggtggcgatagaccaggaggctcatccctatctattcagacggcaaaccctggtaatcacgtggagattcaagcggcatacattgggaccactatcatcattagacagacagcaggccagttgagcttcagcatcaaggtcgctgaagatgtcgctatggctttttctgccgagcaagaccttcagctgtgcgtcggcggatgccccccttcccagagactctccaggtcagaaagaaatagacgcggcgccatcaccatagacacggcgagaagactctgcaaggaaggtctcccagtggaagacgcctactttcactcttgcgtgtttgatgtccttatatccggtgatccaaacttcaccgttgcggcacaggccgccctcgaggacgctcgggcttttctacctgacttagagaagctgcacttgtttcccagtgacgccggcgtgcccctgagctctgctactctgctggcacccctgctgtccggcttattcgttctgtggctctgtattcagtag

SEQ ID NO: 2578 - DNA, 603 bp, synthetic construct
  misc_feature 1..603: note = source = /note="Description of Artificial Sequence: Synthetic coding sequence"
  source 1..603: mol_type = other DNA
atgcaggagtgcatcgatcagaaagtataccaggccgaggtagacaatctccctgtcgcgtttgaggatggtagtattaatggcggagacagaccaggggggagtagcttatcaattcagacagcgaaccccggcaaccacgtggaaatccaggctgcatacatcgggaccacaattattataaggcaaacagccgggcagttgtcttttagcatcaaagtcgcagaggacgtggctatggcattctccgccgagcaggaccttcagctctgtgttggcggttgcccccctagtcagaggttgtctaggtctgaaagaaaccgaaggggggcgataaccattgacaccgcaagaagactctgcaaggaaggattgccggtggaggacgcctatttccattcttgcgtcttcgatgttttaatcagcggcgatcccaatttcacagtcgctgcccaggctgcactggaggatgccagagcgttcctgccggacctggagaaactccacctgtttcctagcgacgccggcgtgcctttgagcagcgccacgctgcttgcacctctgttgagcggtctgtttgtgttatggctttgcatccaatag

SEQ ID NO: 2579 - DNA, 603 bp, synthetic construct
  misc_feature 1..603: note = source = /note="Description of Artificial Sequence: Synthetic coding sequence"
  source 1..603: mol_type = other DNA
atgcaagaatgtattgatcagaaggtgtaccaggccgaagtggacaacctgcccgtcgctttcgaggatggctctatcaatgggggcgatcggccaggcggtagctccctgtctatccaaaccgcaaaccctggaaatcacgtggagatccaggccgcttacattggtactactatcataatccgacaaacagccggacagctcagctttagcattaaggtggctgaggatgtagctatggcattttccgcagagcaggatctgcagctatgcgtaggagggtgtccaccatctcagagactcagccgaagcgagaggaaccgacgcggagctataaccatcgacaccgccagaaggttgtgtaaagaaggactgccggtcgaggatgcctattttcacagctgtgttttcgacgtgttgataagtggtgaccctaattttactgtcgccgcgcaggctgctctcgaggacgctagagcatttctgcctgacctcgagaaactgcatctctttcctagcgacgcgggcgtgccactgagttcagcaacactgctggccccactgctaagcggcttattcgtgctttggctgtgcatccagtag

SEQ ID NO: 2580 - DNA, 1905 bp, synthetic construct
  misc_feature 1..1905: note = source = /note="Description of Artificial Sequence: Synthetic coding sequence"
  source 1..1905: mol_type = other DNA
atgccttcggacctggcaaagaagaaagcagccaaaaaaaaggaggcggcgaaagcgagacagcgaccacgcaaaggacacgaggagaacggagacgtcgtgaccgagcctcaggttgccgagaagaacgaagccaacgggcgtgagactaccgaagtggatctgctgaccaaggagctcgaggactttgagatgaaaaaagcagcagcacgggcagtaaccggagtactagccagccaccctaattctaccgatgtccatatcatcaatctgagccttacctttcatggccaggagctgctaagcgacactaagctcgagttaaattcaggcaggcgctatggcctgataggccttaatggaatcggaaagagcatgttgctttctgccataggaaaacgcgaagtgccaatccctgagcacatcgatatataccatctaaccagggagatgccgcctagtgacaaaactccactgcattgcgtcatggaagttgataccgaacgggccatgttggagaaagaggccgagcgcttagcacacgaggacgccgagtgtgagaagcttatggagctatacgagcgcctggaggagctggatgccgataaggcagagatgagggcgtcgcgcattctgcacgggttgggattcactccggctatgcaacgaaaaaagttgaaggacttctcaggcggatggcgcatgagagtggcactagctagggcactgtttattcgtcccttcatgctgcttctggatgagccaactaatcatttggatctcgacgcctgcgtctggctggaggaggaactgaaaactttcaagcggatcctcgttctagtgtctcattctcaagatttcctgaacggtgtgtgtacaaatatcatccacatgcataataagaagctgaagtactataccggaaactacgatcagtatgtcaagaccagattagagctcgaggagaaccagatgaagaggttccactgggaacaggaccagatcgcccacatgaagaactacattgcgcgcttcggccacggtagtgctaaattggcccggcaggcccagtcgaaggaaaagacccttcagaaaatgatggcttccggacttaccgagagggttgtgtctgacaaaactctgagcttttattttccaccatgcggaaaaatcccgccaccagtcataatggttcaaaacgtcagttttaagtacactaaggatggcccttgcatttacaataatctcgaatttgggatagatttagatacgagggtcgcgctcgtgggtccaaatggggcaggtaagtctaccttgctcaagctactcactggcgagctgctgccaacagatggaatgataagaaagcatagtcacgtgaagattggtcgctatcatcagcaccttcaggagcaactggacttggatctgagccccctcgaatatatgatgaaatgctatcctgaaatcaaagagaaagaggagatgcgcaaaattatcggccgatatggcctgacaggtaagcagcaggtgagtcctatacgcaatctatccgacggccagaaatgtagagtgtgcttagcttggctcgcctggcaaaatccccatatgctgttccttgacgaacccacaaatcatcttgacattgagacgatagatgcactggcagacgccattaacgagtttgagggaggaatgatgcttgtgtctcacgatttcagactcattcagcaagtggctcaggaaatttgggtttgtgagaaacagaccattactaaatggccaggcgacatcctggcatataaggagcacctgaaatctaagctggtcgacgaagaaccacagctcacaaaacgcacccacaacgtctgcacgttgaccttggcgtctctcccaagaccttag

SEQ ID NO: 2581 - DNA, 555 bp, synthetic construct
  misc_feature 1..555: note = source = /note="Description of Artificial Sequence: Synthetic coding sequence"
  source 1..555: mol_type = other DNA
atgtgggtaacgaagttacttcccgcacttctgctacagcatgtgctgttgcaccttctgctcctgccaatcgccatcccgtacgccgaggggcagagaaagcgtagaaacacaattcacgagtttaaaaaatccgctaagaccactctcataaagattgatccagcactgaaaatcaagacaaaaaaagtgaacactgcagaccagtgcgcaaataggtgtacacgcaacaagggacttccttttacatgcaaggcctttgttttcgataaggccaggaagcagtgcttatggtttcctttcaattccatgagttcaggtgtgaagaaggaatttggtcacgaattcgacctttatgagaataaagactatatacgcaactgcattattggtaaaggcaggagctataagggcacggtttcaatcactaagtctggtataaagtgccagccctggagtagcatgatcccacatgagcattctggaggtgacgactgcctcgtggagagtaccttctactcgatccctttttggggccacaatagcgctaggtag

SEQ ID NO: 2582 - DNA, 891 bp, synthetic construct
  misc_feature 1..891: note = source = /note="Description of Artificial Sequence: Synthetic coding sequence"
  source 1..891: mol_type = other DNA
atgtgggtcacaaagctactcccagctctcctactgcagcatgtgctcctgcacctcctgcttttacccatcgctattccttacgccgagggacagcgcaagcgtagaaatactatccacgaattcaagaaatccgccaagactacgctgattaaaattgatccagccctgaaaattaagaccaagaaggtaaacactgccgaccagtgcgctaatcgctgcacccgaaataaaggactgccctttacatgcaaagcattcgtcttcgacaaggctagaaaacagtgtctttggtttcctttcaatagtatgagcagcggtgtaaagaaggagtttggtcatgagtttgatctttatgaaaataaggactacatccgaaactgcattatcgggaaggggagaagctacaagggcaccgtttcgatcactaagtcaggcatcaagtgccagccctggtcatcaatgatacctcatgaacattcatttctcccatcctcatatagaggaaaagacctccaggagaactattgccggaaccctcggggcgaggagggggggccatggtgttttacatctaatccggaggtgcggtatgaggtttgtgatatccctcagtgctcggaggtggagtgcatgacttgcaacggagagagttacagggggttgatggatcacactgagtcaggaaaaatctgccagcggtgggaccaccagactccccatcggcataaatttttacccgagagatatcctgacaaaggcttcgacgacaattattgtcgaaaccccgacggccagcccagaccctggtgctacacccttgacccacatacccggtgggaatactgtgcaatcaagacttgcggcgacataacctgggccctaaattag

SEQ ID NO: 2583 - DNA, 426 bp, synthetic construct
  misc_feature 1..426: note = source = /note="Description of Artificial Sequence: Synthetic coding sequence"
  source 1..426: mol_type = other DNA
atgtgggtgacaaagctcctgccagctctgctgctccagcatgtgttactgcacctgttgctgttgccaatcgctataccttacgctgaaggccaaaggaaacggcgtaacacaatccacgagtttaaaaaaagcgccaagacaaccctgatcaagattgatccagccttgaagattaaaaccaaaaaggtgaacacagctgaccagtgtgccaaccgatgcaccaggaataagggcctgccttttacctgcaaggccttcgtgtttgataaggctaggaaacaatgtctttggtttcctttcaattcgatgagctccggggtcaagaaggagttcggtcatgagttcgacctgtacgagaataaagattatatcagaaactgcataatcgggaaaggccgcagttacaagggcaccgtttcttag

SEQ ID NO: 2584 - DNA, 357 bp, synthetic construct
  misc_feature 1..357: note = source = /note="Description of Artificial Sequence: Synthetic coding sequence"
  source 1..357: mol_type = other DNA
atgtgggttaccaagttgctaccggctctccttttgcaacacgtccttctccaccttctgctactcccaatagcaataccctacgccgaaggacagcgcaagcgcaggaacactattcatgagtttaaaaaaagtgcaaagactacattaattaagatcgatccagccctgaagatcaagaccaagaaggtgaatactgcagaccagtgtgcgaatagatgcacccggaacaagggccttccctttacttgcaaggcttttgttttcgataaagcgaggaagcagtgtctgtggtttccctttaactctatgtcttccggcgtaaagaaggaattcggtcacgagttcgatttgtag

SEQ ID NO: 2585 - DNA, 633 bp, synthetic construct
  misc_feature 1..633: note = source = /note="Description of Artificial Sequence: Synthetic coding sequence"
  source 1..633: mol_type = other DNA
atgtgggtgacaaagttactacctgccttgctcctgcagcatgtgctcttgcatttacttcttctgcccattgccatcccctatgcagagggccagcgcaagcggaggaataccattcacgaattcaagaagtctgcaaaaaccacccttatcaaaattgacccggcgctgaagatcaagacaaagaaggtgaataccgctgaccaatgtgcaaaccgatgcaccagaaataaggggctgcctttcacctgcaaggccttcgtgtttgataaagcccgcaagcaatgtctgtggtttcctttcaactctatgagctcgggagttaaaaaagaatttggccacgaatttgacttatacgagaacaaagattacatcaggaactgcataattggtaaggggagatcctacaagggcactgtaagcatcacaaaaagtggcatcaaatgtcaaccttggtcgtccatgataccgcacgaacatagcttcctccctagctcctatagaggaaaagacctccaggagaactactgtcgcaacccaaggggggaggaagggggaccctggtgcttcacttctaatcctgaggtgagatacgaggtatgcgatatcccacagtgtagcgagggaaagtag

SEQ ID NO: 2586 - DNA, 873 bp, synthetic construct
  misc_feature 1..873: note = source = /note="Description of Artificial Sequence: Synthetic coding sequence"
  source 1..873: mol_type = other DNA
atgtgggtcaccaagctactgcccgcactcctactgcaacatgtcctccttcacctgctactcctgcctattgccatcccttacgccgaaggccaacgaaagcgccgtaacaccatccacgagtttaagaagtcagccaaaactactcttatcaagatagaccctgctttaaaaatcaagacgaaaaaggtgaacactgcagaccagtgcgctaacagatgtacccgaaataagggtttgcctttcacctgcaaagcattcgtgtttgataaggcacgcaagcagtgcctatggttcccattcaactcaatgagttccggagtcaaaaaagagttcggccatgaattcgacctctacgagaataaggattacattcgcaactgtatcattgggaaggggcgcagctataagggaactgtgtctataacgaagagtggcataaagtgtcaaccctggtcaagtatgatccctcacgagcacagctttcttcccagtagctacaggggcaaggatttgcaggagaattactgtcgaaatccacgcggggaggagggggggccatggtgctttacctccaatccagaggtccggtatgaggtgtgtgatatcccacagtgcagtgaggtggagtgtatgacctgcaatggtgagagttaccgcggattgatggatcacacagaatcaggaaagatctgtcagcgctgggatcaccaaactccccatcggcacaagttcttacccgagagataccccgataaaggattcgacgacaattactgcagaaatccagacggacagccacgcccctggtgctacacgctggatcctcacactaggtgggagtattgcgccatcaaaacctgcgagacatag

SEQ ID NO: 2587 - DNA, 858 bp, synthetic construct
  misc_feature 1..858: note = source = /note="Description of Artificial Sequence: Synthetic coding sequence"
  source 1..858: mol_type = other DNA
atgtgggtcaccaaactgctgcccgccctgctgctacagcatgtgttgttgcacttgctcctcctgccaattgccattccttatgcagaggggcagcgcaaaagaagaaatacaatccacgagtttaagaagagcgccaagactacacttatcaaaattgatcctgctttgaagatcaaaaccaaaaaggtgaatactgctgaccagtgtgccaaccgttgtacccggaataaaggtttacccttcacctgcaaggctttcgtgtttgacaaggcccgcaagcagtgcttgtggttcccattcaactctatgtcaagcggtgtgaagaaagagtttggccacgaattcgatctgtacgaaaacaaggattatattcggaactgcatcatcgggaaaggtaggtcttataagggcactgtctcgataacaaagtcaggtatcaaatgtcaaccctggtcctctatgattccacatgagcattcataccgcggtaaggatctgcaggaaaactactgccgaaacccacggggcgaggaaggtggcccatggtgtttcacctccaacccagaagtcaggtatgaagtatgtgatatacctcaatgttccgaagtggagtgcatgacatgtaatggagaatcctataggggattgatggaccataccgaaagtggaaagatctgtcagcggtgggaccaccagacccctcatagacacaagttcttgccagagcgctatcctgataagggcttcgatgacaactactgtagaaatcccgatggccaaccgagaccttggtgttacaccctcgacccccacactagatgggagtactgcgcaataaagacttgcgagacatag

SEQ ID NO: 2588 - DNA, 2172 bp, synthetic construct
  misc_feature 1..2172: note = source = /note="Description of Artificial Sequence: Synthetic coding sequence"
  source 1..2172: mol_type = other DNA
atgtgggtaacgaaactgttgcctgcccttttactgcaacacgttctgctccacctacttttactgcctatcgccataccatacgcagaaggccaacgcaaacggcgcaacacgattcacgagttcaaaaagtccgctaagactactttaattaaaatcgacccagcactcaagataaagacgaagaaggtgaacaccgctgatcaatgcgcaaaccgctgtaccagaaacaaaggtctgcccttcacctgtaaggcatttgtgttcgataaggcacgaaaacagtgtctttggttcccgttcaacagcatgtcctcaggagtgaagaaagaattcggccacgagttcgatctctatgagaataaagattatatcaggaactgtattatcggtaagggcagatcatataagggcaccgtgagtattactaagtccgggatcaagtgccaaccctggtcatctatgatccctcatgagcattcctaccgcggcaaggatctgcaggaaaactattgtcgaaatcctagaggtgaggaggggggaccctggtgcttcacttccaacccagaggtcagatatgaggtttgcgatattccacagtgttctgaggtggagtgcatgacctgcaatggtgaatcttataggggcctgatggatcacacagaatccgggaaaatctgtcaacgctgggaccaccagacaccccacaggcataagtttctccccgagcgctatccagacaaaggattcgacgacaactactgtagaaacccagacggtcagcctcgcccatggtgctacacccttgatccacatacacgttgggagtactgtgccatcaagacctgtgcagacaatactatgaacgacaccgacgtgcctcttgagactaccgagtgcatccagggtcagggtgagggctatcgcggaaccgtgaacaccatttggaacggaattccgtgccagcgctgggacagccagtaccctcatgaacatgacatgacacctgagaacttcaaatgcaaagaccttcgtgagaactattgtagaaatccggacggctctgagagtccttggtgctttacgactgaccccaacatacgtgtaggatattgttcacagattcccaactgtgacatgtcccatggccaggattgttacagggggaatggtaaaaattacatgggaaatctgtcacagacccgctcgggtctgacctgttcaatgtgggataagaacatggaagacttacatcgccacattttctgggaaccagatgcaagcaagctgaacgagaattattgccgcaacccggacgacgatgcgcacggtccttggtgctatacgggaaaccccctcattccatgggactattgcccaatctctaggtgtgagggggacactacacccacgattgtgaatctggaccacccagtaatatcctgcgcgaagaccaagcaactcagggttgtcaatgggatccccacccggacaaatataggctggatggtttctctgcgctacagaaataaacacatctgtggtggctccctgataaaagaaagttgggtgctgacagctaggcaatgctttccctcgagggaccttaaggactatgaggcatggctgggaatccacgatgtgcacgggagaggtgacgaaaagtgcaagcaggtgctgaatgtaagtcagctcgtctatgggcccgagggcagcgatctagtcctcatgaagctggccagacctgccgtcctggatgactttgtaagtactatcgatctgcccaattacggatgtaccatccccgagaaaacgtcttgcagcgtatacggctggggctacacgggactgatcaactatgacggattgttgcgggtagcacatctatacatcatgggtaatgaaaagtgtagccagcatcacagagggaaggtgacattgaatgagagtgagatatgcgccggtgcggaaaaaatcggttccggcccatgcgaaggagactatggcggtcccctggtctgcgagcagcacaagatgaggatggtgcttggcgttatagtgccgggacgaggttgcgctattcccaatcgacccgggatattcgttcgagtggcttactacgccaaatggattcacaagattattctgacgtataaagtcccacagtcttag

SEQ ID NO: 2589 - DNA, 363 bp, synthetic construct
  misc_feature 1..363: note = source = /note="Description of Artificial Sequence: Synthetic coding sequence"
  source 1..363: mol_type = other DNA
atgaacggggaggagaaatcatgttccgggtacggaggcccggatgcaatggatggaaaacttgtgtcttctgacgacgatgacttcatcgtcaaacgggaacacacccgagcttccggaatccgcaaggccgtgcttagcgggcctggacagagtgcagagaacgaaaccgaccaggttaactttcgcgagatcccccccagatgttatcctaagcacgcaaaagcctgcatctacttcacctacaaggtacattattccaactcttcaactgagatacctgaatttctcaccgctctggaggtactgatggccagcgactttctggacatctacattttcttgttctttttgttcttctag

SEQ ID NO: 2590 - DNA, 255 bp, synthetic construct
  misc_feature 1..255: note = source = /note="Description of Artificial Sequence: Synthetic coding sequence"
  source 1..255: mol_type = other DNA
atggctctgagctcccaaatctgggcagcgtgtctgctattgcttctcctcctggcttcgctcacatctggtagcgtgttcccacaacaaacgggacagctggcagagttgcagccacaggacagagcaggcgctcgcgcctcctggatgcctatgttccagcgtcgacggcggagggatacacattttcccatttgcatcttttgctgtggctgctgtcaccggagtaaatgtggcatgtgctgcaagacctag

SEQ ID NO: 2591 - DNA, 1422 bp, synthetic construct
  misc_feature 1..1422: note = source = /note="Description of Artificial Sequence: Synthetic coding sequence"
  source 1..1422: mol_type = other DNA
atggccgtaatggcacctcgaacccttgtgttactgttgagcggggccctcgcacttactcaaacatgggccgaagtgcagctcgtggaatcaggtggtggcctggtgcagcctgggggttcactgcgtctctcttgtgccgccagcggttttaacatcaaggatacctatatacattgggttagacaagcaccaggaaagggactggaatgggttgccagaatttatccgaccaatggttacactcgttacgccgacagcgtgaaaggtcgtttcactatcagcgccgatacgtccaagaatactgcttacctacagatgaactccctccgggcagaagatacagctgtgtactactgttcaagatgggggggtgacggcttctatgccatggattactggggacagggaacgttggtgactgtatccagtgccagcacaaagggcccatctgttttccccctagcgccatccagcaagtccacttccgggggcacagccgctctcggctgtctggttaaagactactttcccgagccagtcaccgtgtcttggaatagcggcgcgttgacctcaggagtgcacacctttccagctgtcctgcagtcctctggactgtactcactcagcagcgtggtgactgtgccatcatcaagcctgggaacacagacctacatctgcaacgtaaaccacaagcctagtaataccaaggttgataaaaaagtcgagcctaaatcatgtgataagactcacacttgccctccctgtcctgcacctgagcttctcggcggtccttcagtttttttatttcctcccaaaccaaaggacacactgatgatctctcggacccctgaagttacgtgcgtggtggtggatgttagccacgaagaccctgaggtgaagttcaattggtacgtagacggcgtcgaggttcacaatgccaagacgaagccgcgcgaggagcagtataatagtacctatcgcgtcgtctccgttctaacagtgttgcaccaggactggctgaacggcaaggagtacaaatgcaaggtatccaataaagctctgccagcgccgattgaaaagactatcagcaaggccaagggtcagcctagggaaccgcaggtgtatactctacccccttcccgagacgaattgactaagaatcaagtcagcctgacttgtctggtaaagggattttacccctccgacatcgccgttgaatgggagagtaacggtcagcccgagaataactataaaaccaccccaccagtccttgactccgatgggagcttcttcctgtatagtaagttaaccgtggacaagtctagatggcaacaggggaatgtctttagctgttcagtcatgcacgaagcactgcataaccattatacccagaaatctctgagcctgtctcccggctag

SEQ ID NO: 2592 - DNA, 717 bp, synthetic construct
  misc_feature 1..717: note = source = /note="Description of Artificial Sequence: Synthetic coding sequence"
  source 1..717: mol_type = other DNA
atggccgtgatggcaccccggaccctcgttctgctcttatccggagctttggcactaacgcaaacctgggccgacattcaaatgactcagtccccttcaagcctgagcgccagtgtcggcgaccgggtgacaattacctgcagagcttcccaggacgtgaatacagccgttgcttggtatcagcagaagcccggcaaggctcccaagctcctgatttatagcgcatcatttttgtactccggtgtaccatcccggttcagcgggagccgcagtgggacagacttcacactgaccataagttccctgcagcctgaggactttgctacctattattgccaacaacactatacaactcctcccacatttgggcagggcacaaaggttgaaatcaaaaggaccgtggccgccccttcagtgttcatatttcccccaagtgatgaacagctgaaaagtggtaccgcttctgtggtgtgcctgctcaacaacttttatccaagggaggcgaaagttcagtggaaggttgataatgcactacagtcaggtaactcccaggaaagcgtgaccgaacaggatagcaaggacagcacttacagtttatcctctacactcacgctaagcaaagccgattatgaaaaacacaaggtctacgcgtgcgaggtgacacaccaaggtctgtcaagtcccgtgaccaagtctttcaacagaggagagtgttag

SEQ ID NO: 2593 - DNA, 657 bp, synthetic construct
  misc_feature 1..657: note = source = /note="Description of Artificial Sequence: Synthetic coding sequence"
  source 1..657: mol_type = other DNA
atggccaccaggtctcccggcgtcgtcatcagcgatgatgaacccgggtatgatcttgacctgttttgtattccgaaccactacgcagaggatctagagagagtcttcatccctcacgggcttattatggacagaaccgaacggctcgcgagagacgttatgaaggagatgggaggtcatcacatagtggccctgtgcgtattgaagggcggctataaattttttgccgaccttctcgactatatcaaggcactaaacagaaacagcgacagatcaatcccaatgaccgtcgacttcatccgcctgaagtcatattgtaacgatcagagcactggagatatcaaggtgattgggggcgatgatctttctaccttgaccggcaagaatgtcttaatcgtcgaggacatcatcgataccgggaagactatgcagaccctactcagcctcgtgcggcaatacaaccctaagatggtgaaggttgcctcactgttagtgaagcggacacccagatcggtcggatacaaaccagatttcgtcggatttgaaattcccgataagtttgtcgttggctatgcacttgattataacgagtatttcagggatctgaaccatgtgtgcgtaattagtgagactggtaaggccaagtataaggcatag

SEQ ID NO: 2594 - DNA, 657 bp, synthetic construct
  misc_feature 1..657: note = source = /note="Description of Artificial Sequence: Synthetic coding sequence"
  source 1..657: mol_type = other DNA
atggcgacgcgatcgcctggtgtggttatttccgatgatgagccagggtatgacctggatttattctgcattcccaaccattacgctgaagacctcgagcgcgtctttattcctcacggtctcataatggataggaccgaacggctcgcccgggacgtgatgaaggagatgggcgggcaccacattgtagctctatgtgtgttaaaggggggttacaaatttttcgctgacctcttagattatataaaagccctgaacaggaacagcgatcgaagtatccctatgacagtagacttcatccggctcaagtcttattgcaatgaccagtcaacaggtgacattaaggtgatcggcggagacgacctctcaactctgacaggcaaatctcgcctcctcgctgaagacataatcgatacgggtaagactatgcaaaccttgctctctcttgtgcgacaatacaatcctaagatggtcaaggtcgccagcctgctggtgaagcgaactccaagatctgtcggatacaagcccgactttgtgggcttcgagatccctgacaaattcgtggtgggatacgcgctcgattataatgagtactttcgggatctcaaccatgtgtgtgtgatcagtgaaaccggaaaagccaaatataaggcttag

SEQ ID NO: 2595 - DNA, 1653 bp, synthetic construct
  misc_feature 1..1653: note = source = /note="Description of Artificial Sequence: Synthetic coding sequence"
  source 1..1653: mol_type = other DNA
atgcccccacccagaaccggccgcggcttactttggctcggactcgtgctcagtagcgtttgcgtcgcccttggctcggaaacccaggcaaactctactaccgatgctttaaatgttctgctgatcatagttgacgacctccgtccaagccttggttgctatggagacaaactggttcgctctcccaacatcgaccagctcgccagccacagtctgctgttccaaaacgccttcgctcagcaagccgtgtgtgctccctcaagagtctctttcttaacaggacggagaccagatacaacaaggctgtatgactttaactcctattggagagtgcatgcaggtaactttagtactattccacaatacttcaaggagaacgggtacgttactatgtccgtcggcaaggtcttccaccccggcattagttcaaatcataccgatgattctccttatagctggagcttcccaccgtaccacccgtcgagcgaaaagtatgaaaataccaagacctgtcgggggcccgatggggaactgcacgctaatctgttgtgtcctgtggacgtgctggatgtcccagagggcaccctccccgacaaacagtctacagaacaagctattcagttgctcgagaaaatgaagacatctgcctctccttttttcctggcagtaggctaccataagcctcatattcctttccgctatccaaaggaatttcagaaattgtacccactggaaaatatcaccttggctcccgatcctgaggtcccagatggactgccacctgtcgcctataatccttggatggacataagacagcgtgaggacgtacaggccttgaacatcagtgtcccctatggcccgatccctgttgacttccaacgcaagatacggcaatcgtactttgcctccgtctcatacctagacacccaggtaggtagattgcttagtgccctggacgacctccagttggcgaacagcaccatcatcgcgtttacatctgatcacggatgggctttaggcgagcacggtgagtgggcgaagtacagtaactttgacgttgccacccatgtgcctcttatcttctacgtgcctggaaggactgcttctcttcccgaggctggtgaaaaactgttcccttatctggatcctttcgactcagccagccagttaatggagcccggccgtcaaagcatggatcttgtggaactggtgtcattgtttcccactttagcgggactggccggtcttcaggtccctcctaggtgccccgtgcctagttttcatgtcgaactgtgtcgcgagggcaagaaccttctgaaacacttccgttttcgcgacctggaagaggatccttaccttcccgggaacccgagggaactgattgcttatagccagtatccacgcccaagtgacatacctcagtggaactctgacaagccgtccctgaaagacattaagatcatgggctactccatacggaccatagattatagatacacagtgtgggtaggctttaatccggacgagtttcttgccaactttagcgatattcacgcgggggagctctactttgtagattccgatcctcttcaggatcacaacatgtacaacgatagccaaggcggagatttgttccagttgttaatgccctag

SEQ ID NO: 2596 - DNA, 1032 bp, synthetic construct
  misc_feature 1..1032: note = source = /note="Description of Artificial Sequence: Synthetic coding sequence"
  source 1..1032: mol_type = other DNA
atgccgcctcccaggacgggccgggggctactctggctgggccttgtgttgagctctgtctgcgtggcgcttggctctgagacccaagctaatagcactacagatgccttgaacgttctgttaatcatcgttgatgatctgagacctagcctcggctgttacggcgataagttggtgcggagtccaaacattgatcagctggcatctcactctctgctttttcagaatgcctttgcccagcaggccgtctgtgctccgtcccgcgtgtccttccttactgggaggagacccgatactacacgcttgtacgatttcaactcttattggagggtgcacgccgggaactttagcactattcctcagtatttcaaggaaaatggatatgttacaatgagcgtggggaaggtgtttcatcccgggatatcctccaaccacacagacgacagcccctactcctggtcctttccgccataccatccgtcaagcgagaagtatgagaataccaagacctgtcggggcccagatggcgaactacacgccaaccttctttgtccagtggacgtcctcgacgtgccggaaggcaccctccccgacaagcaatcaacagagcaggccatacaacttttggagaaaatgaaaacctccgcgagccccttttttctcgcagtaggctatcataagccccacatcccttttagataccccaaagaattccaaaagttataccctctcgagaacattactctggctccagatcccgaagtcccagacggtttgcctcccgtcgcttataacccctggatggatatccgacagagggaggacgtgcaggctctgaacatcagcgttccctatggcccaatccccgtggacttccagagaaaaattcgccagtcctactttgcttccgtctcataccttgatacacaggtaggcagactcttaagcgccttagatgatctgcagctcgccaatagtacgattattgcgttcacctccgaccatggctttctgatgaggaccaacacctag

SEQ ID NO: 2597 - DNA, 939 bp, synthetic construct
  misc_feature 1..939: note = source = /note="Description of Artificial Sequence: Synthetic coding sequence"
  source 1..939: mol_type = other DNA
atgccaccgccaagaacaggtcggggcctgctgtggctcgggttagtgctgtctagcgtgtgtgtggccctcggtagtgagacacaggccaatagcacaaccgacgcactgaacgtgctgttgatcatcgtcgatgatctacgtccgtctttagggtgctatggcgacaagctggtacggtcccccaacatagaccaattagcctctcactcactacttttccaaaacgctttcgcccaacaggccgtgtgtgcgcctagccgagtttcctttctgaccggcagacgacctgatacaacgcggctgtacgatttcaatagctactggagggtccacgccgggaacttttccactattccacagtacttcaaagagaacgggtacgttaccatgtctgtcggcaaggtgtttcatccaggaattagcagtaaccacacggatgacagcccttattcttggagttttcctccctaccacccctcctctgagaaatacgaaaacaccaaaacatgtagaggacccgacggagagctccacgccaatctgttgtgccccgtggatgttctggacgtgcccgaaggcactctcccagataaacaatcgaccgaacaggccatacaactcctggagaaaatgaagacaagcgcctctccctttttcctggccgtgggatatcacaagccacacatcccatttcgataccctaaggagttccagaaactctatcctctggaaaacataactttggccccagaccctgaagtcccagacggtcttccaccagttgcttacaacccgtggatggatatcagacagagagaagacgttcaagccctaaacatctccgtcccctacggacctatcccagtcgatttccaggaggatcaatccagtaccgggtttcgactcaagacaagctccacacggaaatacaagtag

SEQ ID NO: 2598 - DNA, 540 bp, synthetic construct
  misc_feature 1..540: note = source = /note="Description of Artificial Sequence: Synthetic coding sequence"
  source 1..540: mol_type = other DNA
atgccccccccccgcaccggccgaggtctgctttggctaggcctcgttctgtccagtgtttgtgtcgccctggggtctgagactcaagccaactctacaactgatgcccttaacgtactgctgattatcgtcgatgacttacgaccctctctgggctgttatggggataagctggtcagatcacctaatattgatcagctcgccagtcattccctgctgtttcagaatgcattcgcgcagcaggctgtctgtgccccgagtcgggtgtccttcctgaccgggagaagacccgatactacacgcctgtatgattttaactcatactggagggtgcacgcagggaacttttcaaccatacctcagtactttaaggagaatggatacgtcacaatgagcgtgggcaaggtgttccatcccggaacagctccctgtccagagtctggcttctcttggtttgtggtgagcgagtcctccattcccatcctggggatgggactgtcactgcagtcaccgctgttagccggacgcgtgccccggtag

SEQ ID NO: 2599 - DNA, 261 bp, synthetic construct
  misc_feature 1..261: note = source = /note="Description of Artificial Sequence: Synthetic coding sequence"
  source 1..261: mol_type = other DNA
atgccaccaccaagaacaggacgagggctcctgtggctcgggcttgtcctgtcaagcgtgtgcgtggctctggggtccgaaacccaggctaactccactacggacgcattgaatgtgctgttgatcatcgtggacgacctgcgtccaagccttggatgttacggcgataaactggtcagatcccccaatattgatcagctggcgtcacatagtctgctgttccagaacgctttcgcccagcaggctgtttgcgcgccctag

SEQ ID NO: 2600 - DNA, 462 bp, synthetic construct
  misc_feature 1..462: note = source = /note="Description of Artificial Sequence: Synthetic coding sequence"
  source 1..462: mol_type = other DNA
atggacctcgtggagctggtgtccctcttcccaacactggccgggcttgccggcctgcaggtgccacccagatgtccagtgccgtcattccacgtggaactctgcagagaagggaaaaatctccttaagcattttcgcttcagggatctggaggaagacccttatttgccagggaatcctcgagaactaattgcttatagccagtaccctcggccaagcgacatacctcaatggaactctgacaaaccaagcctaaaggacatcaagattatgggctatagcatcaggaccatcgattaccggtacactgtctgggtgggttttaaccctgacgagttcttagctaatttttccgatatccacgccggcgaattgtactttgtggacagtgacccgctacaggaccacaacatgtacaatgactcacagggcggggacttattccagttgctcatgccttag

SEQ ID NO: 2601 - DNA, 1020 bp, synthetic construct
  misc_feature 1..1020: note = source = /note="Description of Artificial Sequence: Synthetic coding sequence"
  source 1..1020: mol_type = other DNA
atgaaaacgagcgcttccccttttttcctcgctgttggttaccataaaccacacatccccttccgttatccaaaggagttccagaagctgtatccgctggaaaacattaccctcgcaccggatcctgaagtccctgatgggctcccacctgtcgcctacaacccatggatggacatcaggcagagagaagacgtgcaggcattaaacatctctgtgccctatggaccaatccccgtcgattttcagcggaaaatccgccagagttatttcgcatccgtgtcttacttggacacgcaagtgggacgactcctgtcagctctggacgaccttcaactcgctaactcgaccattattgcgttcacctcggatcatggctgggctctcggcgaacatggcgagtgggcaaaatatagcaattttgacgtggctacccatgtacctctcattttttatgttccagggcgtaccgcctctctgcccgaggcaggcgagaaattgttcccttatctggaccccttcgacagcgcgagtcagcttatggaaccgggtagacagtctatggacctggttgaacttgtctctttgtttcctacgctggctggcttggccgggttacaggttccccctaggtgccccgttccaagttttcatgttgaactctgtcgggaaggaaagaacctgctcaaacatttcaggttccgggatctagaagaagatccataccttccggggaatcctcgggaactgatcgcctactcccaataccctagaccatccgacattccccagtggaactctgataagccttcgttaaaggatatcaaaattatgggatatagtatccgcactatcgattacagatacacagtgtgggttgggttcaatccagacgagttccttgccaacttctcagacatacacgctggtgagctgtattttgtggacagtgatccacttcaggaccacaatatgtataacgacagccagggcggagaccttttccagctgttgatgccttag

SEQ ID NO: 2602 - DNA, 1962 bp, synthetic construct
  misc_feature 1..1962: note = source = /note="Description of Artificial Sequence: Synthetic coding sequence"
  source 1..1962: mol_type = other DNA
atgcggcctcttcgacccagggcagccttgctcgctttgctagcttccttgctggcggcacccccagtcgcccctgccgaggcccctcatcttgttcatgttgatgcagcacgggccttgtggccactcagacgtttttggcggagcaccggattctgtcccccactgccccactcccaggctgaccaatacgtgctgtcttgggaccagcagttaaatttggcttacgtcggcgcagtcccccacaggggaattaaacaggtgcggactcattggctgctggaactggtgaccaccagaggttcgactggccgcggactgtcctacaacttcacgcacctggatgggtatctcgacttgctcagggaaaaccaactcctcccaggctttgaactcatgggcagtgcttctggacacttcaccgacttcgaggacaaacagcaggtgtttgagtggaaggacctggtgtcctctctagctcgacggtacattgggcgctatggccttgcccatgtgtcgaaatggaactttgaaacatggaatgaacccgaccaccatgatttcgacaatgtgtcaatgaccatgcaggggttcttgaactactacgatgcctgctctgaaggcctgagagctgcatctcccgccttacgcctgggcggtcctggcgacagcttccatacacctccaagatctcccctctcctggggcttgctcagacattgtcacgacggaactaactttttcacaggtgaagcgggtgtacgactggattacatctccctgcatcgaaaaggcgcccggtcctccatttccatcctcgagcaagaaaaggtggtggctcagcagatccgccaattattccccaaattcgcagacacccccatctacaacgatgaagccgatcccctggtgggatggagcttacctcaaccttggcgcgccgatgttacctatgccgccatggttgttaaagtcatcgcccagcatcagaacctgctgctggctaacactacctctgcttttccatacgcactgcttagcaatgataacgcttttctgtcctaccatccccatccattcgcccaaaggaccttgacagccagattccaggtgaacaacaccagaccaccacatgtgcagctactccgaaaacctgtactgactgccatgggcttactggctctgttagacgaagaacagctgtgggcagaggtcagccaggcaggcacggtgctggacagcaatcataccgtgggtgtgctcgcttctgctcaccgccctcagggccccgctgatgcttggcgggccgccgtcctgatctacgcttctgatgacacccgtgcccaccctaatcgctcggtggccgtcacactccgactgagaggtgtgccccccggacctgggttagtatatgtgactagatatctagacaatggtctgtgcagccccgatggggaatggagacgccttggaagaccggtgttccctacagcagagcaattccgtcggatgcgagctgcggaagatcccgttgcagccgctccacggccgcttccggccggcggacgtctgacactcaggcccgcgttgcgccttccctccctgttgttagtgcatgtttgtgcacggccagagaagccacccggacaggtcactcgactgagggcccttcctctgacccagggacagctggttttagtgtggtcggatgagcatgttggtagtaagtgcctgtggacttacgagatccagttcagccaggatggaaaggcttacaccccagtttccagaaaacccagcaccttcaatctgtttgtgttcagcccagataccggagccgttagcggtagctacagggtacgtgccttagattactgggcccgtccaggtcccttttctgatccagtgccctatctggaggtacccgtacctcgggggccgcctagccctgggaacccctag

SEQ ID NO: 2603 - DNA, 2028 bp, synthetic construct
  misc_feature 1..2028: note = source = /note="Description of Artificial Sequence: Synthetic coding sequence"
  source 1..2028: mol_type = other DNA
atgcgaccactgcgcccccgcgcagctctacttgctctcttggcctccctgctcgcggcaccccctgtggccccagctgaggccccacacctggttcacgtagacgcagccagggctttgtggccgctgcgcaggttttggagaagtacaggcttttggggcagtaccggacgtggactctcctataacttcactcatctggacggctacctcgacttgctgagggagaaccaattgttgcctgggtttgaactcatgggcagtgccagtgggcacttcacagactttgaggataagcagcaggtgtttgagtggaaggacctcgtctcctcactggctcgtcgctatattggcagatacggcctggcccacgtgagtaaatggaactttgaaacctggaatgaaccggatcaccacgatttcgacaatgtgtccatgactatgcaaggcttcctgaactattacgacgcctgttcagagggcttacgggcagcctctccagccctgaggctgggtggtcctggagatagtttccatacaccgccacgctcccccttatcttggggactcctcagacactgtcatgatgggacaaacttttttaccggagaagccggggtgcggctcgattatatcagcctccacagaaaagtgcggccagccccaccttccgctcctgtcttctgtgctttgagtcgctgtgcgcccggacgtgccgatccaggcggtgcagaggccgcacccccggctggctgtgcccagcttcacctccacccaggtgccggagaggggcggcgcgctgccgaccctgcagctctgcctcaggtacgcgggcatcctcatctgcaaagacggggaggtccagctgggggactcgtgccggctactgctgtggagggaggaagagacctgcgaggtcacggaggcgaaggaggacccgcccagaggccagcacgacctcctgcaactttcctgccaagacgcgaccgaagggccgtggctgccccacctggaccatcatgtcctgggcaccctcaagttatcgctcaacatcaaaacctgctgctggccaacacaacatccgcttttccttacgctctgctcagcaacgacaacgcttttctctcatatcatcctcacccctttgcacagcgaaccctgactgcacgttttcaagtcaataacactagaccaccgcacgtgcagctgttgaggaagcccgtacttacagccatgggactgctcgccctccttgatgaggagcagctttgggccgaggtgtcccaggccggtacagttctcgatagcaatcacacagtgggcgtgttggctagcgcacacaggcctcagggaccagcggacgcctggcgcgccgctgtgctcatttacgcgagcgatgacacccgagcacatcctaacagatccgtggccgtgaccctgcgacttcggggcgttcccccaggcccaggactagtatacgtcacccgctatcttgataacggactatgttctccagacggtgagtggaggcggctgggacggcccgtctttcctactgccgaacagtttcgtcggatgcgggcggcagaggatccagttgctgctgcccctcgaccactccccgcgggtggaaggctaacactgcgacccgccctcagactcccaagcctcctcttggttcacgtgtgcgctcgtccagagaagccacccggccaggtaacccgactccgggccctgcctctcactcaggggcaacttgtcctagtatggagcgatgagcacgtgggatcgaagtgtctgtggacatacgaaatccagttttctcaggatggtaaggcctacacacctgtctcgcgaaaaccgtcgaccttcaatctgttcgtgttctctcctgacacaggcgccgtatccggcagctatcgtgtacgggcactggactattgggcacggccagggcccttctcagaccctgtgccctacctggaggtgcctgtgccaagaggacccccgtccccgggaaatccgtag

SEQ ID NO: 2604 - DNA, 603 bp, synthetic construct
  misc_feature 1..603: note = source = /note="Description of Artificial Sequence: Synthetic coding sequence"
  source 1..603: mol_type = other DNA
atggcactatggatgcgactcctccctcttcttgcactgctggccctgtggggacccgatccagccgctgcatttgtgaaccagcacctctgtggatcacacctggtcgaggcactgtacctggtgtgtggagaacgcgggtttttttatacccccaaaacacggcgcgaggccgaagacctgcaggcaagcgcccttagcctttcttcctctacatcaacatggccagaggggctggacgctaccgccagggctccaccagcattggtcgtcaccgcaaatattggccaggccggggggagttcttcacgccagttccgccagagagcattgggaacgtcggatagtcccgtcctcttcatccactgtcccggtgcagccggcactgcccaagggctagagtatcgggggcggagggtgaccacggagctggtttgggaggaagtggattcctcaccgcagcctcaggggtctgagtcacttccagcccagcctccagcccagcctgctccccagccagaaccccagcaggcacgagaaccatcccccgaagtctcatgctgtggtctttggccaagaaggccccagcgctctcagaattag

SEQ ID NO: 2605 - DNA, 333 bp, synthetic construct
  misc_feature 1..333: note = source = /note="Description of Artificial Sequence: Synthetic coding sequence"
  source 1..333: mol_type = other DNA
atggctctgtggatgcggctcctgccgttgttggctctgctggccctttggggccctgaccctgctgccgcgttcgtaaaccaacacctgtgcggttcacatctcgtcgaggccctgtatttggtgtgcggcgaaaggggttttttctacacgccaaaaacacggcgcgaggctgaagatctgcaggtggggcaagtcgagctaggaggcgggccaggggctggctccctgcagcccttggctctggagggctccttgcagaagcgaggaattgtggaacagtgctgtacatcaatctgttcactctatcagcttgagaactactgcaactag

SEQ ID NO: 2606 - DNA, 333 bp, synthetic construct
  misc_feature 1..333: note = source = /note="Description of Artificial Sequence: Synthetic coding sequence"
  source 1..333: mol_type = other DNA
atggccctctggatgcgtcttttacccctgcttgctctcctagcactctggggtcctgatcccgctgctgcgtttgtgaatcagcacctgtgtggctcccacctggtcgaggccttatatcttgtgtgtggcgagcggggttttttttataccccaaagacccggcgcgaggccgaggacctgcaggttggacaggtggagctgggcggggggccgggagctggaagcctgcaaccactggcactagaggggtctttgcagaaacgcggaatagtggagcagtgctgcaccagcatctgctcgctgtatcaactggagaactactgcaactag

SEQ ID NO: 2607 - DNA, 333 bp, synthetic construct
  misc_feature 1..333: note = source = /note="Description of Artificial Sequence: Synthetic coding sequence"
  source 1..333: mol_type = other DNA
atggccctgtggatgaggctcctaccccttctcgcactactggccctgtggggccccgatccggccgctgcgttcgttaatcagcacctgtgtgggtctcacctcgtcgaggccttgtacctggtctgtggcgaacgcggtttcttttacacgccaaaaacacgccgcgaagccgaagatcttcaggtggggcaggtggagttggggggcggccccggagctggcagcctccagccacttgcccttgaaggatccctccaaaagcgaggaatcgttgaacagtgctgtacgagcatctgctcattgtaccagcttgagaattactgtaactag

SEQ ID NO: 2608 - DNA, 297 bp, synthetic construct
  misc_feature 1..297: note = source = /note="Description of Artificial Sequence: Synthetic coding sequence"
  source 1..297: mol_type = other DNA
atggccctgtggatgagactactgcccctgctagcgttattagccctatggggacctgaccccgctgcggcctttgttaaccagcacctgtgtggatcgcatctcgtcgaggctctgtacctggtgtgcggggaaagggggtttttttacacacctaaaactcggagagaggcagaagatctgcagggctcccttcagcccttggctctcgagggaagcctgcagaaaagggggatagtcgaacagtgttgcacttctatctgttccctgtaccagctggagaattactgtaattag

SEQ ID NO: 2609 - DNA, 333 bp, synthetic construct
  misc_feature 1..333: note = source = /note="Description of Artificial Sequence: Synthetic coding sequence"
  source 1..333: mol_type = other DNA
atggctctctggatgcggctactgcctctccttgctctgctggccctgtggggccccgaccccgccgctgcatttgtcaatcagcatctgtgcgggtcacatctcgttgaggcgttgtacctggtgtgcggcgaaagaggctttttttacaccgataaaacccgcagggaagctgaagaccttcaagtggggcaagttgagctcggcggcggccctggggccgggagtctacagccacttgcgctcgaaggttctctacagaagaggggcatagtggagcagtgctgtacttcgatttgttccctgtatcagctggagaattactgcaactag

SEQ ID NO: 2610 - DNA, 333 bp, synthetic construct
  misc_feature 1..333: note = source = /note="Description of Artificial Sequence: Synthetic coding sequence"
  source 1..333: mol_type = other DNA
atggccctttggatgcggctgctccccctgctggccttgttagccctgtggggcccagacccagccgccgcgtttgtaaatcagcacctctgcggaagtcatttggtggaggcactctatctcgtgtgtggcgaaaggggctttttctatacccccaaaacccgtcgggaggccgaagatctgcaagtcggccaggtcgaactcgggggaggaccaggagcgggctcactgcaacctctagccctggaggggtctctgcagaagcggggcattgtcgagcagtgctgtacatccatttgtagcttgtatcaactggagaactattgtggatag

SEQ ID NO: 2611 - DNA, 333 bp, synthetic construct
  misc_feature 1..333: note = source = /note="Description of Artificial Sequence: Synthetic coding sequence"
  source 1..333: mol_type = other DNA
atggccctctggatgaggctcctgcctctactggctttgttggccctatgggggcccgacccagctgctgctttcgttaaacagcacctttgcggaagccacctcgtggaggctctttacttggtgtgcggcgagcgcggttttttctacacgcccgagactcgacgtgaggccgaggacctgcaagtaggacaggtggagctcgggggggggccaggagccggctccctccagccattagccctcgaaggcagcctgcagaagcgcggcatcgtagagcagtgctgcaccagcatatgtagtttgtaccagctagagaactactgtaattag

SEQ ID NO: 2612 - DNA, 333 bp, synthetic construct
  misc_feature 1..333: note = source = /note="Description of Artificial Sequence: Synthetic coding sequence"
  source 1..333: mol_type = other DNA
atggctttatggatgcgacttctgccccttctggcgcttctcgccctttggggtcctgacccagctgcggcttttgtcaaccaacatctctgtggcagtcacctggttgaagcactgtacttagtgtgcggggaaagaggcttcttctacactaaacccactcgtagagaggcagaggatttgcaggtcggccaagttgagctggggggaggcccaggggccgggagtctgcagcctctcgcactcgaaggctccctgcagaagcgcggcatagtcgaacagtgttgcacttctatctgttccctatatcaactggaaaactactgtaattag

SEQ ID NO: 2613 - DNA, 570 bp, synthetic construct
  misc_feature 1..570: note = source = /note="Description of Artificial Sequence: Synthetic coding sequence"
  source 1..570: mol_type = other DNA
atggctctcagcttcagccttctgatggccgtgttggttctctcatacaagtcaatttgctctctaggctgcgacctgccccaaacacatagcctgggcaatcgccgcgccctaattctcctgggacagatgggacggataagccccttctcctgcctgaaagatagacacgactttaggattccgcaagaggaatttgacgggaatcagttccaaaaggcacaggcaatatcagtgctgcacgagatgatccaacagacattcaatttgttcagcacagaagatagcagcgcagcatgggagcaatccctactagagaagttttctaccgaactgtatcagcagctcaacgatttggaagcttgtgttattcaggaggtcggggttgaggagacacccttgatgaatgaagatagtatccttgcagtgcggaagtactttcagcgcattaccctgtatcttatcgagcgaaagtacagcccttgcgcgtgggaagtagtaagagcagaaattatgcggtctctgtcattcagtaccaacctgcaaaagagactgcgacgcaaggattag

SEQ ID NO: 2614 - DNA, 573 bp, synthetic construct
  misc_feature 1..573: note = source = /note="Description of Artificial Sequence: Synthetic coding sequence"
  source 1..573: mol_type = other DNA
atgatggcaagcccattcgccctgctgatggctttggtggtgttgtcttgcaaatcatcatgtagcttgggctgcgatttgcctgagacccactctctggataaccggagaaccctgatgctgctcgctcaaatgagtagaatctcaccgtccagttgtctgatggatcgacatgatttcggttttcctcaagaagagtttgatggaaatcaattccagaaagctccagccatcagcgtgctacatgagttgatccagcagatcttcaaccttttcacgacgaaggactcctccgccgcttgggatgaggacctgcttgacaaattctgcaccgagctctaccagcaactcaacgacttggaggcctgcgtgatgcaagaagagcgggtaggtgagactcccttgatgaacgcagattctattctagccgtgaaaaagtatttcaggcgaattactctctacctgacggaaaagaagtattccccatgcgcttgggaagttgtaagggctgagattatgagatcgctgagcctgtccactaacctccaggagcgactgaggcgcaaagaatag

SEQ ID NO: 2615 - DNA, 570 bp, synthetic construct
  misc_feature 1..570: note = source = /note="Description of Artificial Sequence: Synthetic coding sequence"
  source 1..570: mol_type = other DNA
atggcactgccgttcgcacttatgatggccttagtcgtcctgtcctgtaagtccagctgcagcctcggttgtaatctgagtcagactcatagcttgaataaccgaagaacactgatgctgatggcacagatgagacgaatttcccccttttcttgcctgaaagaccgacatgacttcgaattcccgcaggaagagttcgacggaaaccagttccagaaggcacaggccatctctgtcctgcacgagatgatgcaacagactttcaatttattttcaactaagaatagctctgctgcatgggatgagaccctcttagaaaagttctacatcgagctgttccagcagatgaacgatctcgaagcctgtgtgatccaggaagtcggcgtcgaagaaactcctctaatgaatgaggactctatcttggcggtcaaaaagtacttccaacgaattaccctgtatctgatggagaagaaatacagtccgtgtgcctgggaagtagtgagagcagagattatgcgtagcctgagttttagcaccaatttgcaaaaaagactcaggaggaaagattag

SEQ ID NO: 2616 - DNA, 570 bp, synthetic construct
  misc_feature 1..570: note = source = /note="Description of Artificial Sequence: Synthetic coding sequence"
  source 1..570: mol_type = other DNA
atggctttatcattcagtttactgatggcggtgctggtgctgagctacaaatccatttgcagccttggttgtgatctgcctcagactcactctttgggaaatcggcgggccttgatcctccttgcccagatgggccgcataagccactttagttgcctcaaggataggtatgatttcggcttcccccaggaggtgtttgacgggaatcaattccagaaagctcaagcaatctcagcatttcacgagatgattcagcagacattcaatctgttcagcacaaaagattccagtgctgcctgggatgagaccttgttggacaaattctatatcgaattatttcagcagcttaatgacctcgaggcctgtgtcacccaagaagtcggcgtagaggagatagccttaatgaatgaagactctatccttgcagtgcgcaagtacttccagaggatcaccttgtacttaatgggcaaaaagtattccccatgtgcttgggaagtggttcgggccgagatcatgcggtcgttttcattttccacaaatctccagaagggactaaggaggaaagactag

SEQ ID NO: 2617 - DNA, 570 bp, synthetic construct
  misc_feature 1..570: note = source = /note="Description of Artificial Sequence: Synthetic coding sequence"
  source 1..570: mol_type = other DNA
atggcattgtctttctccttgctcatggctgtgcttgttctaagttacaagtccatctgttccctgggttgtgatctgcctcaaacccactctctcggcaatcgccgagcattaatcttgctggctcagatgggtagaatcagtcctttttcctgcctcaaggatagacatgatttcgggcttcctcaggaggagttcgacggaaaccagtttcaaaagacccaggctatcagcgtcctgcatgagatgatccagcaaaccttcaaccttttctccacagaggacagcagcgcagcctgggagcagtcactgctagaaaagttttctaccgagctctaccagcagctgaacaacctggaagcatgtgtcatccaggaggtaggaatggaggagacccctctgatgaacgaggattccattctggccgttaggaaatactttcagaggattacactctacctgacagagaaaaaatattctccatgcgcatgggaggtagtcagagcagagattatgcgcagcctcagtttctctaccaatctgcaaaagatcctgagacgtaaggattag

SEQ ID NO: 2618 - DNA, 567 bp, synthetic construct
  misc_feature 1..567: note = source = /note="Description of Artificial Sequence: Synthetic coding sequence"
  source 1..567: mol_type = other DNA
atggcattaacctttgccctgctcgttgcccttcttgtgctctcctgtaaatctagttgcagcgtgggctgtgaccttccgcagacgcattccctgggctctcggaggacgctgatgctactcgctcaaatgcgccggatctctctgttcagttgtcttaaagaccgtcacgacttcggcttcccacaggaggaatttgggaaccagtttcagaaggccgagaccattcctgttttgcatgagatgatacagcagatttttaatctgttttcaactaaggactcatcagcagcatgggatgaaacactcctcgacaaattctacacggagctttaccagcagctaaacgatctcgaagcttgcgtgattcagggcgtgggcgtgacggaaacgcctcttatgaaagaggacagcattctcgctgtcagaaaatactttcagaggattacactttatctcaaagagaagaagtactccccatgcgcctgggaggtcgttcgcgcagagattatgagatccttcagcttgagcacaaacctccaggagtccctcaggtccaaagagtag

SEQ ID NO: 2619 - DNA, 570 bp, synthetic construct
  misc_feature 1..570: note = source = /note="Description of Artificial Sequence: Synthetic coding sequence"
  source 1..570: mol_type = other DNA
atggctctgagcttcagtttactgatggccgtgcttgtcctgagttataaaagtatatgctctcttggatgcgatctgccacaaacccatagcctcgggaaccgccgagccctgatcctcttagcgcaaatgggacgcatctctccattcagctgtctcaaggacagacacgacttcggattcccccaggaggagttcgatggcaaccaatttcagaaagcccaggccatctccgtattacatgaaatgattcaacaaacgttcaatctcttcagtaccaaggattccagcgccacctgggagcaatccttgctggagaagttttccaccgaacttaatcaacagctaaacgacctggaggcctgcgtcatccaggaggtgggagttgaggaaaccccacttatgaatgtggattctatcctggcggtcaaaaagtactttcaaagaataaccttgtacctgaccgagaaaaaatattcgccttgtgcttgggaggtggtccgcgcagagatcatgcgctccttcagcctgagcaaaatatttcaggagcgcctccggcggaaagaatag

SEQ ID NO: 2620 - DNA, 570 bp, synthetic construct
  misc_feature 1..570: note = source = /note="Description of Artificial Sequence: Synthetic coding sequence"
  source 1..570: mol_type = other DNA
atggccctaagcttctcgctcctcatggccgtgctggttctatcttacaagagtatttgttctctggggtgtgacctgccccagacacatagcttaggcaacaggcgagctttgatcctcctagcacagatggggcggatctctcatttcagctgtctgaaggacagacacgacttcggatttccagaggaagagtttgatggtcatcagtttcaaaaagcacaggcgataagtgtactccacgaaatgatccagcaaaccttcaatttattttcaaccgaggattcgagcgctgcctgggaacagagcttgctggagaaattctccacagagctttatcagcagttgaacgacctcgaggcctgcgtgatccaggaagtgggcgtggaagaaacgcctcttatgaacgaggattctatccttgccgttcgcaagtattttcagcgcatcaccttatacttgacggaaaagaagtatagcccttgcgcctgggaggtcgtgagggccgagattatgagatcgcttagctttagcaccaacctacagaaaaggctgcgacggaaggactag

SEQ ID NO: 2621 - DNA, 570 bp, synthetic construct
  misc_feature 1..570: note = source = /note="Description of Artificial Sequence: Synthetic coding sequence"
  source 1..570: mol_type = other DNA
atggcgctgccattcgtgcttcttatggcactggtggtcctgaactgtaagtcaatctgctcactaggatgcgatctgccacagactcattccctcagcaaccgcagaacccttatgattatggcacagatgggccgtatcagcccattcagctgtcttaaagaccggcacgactttggtttcccccaggaagaattcgacggcaaccaattccagaaggcacaagcaatttccgtacttcatgaaatgatccaacagacattcaatcttttctctaccaaggattcctctgccacctgggacgagactcttctggacaagttctatacggagctgtaccagcagcttaacgatctcgaagcttgtatgatgcaggaggtcggtgtggaggacacccctctgatgaacgtggactccatcctgaccgtaaggaagtacttccagcgcatcaccttgtatctcaccgagaagaaatattcaccatgtgcttgggaggtagtcagggcagagatcatgagatctttctccctcagcgcgaacctgcaggaaaggttgagaaggaaggagtag

SEQ ID NO: 2622 - DNA, 570 bp, synthetic construct
  misc_feature 1..570: note = source = /note="Description of Artificial Sequence: Synthetic coding sequence"
  source 1..570: mol_type = other DNA
atggcattacctttcgcattgctcatggcgttggtcgtgctgtcttgtaagtcatcctgcagcctggattgtgacctcccgcaaacccatagcctgggacatagaaggacaatgatgctgctcgcccagatgaggcgaatttcactattttcctgcctcaaggatagacatgactttagatttccacaggaggaattcgacgggaatcaatttcagaaagctgaagccatttcagtcctgcacgaagtgattcagcaaactttcaatctattctctacaaaggactcgtcagttgcttgggacgagagattgctggacaagctgtatactgagctgtaccagcagcttaacgacctggaggcttgtgtgatgcaggaggtctgggtgggagggacacccttaatgaacgaagactcaatccttgcagtcaggaagtatttccaacggattactctgtaccttaccgaaaagaagtactcgccatgtgcatgggaagtggtgagagccgagatcatgaggtcttttagcagctcccgaaacctgcaagagcgactgcggaggaaagagtag

SEQ ID NO: 2623 - DNA, 570 bp, synthetic construct
  misc_feature 1..570: note = source = /note="Description of Artificial Sequence: Synthetic coding sequence"
  source 1..570: mol_type = other DNA
atggcacggagcttcagcctattaatggtggttctcgttctctcctacaagagtatctgcagcttagggtgcgatctgcctcaaacacattctcttaggaatagacgcgccctgattctcttggcacagatggggcggataagtcctttcagttgccttaaggatcgccatgagttcagattccctgaggaagagttcgacggacatcagtttcaaaagacccaggctatctccgtgttacacgagatgatccagcaaacttttaacttgttttcaactgaagactcgtctgctgcctgggagcaaagcctgctcgaaaagttttccaccgagctgtatcagcaattgaacgacctggaagcatgcgtgatccaggaagtcggcgttgaggagacacccctcatgaatgaggattttatcttggctgttaggaagtatttccaacggataacgttatatctgatggagaagaagtacagcccctgtgcctgggaagtggtgagagcagagatcatgaggtccttttctttttcaaccaacctgaagaaagggctgcgccgaaaagattag

SEQ ID NO: 2624 - DNA, 570 bp, synthetic construct
  misc_feature 1..570: note = source = /note="Description of Artificial Sequence: Synthetic coding sequence"
  source 1..570: mol_type = other DNA
atggcactgacattctaccttctcgttgccctggtggtcctctcctacaagtccttttcctccctgggatgtgacctgccacagacgcacagcctgggcaaccgaagggccctgattctgctcgctcagatgaggcgcatttctccattctcctgcctgaaagatagacatgattttgagtttccccaggaggagtttgacgacaagcagttccagaaggcccaggcaatctctgtcctgcacgaaatgattcaacagacattcaatctcttctcgacaaaggattctagcgccgccctcgacgagaccttgcttgacgagttttatattgagctggaccaacagttgaacgatttggaatcttgtgtcatgcaggaggtgggagtcatcgagagtcctctgatgtacgaggacagcattttggctgtgcgaaagtatttccagcgtatcaccctgtatctgacagagaagaaatattccagttgtgcctgggaggtggttcgggcagaaattatgcgaagcttctccctgtcaattaacctgcaaaagagactgaaatcgaaggaatag

SEQ ID NO: 2625 - DNA, 564 bp, synthetic construct
  misc_feature 1..564: note = source = /note="Description of Artificial Sequence: Synthetic coding sequence"
  source 1..564: mol_type = other DNA
atgaccaataaatgtcttctccagattgctctgctgctttgtttctctaccaccgcgctctcgatgtcctacaatctactcggctttctgcagcggtcttcaaactttcagtgccagaaattgctgtggcaactcaatggcaggctcgaatattgtctaaaagaccgcatgaatttcgatatacccgaggagattaagcagctccagcagtttcaaaaggaagatgctgctctgactatctacgaaatgctgcagaacatattcgctatattccgccaggatagctcctctactggctggaacgagaccatcgtcgaaaacctcctggctaacgtgtatcaccagatcaaccatctaaaaacagtgctagaggaaaaattagaaaaggaagacttcactcgagggaagctgatgtcctccctgcacctcaagaggtattacgggcggattcttcactaccttaaggctaaggagtactcccactgtgcctggactattgtcagagtggaaatcttgcgaaatttttattttatcaataggttgaccggatatctcaggaattag

SEQ ID NO: 2626 - DNA, 537 bp, synthetic construct
  misc_feature 1..537: note = source = /note="Description of Artificial Sequence: Synthetic coding sequence"
  source 1..537: mol_type = other DNA
atgcactcctcagcattactctgttgtcttgtactgttaaccggcgttagggcttcacccggccaggggacacaatccgagaactcctgcacgcatttccctgggaacctccccaatatgcttagggatcttagagacgcattctcccgcgtaaaaactttttttcaaatgaaagaccagctggacaacctgcttctaaaggagagcctcctggaggactttaagggttacctcgggtgtcaggcgctgtcagagatgatccaattctacttagaggaagtgatgcctcaggccgaaaaccaagatcctgacattaaggcacatgtgaacagcctgggggagaacctgaaaactctgcgcctcaggcttagacgctgccacaggtttctgccctgcgagaacaaaagtaaggcggtcgaacaagtgaaaaacgcattcaacaagctacaggagaagggcatttataaggccatgagcgagtttgacatcttcattaattacattgaggcctacatgacaatgaagattcgcaactag

SEQ ID NO: 2627 - DNA, 489 bp, synthetic construct
  misc_feature 1..489: note = source = /note="Description of Artificial Sequence: Synthetic coding sequence"
  source 1..489: mol_type = other DNA
atgagatcctcccccgggaatatggaaaggatagttatctgtctcatggttattttccttggtactttagtacacaaaagcagctcacaggggcaagaccgccacatgattagaatgcgtcagctgatagatatagttgatcagctgaagaactacgtgaacgatctggtgcccgaatttctgccggcccctgaggatgtggaaacaaactgcgagtggtccgccttctcatgctttcaaaaggctcagctgaaatccgccaataccggcaataacgaacgtattattaacgtgtccattaagaaacttaagagaaagccaccttcaaccaatgcgggcaggagacagaaacataggctaacgtgcccctcatgcgactcatacgagaagaaacctccgaaggagttccttgaacgctttaagagcctgttgcagaagatgattcaccagcacctctcctctcgcacccacggctctgaagacagctag

SEQ ID NO: 2628 - DNA, 534 bp, synthetic construct
  misc_feature 1..534: note = source = /note="Description of Artificial Sequence: Synthetic coding sequence"
  source 1..534: mol_type = other DNA
atgttccacgtcagctttcgatatatttttggactgcccccacttattcttgtgttattgcctgtggcatcttcagactgcgatatcgaggggaaagatgggaagcagtacgaatcagtcttgatggtgtccattgatcaactcctcgactccatgaaagaaattggttctaattgtctaaacaatgagttcaactttttcaagcgccacatttgtgacgccaataaggagggaatgtttttgtttcgggccgctcgtaagctgaggcagttcctgaagatgaactccacaggcgattttgatttacacctgctaaaggtgtcggagggcaccactatattgctgaattgcaccgggcaagtgaaagggagaaagccagccgcgctgggggaggctcaacctactaagtcactcgaggaaaacaaatctctgaaggagcagaagaagctcaatgatttatgcttccttaagagattattgcaggagatcaagacttgctggaacaagattctcatggggactaaagagcactag

SEQ ID NO: 2629 - DNA, 216 bp, synthetic construct
  misc_feature 1..216: note = source = /note="Description of Artificial Sequence: Synthetic coding sequence"
  source 1..216: mol_type = other DNA
atgttccatgtgtcctttcggtacatttttgggttaccaccactgatccttgtgctgttgccagtggccagtagtgactgcgacatcgagggcaaggatggcaaacagtatgagagcgttctcatggtcagcatagaccagttactgaaccaaccctataagaaaaaagagaaaaggaccgagagaaagcagcagtcagccatgagtaataattag

SEQ ID NO: 2630 - DNA, 393 bp, synthetic construct
  misc_feature 1..393: note = source = /note="Description of Artificial Sequence: Synthetic coding sequence"
  source 1..393: mol_type = other DNA
gtgtcctttaggtacatctttggccttccccctctgatccttgttctgctgccggtggcgtcttcagactgcgatattgaaggcaaggacggcaagcaatacgaatcagtgctgatggtgagcatcgatcagctgctggactctatgaaggaaattgggtccaattgcttaaataacgagtttaacttctttaagaggcacatctgtgacgctaacaaggtaaagggcagaaaacctgctgccttgggcgaggcccaaccaaccaagtctcttgaggagaataagtctctgaaggaacaaaagaaactgaatgatttatgttttctgaaacggctcctgcaagagatcaagacctgttggaacaaaatcctcatgggtaccaaagaacactag

SEQ ID NO: 2631 - DNA, 216 bp, synthetic construct
  misc_feature 1..216: note = source = /note="Description of Artificial Sequence: Synthetic coding sequence"
  source 1..216: mol_type = other DNA
atgttccacgtttcattccgctacatttttggactgccccctctgattctggtgctcttgccagtggcatcatcggattgtgacatcgaaggaaaagatggcaagcagtacgaatccgtattaatggtctcaatcgatcagctgctcaaccaaccatacaagaagaaagagaagcgaacagagcgcaagcaacagtccgccatgtctaacaactag

SEQ ID NO: 2632 - DNA, 114 bp, synthetic construct
  misc_feature 1..114: note = source = /note="Description of Artificial Sequence: Synthetic coding sequence"
  source 1..114: mol_type = other DNA
atgttccatgtctctttccgctatatctttggacttccccccctgatactggttctgctgcctgtcgcgtcctctgactgcgacatagaaggccaacacgaaaggaattggtag

SEQ ID NO: 2633 - DNA, 402 bp, synthetic construct
  misc_feature 1..402: note = source = /note="Description of Artificial Sequence: Synthetic coding sequence"
  source 1..402: mol_type = other DNA
atgtttcacgtaagcttcaggtatatcttcggactgccacctttaatattggtgctgctcccagtcgcaagctcagattgcgatatcgagggaaaggatgggaagcagtacgaaagcgtgctgatggtctccatcgatcagcttctggattctatgaaggagattggtagcaactgtctgaacaatgagtttaactttttcaagcggcatatatgcgatgccaacaaggtgaagggtaggaagcctgctgctctgggggaagctcagccgaccaaatctctggaggagaacaagtcgctgaaagaacagaagaagctgaacgacctttgtttcctcaagaggctattgcaggagattaagacatgttggaacaagattctcatgggcacgaaggagcattag

SEQ ID NO: 2634 - DNA, 114 bp, synthetic construct
  misc_feature 1..114: note = source = /note="Description of Artificial Sequence: Synthetic coding sequence"
  source 1..114: mol_type = other DNA
atgtttcatgtgtcctttcggtatatcttcggcctgccacctctgatactagtgctgctacccgtggcctctagtgattgtgacatagaagggcaacatgaacggaactggtag

SEQ ID NO: 2635 - DNA, 195 bp, synthetic construct
  misc_feature 1..195: note = source = /note="Description of Artificial Sequence: Synthetic coding sequence"
  source 1..195: mol_type = other DNA
atgaaagagataggctccaattgtctgaacaacgagtttaacttctttaaaagacatatctgcgacgctaacaaggaagagaacaaatcactgaaggagcagaaaaagctgaatgatctctgttttctgaaacgattgctccaggaaatcaaaacatgttggaataaaatccttatggggacaaaggagcattag

SEQ ID NO: 2636 - DNA, 2643 bp, synthetic construct
  misc_feature 1..2643: note = source = /note="Description of Artificial Sequence: Synthetic coding sequence"
  source 1..2643: mol_type = other DNA
atggccgagctttaccgagtgctggaggccgggaagattggcatatttgagagccctacggggactggaaaatctctgagtcttatctgtggagcactgtcgtggctacgggatttcgagcagaagaaaagagaggaagaggctcgtctgctggaaaccggcacaggtcctctccacgacgagaaagacgagtcgttgtgcctctcatcatcttgtgagggggctgccggtacacctcgccccgccggcgaaccagcttgggttacgcagttcgtacaaaagaaagaagagcgggatctggtggacagactgaaagctgagcaggctaggagaaaacaacgggaggagcgcctgcagcagctgcaacatagggtccagctgaaatatgccgcaaagaggctgcgacaggaggaagaagagcgggagaatttactccggctcagccgagaaatgctagagacaggacctgaggccgaaagactggagcagctcgagagcggcgaagaggagctagtcttggccgagtacgaatccgatgaagaaaaaaaggtggccagtcgtgtcgacgaagatgaagatgatctcgaggaagagcacatcaccaaaatttattactgctcccggacccactcccagctggctcaatttgtccacgaggtgaaaaaaagcccattcgggaaggatgtgcgccttgtgtccctcggatccaggcagaacctctgcgtgaatgaggatgtcaagtccttgggaagcgttcagctgattaacgaccgctgcgtcgatatgcagaggtcaaggcatgagaagaagaagggcgccgaggaggaaaaaccgaagcggcgccgccaagaaaaacaagctgcatgcccattctacaatcatgaacagatgggcctacttcgggatgaagccctggccgaggtgaaagacatggagcagctcctggccctgggaaaggaggctagggcctgcccctattatggttccaggcttgctataccggcggctcagcttgtggtactgccctatcagatgttgctgcatgcagccactcgtcaggctgctggtattcggcttcaggatcaggtcgtgatcatagatgaggctcacaacttgatagataccatcactggtatgcacagcgtggaagtgagcggttcccagttatgtcaggctcacagtcaactgttgcaatatgtggagagatatggcaaacggctgaaggctaaaaatctgatgtacctgaaacaaattctctatttgctggagaagtttgtcgctgttctcgggggcaatattaaacagaaccccaacacacagagcttgagtcagaccggaacagagctcaagactataaatgactttctgtttcagtctcaaattgacaacataaatttgtttaaggttcaacggtattgcgaaaaaagcatgatttccagaaaattattcggatttacagagaggtatggcgcggtgtttagcagccgagaacaacccaagctggccgggttccagcaattcctgcaaagcctgcagcctagaacaacggaagcactggcagcaccggctgacgaaagtcaggcgtctactctgaggcctgcctcccctctgatgcatatccagggcttcctggccgccttgaccaccgccaatcaagacggtcgggtcattctgtctagacaggggtccctgagccagtcaaccctgaaattcctgcttctaaaccccgctgtgcacttcgctcaggtggtgaaagagtgtagagcagtggttatagctggcggtacaatgcagcccgtttccgattttcgacagcaattactggcttgcgctggtgtcgaggctgagagagtcgtagaattttcttgtggacacgtgattccccctgataatatactcccccttgtgatttgctccgggatatctaatcagcctttagagtttacttttcagaagagagagctgcctcagatgatggacgaggtaggaaggattctgtgcaacttatgtggggtggtaccaggaggtgtggtgtgtttttttccgtcatacgaataccttaggcaggtacacgcacactgggaaaagggcggactgctgggccggctggccgctagaaagaaaatatttcaagagcccaagagcgcacaccaggtggaacaggtgctgttagcatactctcgctgcatccaggcgtgcgggcaggaacgcggccaagtcacaggtgctttgttactctctgtggtcggtggcaagatgtctgagggaattaatttcagtgataatctgggccgctgtgtcgtaatggtcggcatgcccttcccaaatatccggtctgcagaactgcaggagaagatggcttatctcgatcaaacactacctcgagctcccggccaggcccctcctggtaaggcccttgtagagaacctgtgtatgaaggctgttaaccagagcatcggcagagccatacgccaccagaaggattttgcctcagtggtgctgcttgaccagagatacgcccggcctcccgtgctggctaagctacccgcttggattagggcgagggtggaagtgaaagccaccttcggaccagcaatcgccgctgtacagaagtttcaccgcgagaagagcgcctccagttag

SEQ ID NO: 2637 - DNA, 738 bp, synthetic construct
  misc_feature 1..738: note = source = /note="Description of Artificial Sequence: Synthetic coding sequence"
  source 1..738: mol_type = other DNA
atgaagaagacccagacttggattctaacgtgtatttacctgcagctcctcctcttcaaccccttggtgaagactgaggggatttgcaggaacagggtaacaaacaatgtaaaggacgttaccaagctggttgccaaccttcctaaggattatatgatcacacttaagtacgtccctggaatggacgttctgccaagtcattgttggatctcagaaatggtggttcagctttccgacagcctaaccgaccttctcgataaattttccaacatctcggaaggcctgtcgaattacagtattatagacaaactggtgaatattgtcgacgacctagtggagtgcgttaaagagaattccagcaaagacctgaaaaagagtttcaagtctccagaacctcgcctgttcacgccagaagagttttttcgtatcttcaatcggtccatagatgcattcaaggacttcgtggtcgcatcggagacatctgattgcgtggttagtagcaccctgtcccctgagaagggtaaagcgaaaaatcctccgggggacagcagcctgcactgggcagccatggctctccccgcactctttagtctgatcatagggttcgcttttggagcgctgtactggaaaaagcggcagccctctctcactagagctgtcgaaaatatccaaatcaatgaagaagacaacgaaataagcatgctgcaggagaaagaacgggagtttcaggaggtctag

SEQ ID NO: 2638 - DNA, 93 bp, synthetic construct
  misc_feature 1..93: note = source = /note="Description of Artificial Sequence: Synthetic coding sequence"
  source 1..93: mol_type = other DNA
ggaatggacgtcctcgggagacctaaaatcccactggagactccagcctacacgggacagccatggcactgccagcattgcttcctgctctag

SEQ ID NO: 2639 - DNA, 3039 bp, synthetic construct
  misc_feature 1..3039: note = source = /note="Description of Artificial Sequence: Synthetic coding sequence"
  source 1..3039: mol_type = other DNA
atgcctgcctctgcaccgccgcgccggcctagaccaccgcccccatccctgagcctgttgcttgtgctactgggtttgggcggtcggcgtctccgcgccgagccgggcgacggtgcccaaacctgggccaggttttcccggcctcctgccccggaggcagctggcctgttccagggtacattccctgatggttttctctgggcagtcggctctgctgcatatcagacagagggcgggtggcaacagcacggcaagggtgcaagcatttgggatacattcacacaccaccctttggcacccccaggcgactccaggaacgccagcctgcccctgggtgctccaagcccccttcagcctgcgactggagacgttgcctctgacagctataataacgtctttcgagatacggaggcactcagagagctgggcgttacccactaccggttcagtatatcttgggcccgggtcctccccaacggaagcgccggggtgcctaatcgtgagggcctgagatactaccggaggctcctagaaagacttcgagaattgggggtccagcccgttgtcaccttgtatcactgggatctgccacagcgcttgcaggacgcttacgggggttgggccaatagagccctggctgatcattttagagattatgcggaactctgcttcagacacttcggaggccaggtgaaatattggatcacgatcgataatccatacgtggtggcctggcatggatatgctaccgggagactggcgccgggaatccgcgggtctccccggctcggatatttagtcgcacacaatctgctgctggcccacgccaaagtgtggcacctctacaatacctcctttaggccgacgcagggaggccaggtcagcatcgcactgagctctcattggataaatccacggaggatgaccgaccactccatcaaggagtgccaaaagagtctggattttgtgcttggatggttcgcaaaaccagtctttatcgacggcgattaccctgaaagtatgaaaaacaacctgagctctattctgcccgatttcactgagagtgaaaagaaatttataaagggaactgcggatttttttgctctatgtttcggacctaccctctcgttccaactgctggatcctcatatgaagttccggcagctagagtccccgaacctgagacaactcttgagttggatagacctggagtttaaccatccccagattttcatcgttgaaaatggctggttcgtatctggtacgacgaaacgtgatgacgccaagtatatgtactacctgaaaaaatttattatggagacccttaaagcgatcaagttggatggcgtcgacgttatcggatacacagcatggtccctcatggatggttttgagtggcacagaggttacagtattcgacgagggctcttctacgtcgactttctgagtcaggataagatgcttctgccgaaatctagcgctctgttctaccagaagcttatcgaaaagaatggcttccctcctctgcccgagaatcagcccctggagggtacattcccatgcgacttcgcctggggcgtggtggataactatattcaggtcgacactacgctgagtcagtttaccgacctgaacgtctacctgtgggatgtgcaccatagcaagcggttgatcaaggtggatggggtagtgacaaaaaaacgaaagtcttattgcgtcgatttcgctgcgattcagcctcagatcgcgcttttacaggagatgcatgttacacactttcgatttagcttagactgggccttgattctgcccctgggcaaccaatctcaggttaatcataccatcctgcagtattaccggtgcatggcttcagagttggttagggtcaatattactcccgtggtggctctctggcagcccatggcccccaaccagggtctgcctagactcctggcccgacaaggcgcctgggaaaatccgtacaccgcactggcattcgccgaatatgcacgtttgtgttttcaggagctggggcatcatgttaagttatggatcaccatgaatgagccatataccaggaacatgacctattccgccggacacaacctcctgaaggcacatgccctggcctggcatgtgtataatgagaagtttaggcacgcccagaatggtaaaatctctatcgcgctgcaggccgactggatcgaacctgcctgtccattcagccagaaggacaaagaagtcgccgaaagagtgttggaattcgatattggctggcttgctgagccgatttttgggagcggtgattacccctgggtaatgcgggactggctgaatcaaaggaacaactttttacttccttactttaccgaggatgaaaagaagctgatccagggtaccttcgatttccttgccctcagtcactacaccacgatcctggtggattcggaaaaagaggatccaatcaaatataatgattacctggaggtgcaggagatgacagatatcacttggctcaactcaccttcacaggtcgccgttgtcccttggggtttgcgtaaagtcctgaattggctaaaattcaagtatggcgatcttcccatgtacattatctctaatggcatagatgatggtcttcacgcagaagacgaccagctcagagtttattatatgcagaactacataaatgaagctcttaaagctcacatcctggatgggatcaacttgtgtggctacttcgcctacagctttaacgataggacggccccccgtttcgggttgtaccgctatgctgccgatcagttcgagcccaaggcaagcatgaagcactaccgtaagatcatagattccaatgggtttccaggcccggaaacactggagcggttctgtccagaggagttcacggtatgcacagagtgttctttcttccacacgaggaaatccttgcttgctttcattgcttttttgttttttgcttcaattatctctttaagtcttatattttactattccaagaaaggacgccggtcttataaatag

SEQ ID NO: 2640 - DNA, 729 bp, synthetic construct
  misc_feature 1..729: note = source = /note="Description of Artificial Sequence: Synthetic coding sequence"
  source 1..729: mol_type = other DNA
atgactgaccactccattaaggaatgtcagaaatctctggactttgtactggggtggtttgctaagcccgtgttcatcgacggtgactacccagagagcatgaagaataacctaagcagcattcttcccgacttcaccgagtctgagaagaagtttatcaaaggcaccgccgattttttcgccctctgcttcggccccacactctcttttcagttattggacccccatatgaagttccgccagctagagtctccaaacctccgccagttactctcctggattgacctggaatttaatcacccacagatcttcatcgtggagaacgggtggttcgttagtgggaccactaagcgtgacgacgcaaaatacatgtattacctgaagaagttcattatggagaccctgaaagctataaagctcgacggggtggatgtcataggttacaccgcctggagccttatggacggcttcgagtggcaccggggttacagcatccgacgaggcctgttctatgtggatttcctgtctcaggataaaatgttgctgcctaaaagtagtgccttattctaccagaaacttatcgaaaagaacggctttccacccctacctgaaaaccaacccctggaaggcacgttcccctgtgacttcgcatggggcgtggtggataattatatccaggtgtcacagctcactaagccgattagctcgctgactaaaccctaccactag

SEQ ID NO: 2641 - DNA, 1440 bp, synthetic construct
  misc_feature 1..1440: note = source = /note="Description of Artificial Sequence: Synthetic coding sequence"
  source 1..1440: mol_type = other DNA
atgcgacagcctccaggggagtcagatatggctgtttccgacgccctgctgccttctttttctacattcgcttcagggccggctgggagggaaaaaacactcagacaggccggggcccccaataatagatggagggaggaacttagccacatgaagagactccctcctgttctgccggggcgtccatatgaccttgcagccgcgaccgtggccacagacctggaatccgggggagccggtgctgcctgcggaggatccaatttagcaccactgccccgccgggagacggaagagtttaacgacctcctcgatttggactttatcctcagcaattccctcacacatcctcccgagagcgtcgcggccaccgtctcatcctcagcctccgcctcatcttccagcagccccagcagcagcggtcctgcgtctgccccatccacctgctccttcacctaccccatccgcgctgggaacgatccaggcgttgcgccgggaggcaccggcgggggcctgctgtacggacgcgaaagcgccccgcccccaaccgcaccgttcaatcttgccgatattaatgacgtgtctcccagtggcggctttgtcgctgagctactgaggcccgaactggatcctgtctatattccccctcagcagccccaaccaccaggtggaggtctcatgggcaaatttgttctaaaggcctctctgtctgcccctggaagcgaatacgggtccccatccgtgattagtgtgagcaaaggttcccctgatggatcccatccagttgtagtggccccatacaatggaggcccaccccgtacgtgcccaaaaataaagcaggaggctgtatcatcttgtactcacctgggtgcggggcccccattgagcaatgggcaccggcccgcagctcacgatttccctcttgggagacaactcccttccaggacgacgccgactctgggactcgaggaagttctttcatctagagattgccatccggccctcccactaccaccaggttttcacccccatccaggacctaactacccatcctttttacccgaccaaatgcaaccccaggtaccaccactgcactatcaggaacttatgccgccgggcagctgcatgccagaagagcctaagcccaagaggggtagacgtagttggccgcgtaaacggacggccacccacacttgcgactacgccggatgtggcaagacctacacaaagagttcgcatctcaaggctcatctacgtacgcacacaggggaaaagccatatcactgcgactgggacgggtgcggatggaagttcgctcgaagtgacgagctcacccggcattatcgtaaacacaccgggcatcgacccttccagtgccaaaagtgtgatcgtgcctttagccgtagcgatcacctcgcactccacatgaagcggcatttttag

SEQ ID NO: 2642 - DNA, 699 bp, synthetic construct
  misc_feature 1..699: note = source = /note="Description of Artificial Sequence: Synthetic coding sequence"
  source 1..699: mol_type = other DNA
atggcagtctccgatgctctattgccgagcttctccacctttgctagcgggccggcaggtcgcgaaaagaccctgaggcaagccggcgccccaaataacaggtggagggaggaactcagtcatatgaaacgtctgccccccgttcttccaggcaggccgtacgatctagcagccgctactgtcgcaaccgatctggaatccggtggagccggcgcggcctgtggcgggagcaatctcgcgcctttgccaagacgcgagaccgaagagtttaacgatctcctcgacctagactttatcctgagcaacagcctgacacacccacccgagagcgtggccgctaccgtgtctagctccgcgtccgcctcatctagcagttctcccagtagttcaggccctgcctcagcgccgtccacctgctccttcacctacccaatccgggctggtaatgaccccggcgtggcccctggtggaaccggcggtggtctcctgtatggacgggaaagcgcccctccccctactgccccctttaatctcgcagatatcaacgatgtttcaccctccgggggttttgtcgctgagttgcttcgtcccgagcttgaccccgtctatatcccacctcagcaaccgcaaccacccgggggcggcctgatgggaaagttcgttctgaaggcgtctctatctgctccagggagtgagtag

SEQ ID NO: 2643 - DNA, 69 bp, synthetic construct
  misc_feature 1..69: note = source = /note="Description of Artificial Sequence: Synthetic coding sequence"
  source 1..69: mol_type = other DNA
atgcgacagccacccggggagagcgacatggcagtgagtgacgccctgctccccagcttctcaacatag

SEQ ID NO: 2644 - DNA, 117 bp, synthetic construct
  misc_feature 1..117: note = source = /note="Description of Artificial Sequence: Synthetic coding sequence"
  source 1..117: mol_type = other DNA
atgcggcagcctcccggggaatccgatatggccgtgtccgatgcgcttttgccgtccttcagcacatttgcctctggtccggccggacgggagaaaacgcttcggcaagcgggatag

SEQ ID NO: 2645 - DNA, 1323 bp, synthetic construct
  misc_feature 1..1323: note = source = /note="Description of Artificial Sequence: Synthetic coding sequence"
  source 1..1323: mol_type = other DNA
atgggtcccccagggtcaccatggcagtgggtgaccctgttactcgggctgctgctgccaccagccgcccctttctggctgctgaacgtgctgtttcccccgcatacaactccgaaggcagagctgtccaaccatactcgcccagtgatacttgtgcctggatgcctcggaaaccagctcgaggctaagctcgacaagcctgatgttgttaactggatgtgctacagaaaaaccgaggacttttttaccatctggctggatctcaatatgtttcttcccctgggcgttgactgttggattgacaacaccagagtggtgtataacagatcttccggactagtctcaaatgctcctggggtacaaattcgggtgcctgggtttggaaagacatacagcgtggaatacctcgacagtagcaagctggccggctacctacacacacttgtgcagaacctcgtgaataatgggtacgttcgagacgagaccgtaagagccgccccatatgactggaggcttgaacctgggcagcaggaagagtattatcggaagctggctggccttgtcgaggaaatgcatgcagcttatgggaagcccgtctttcttataggccatagtctgggctgtctgcacctgctgtacttcctgttaaggcagccccaggcatggaaggaccgctttattgatggcttcatctcgttaggcgccccgtgggggggaagcattaagccgatgctggtcctcgccagtggcgataaccagggaatacccatcatgtcctctataaagcttaaggaggagcagcggatcactactacgagcccttggatgttcccttcaaggatggcctggcctgaagatcatgtgtttatcagtacacccagctttaactacacgggtcgcgactttcaacggttttttgccgatcttcatttcgaggagggatggtacatgtggcttcaatcccgagatcttctcgccggattgcccgcaccaggggtggaggtctattgcttgtacggcgtcggattacccactcctcgtacatacatttacgatcacggctttccatatacagaccccgtcggagttctgtatgaggatggcgacgatacggtcgccacccgttctaccgagttgtgtgggctgtggcaaggaagacagccccaaccagttcatctattgccactccatggtatacagcacctcaacatggtgttctcaaatttgacgctcgaacacatcaacgctattctccttggagcttatcgccagggaccaccagcctcaccgacagccagccccgaacctccaccgcctgagtag

SEQ ID NO: 2646 - DNA, 753 bp, synthetic construct
  misc_feature 1..753: note = source = /note="Description of Artificial Sequence: Synthetic coding sequence"
  source 1..753: mol_type = other DNA
atggccgacaacttttcacttcacgatgctcttagcggtagtggcaatccaaatcctcaaggttggccaggagcttgggggaaccagccagctggcgctggtggttatccaggagcttcttatcccggcgcttacccaggacaagctccacctggggcctatcctggccaagccccacctggcgcttaccctggtgcacctggagcctaccctggggctcctgctccaggcgtatatcctggccccccttcaggacccggtgcctacccatcttctgggcagccctcggcgaccggagcctaccccgcaacggggccatatggggcacctgcaggccccctgatcgtgccctataatctcccactgccaggaggtgtggtgcccagaatgctgatcacgattcttggcaccgttaaaccaaatgcaaacagaatcgcgttagacttccagaggggcaacgacgtcgcgtttcattttaaccctcggtttaacgagaacaacagaagggtgattgtttgcaacactaagctggataacaactggggacgcgaagagagacaatccgtctttccattcgagtcgggaaagcccttcaagatacaggtactcgtggagccagaccatttcaaagtggccgtcaacgatgcacaccttttgcaatacaaccacagagtgaagaagctgaacgaaatctccaagctggggatcagcggggatatagacctgactagcgcctcctatacaatgatatag

SEQ ID NO: 2647 - DNA, 630 bp, synthetic construct
  misc_feature 1..630: note = source = /note="Description of Artificial Sequence: Synthetic coding sequence"
  source 1..630: mol_type = other DNA
atgggcagcgttagtaatcagcaattcgcaggcgggtgtgccaaggctgccgaagaggctccggaggaagctcctgaagacgccgcccgcgccgctgacgaacctcaactactccatggtgcgggaatttgcaagtggttcaacgtgcggatgggctttggtttccttagcatgacagcaagggccggggtagcgcttgatcccccggtggacgttttcgtgcaccaatctaaactccatatggaaggattccgtagccttaaagaaggtgaggctgttgaattcacctttaaaaagagtgcgaaaggtctcgaatcaattcgggtcaccgggcctggaggagtgttctgcatcggctccgagcgccggcccaaggggaagtccatgcagaagcgtcggtccaaaggcgaccggtgttataactgtggcggtctagatcaccacgccaaggaatgcaaacttccaccacagcccaaaaaatgtcacttttgtcaatccatttcccacatggtggccagttgtccattgaaagcacagcaggggccatcagcccagggaaaacccacatacttccgagaagaagaagaggaaattcattcgccgacgttactgcccgaagcgcagaactag

SEQ ID NO: 2648 - DNA, 630 bp, synthetic construct
  misc_feature 1..630: note = source = /note="Description of Artificial Sequence: Synthetic coding sequence"
  source 1..630: mol_type = other DNA
atgggttccgtgagtaatcagcagttcgctggcgggtgcgccaaggcggctgaagaagctccagaggaggcacctgaagacgccgcccgagcagctgacgagccacagctccttcacggagcggggatttgcaagtggttcaatgtgaggatgggctttggcttcctgtccatgaccgccagagccggcgtagcgctggacccacctgtcgacgtgtttgttcaccagagcaagctacatatggagggctttaggtcgctcaaggaaggcgaggccgtagaatttacctttaagaagtccgctaagggtctagagagtattcgcgtgacagggcccggcggcgttttctgtatcggcagtgaacgtcggcccaagggcaagtctatgcagaaacgacgatccaagggggatagatgctacaattgtgggggcttggatcaccacgccaaagaatgtaaactgcctcctcaaccaaaaaagtgtcacttctgccagtccatcagtcacatggtcgcaagctgtcccctcaaagcccagcaggggccaagcgcacagggtaaacctacctacttccgcgaagaagaggaagagattcacagcccgactttgctgcccgaggcccagaactag

SEQ ID NO: 2649 - DNA, 660 bp, synthetic construct
  misc_feature 1..660: note = source = /note="Description of Artificial Sequence: Synthetic coding sequence"
  source 1..660: mol_type = other DNA
atgaaaatgaggttcctagggctcgttgtgtgtctagttctctggacattacattcagaaggttccggcggaaaactaaccgccgtggacccagagactaatatgaacgtcagcgagattattagttattggggctttcccagtgaagaatacctggtagaaacagaggacggttatatcttgtgtctcaacagaatcccccacggccgcaagaaccatagtgacaagggtcctaagcccgtggtctttctccaacacgggctgcttgcagattcctcaaattgggtaaccaatctcgccaattctagtctaggttttatcctggctgacgccgggtttgacgtttggatgggcaacagcagaggaaatacatggtctcggaagcacaagaccctgtcggtctctcaagacgagttctgggccttctcttacgatgagatggctaagtacgatctgcccgcaagcatcaattttatattgaacaaaacaggccaggaacaggtctactacgttggccattcccagggtactacaattgggttcattgcctttagtcaaataccggaactggccaagagaattaagatgttcttcgcccttgggcctgtcgcctccgtcgcattttgtacaagccccatggccaaattaggtcgcctgtag

SEQ ID NO: 2650 - DNA, 1200 bp, synthetic construct
  misc_feature 1..1200: note = source = /note="Description of Artificial Sequence: Synthetic coding sequence"
  source 1..1200: mol_type = other DNA
atgaaaatgcgcttcctgggcctagtggtgtgcctggtcttatggacgcttcactcggagggctcagggggcaagctcacggccgtggatccagagactaatatgaatgtgtccgaaattatctcatactggggattcccttccgaggaatatctggtggaaaccgaggatggctacattctgtgcctgaacaggatccctcacggaaggaagaatcactcggacaaggggccgaagccagtggttttccttcagcacgggctgttagccgatagtagcaactgggtaactaatctagcaaactcctccttgggatttatcctggccgacgccgggtttgatgtttggatggggaactctcgagggaatacatggtccaggaaacacaaaaccctttctgtgtcccaggacgagttctgggccttctcctacgatgaaatggccaaatacgacctcccagcatcaataaacttcattttaaataagacagggcaggagcaagtgtactacgtcggccattctcagggcactacaattgggttcattgcattcagtcagatacccgaacttgccaagcgaatcaaaatgttcttcgccttggggcctgtcgccagcgttgccttctgcacatcacctatggccaagcttgggcggctgcccgatcatttaatcaaggacctgtttggcgataaagaattcctcccccaatctgcatttctgaagtggcttgggacccatgtatgcacccacgtgattctgaaagagctgtgcggcaacctctgttttttgttatgcggttttaacgagcgcaatttgaacatgtcccgcgtggatgtttacaccactcactcaccagccgggacatcggtgcagaacatgctccactggtcccaggccgtcaaattccagaagttccaagcctttgactggggctccagtgccaagaattatttccactacaaccagtcataccctccgacatacaatgtcaaggatatgctcgttcctacagccgtatggtcgggagggcacgattggctggctgacgtctatgatgtaaacatcctgttaacacagatcacgaatctcgtttttcatgaaagcattcctgagtgggaacatctcgatttcatctggggcctggacgcaccatggcgcctttacaataagatcatcaatctgatgaggaaataccagtag

SEQ ID NO: 2651 - DNA, 1074 bp, synthetic construct
  misc_feature 1..1074: note = source = /note="Description of Artificial Sequence: Synthetic coding sequence"
  source 1..1074: mol_type = other DNA
atgaagcttagaaccctggccgtgagcgctaccgtcgtaaaggatggtgtgtcaggcgtctgcagctttaggtgctcagacgtttctggggtcctcccttcaggcccaaagccagtggtgttcctgcaacacggcttgctcgccgacagtagcaattgggtgaccaatctcgctaacagcagtctcggctttatacttgccgatgccgggtttgatgtgtggatggggaacagccgaggaaacacctggtctagaaagcacaagaccctcagcgtgtcccaggacgaattctgggccttttcctacgatgaaatggcaaaatacgaccttcccgcctctattaatttcatcttgaataagacaggtcaggaacaggtatattacgtgggccactctcaggggactacaattgggttcattgccttttcacagataccagagctcgccaaacggattaagatgttctttgccctgggccctgttgcatccgtcgccttttgtaccagccccatggccaagcttggacgattgcctgaccatcttatcaaagatctttttggagacaaggagtttctcccccagtctgccttcctgaagtggctgggcacacacgtgtgcacacacgtgatcttaaaggagctgtgcggaaacctgtgtttcctgctctgcggctttaacgaacggaacttgaacatgtcgcgcgtagatgtatacaccacacactcacccgctggaacctccgtgcaaaacatgctacactggtcccaggcggtgaagttccagaaattccaggctttcgattggggctcttcagcaaaaaactactttcactacaaccagagctatcctcccacctacaacgtcaaggatatgctagttccaaccgccgtgtggtctggtggtcacgattggctggcggatgtgtatgatgtgaatatcctccttacacagataacaaatctggtattccatgagagtattcctgaatgggagcatttggacttcatctggggtctggacgcaccttggcgcttgtacaataaaatcatcaatcttatgcgtaaatatcagtag

SEQ ID NO: 2652 - DNA, 1200 bp, synthetic construct
  misc_feature 1..1200: note = source = /note="Description of Artificial Sequence: Synthetic coding sequence"
  source 1..1200: mol_type = other DNA
atgaagatgcgattcctcggtctcgttgtgtgcctggttctgtggactcttcactctgagggcagcgggggaaagctcaccgcggtagacccagagactaacatgaacgtcagcgaaattatcagttattgggggtttcctagcgaggagtatctggtagaaaccgaggacggttacatcttgtgtttgaatcgcatacctcatggccgaaagaaccacagtgacaagggacctaaacctgtggtctttctgcagcatggcctgctggccgatagtagtaactgggtgaccaacttggccaacagctctctggggttcatcctggctgatgccggattcgatgtctggatgggaaattcccgaggcaatacttggagccgtaagcacaaaaccctttctgtcagccaggatgagttctgggccttctcatatgacgagatggccaaatatgaccttcccgcttcaattaacttcattttaaacaaaacaggtcaggaacaggtgtactatgtgggacattcccaagggaccacaatagggtttattgcattttcgcagataccggaacttgcgaaacgcattaagatgttcttcgcccttggccccgtcgcttccgtggccttctgcaccagcccaatggctaagctcgggcgcctccccgaccatctgattaaggatctgtttggggataaggagttcctgccacagtcagccttcctgaagtggcttgggacacatgtctgtacccacgtgatcctgaaagaactgtgtggcaatctgtgtttcttgttatgcggattcaacgaacggaaccttaatatgtctagagttgacgtatatacaactcacagccctgccggcacgtctgttcagaatatgctccactggagccaagctgtcaaatttcagaaattccaggcctttgattggggtagttctgctaagaattacttccattacaatcagtcttacccacctacctacaatgtaaaagatatgttggtcccaaccgcggtgtggagcggtggccacgactggctggcggacgtatacgacgttaatattctgctcactcagatcaccaatctggtgttccacgagtcaatacctgaatgggagcatctcgatttcatctgggggctggatgcaccatggaggctgtacaataaaattattaatttgatgaggaaataccagtag

SEQ ID NO: 2653 - DNA, 1032 bp, synthetic construct
  misc_feature 1..1032: note = source = /note="Description of Artificial Sequence: Synthetic coding sequence"
  source 1..1032: mol_type = other DNA
atggcgtgtctcgaatttgtcccttttgatgtgcagatgtgcctggagttcctacccagcggtcctaagcctgtggtgtttctacaacatggcttactggccgactcttccaactgggttactaacctggcgaattcctctctgggtttcattctcgcggacgcgggatttgacgtttggatgggcaatagtcgaggcaacacctggtcaagaaagcacaagactctgtccgtgtcccaagatgaattttgggcattttcctatgacgagatggccaagtacgacttacccgccagcatcaatttcatcctcaacaagacaggacaggaacaagtttattacgtgggccacagccagggcacaactatcggattcattgcgttctctcaaataccggagctcgcaaagagaataaagatgttcttcgccctggggcccgtcgcctcggtagcattctgcacctcacccatggccaagttgggccgcttgccagaccatctgattaaagacctattcggcgacaaggaatttctaccccagagcgcctttctcaagtggttaggcacccatgtgtgtacacatgttattctgaaggagctgtgtggaaacttatgcttcctactctgtgggttcaacgaacgcaaccttaatatgagtcgagtggatgtctacaccacacattcaccagcaggcactagcgtgcaaaatatgttacactggtcccaggcagttaagttccagaagttccaggcattcgattgggggtccagtgcaaagaactatttccattacaatcagagttaccctccaacttataacgtcaaggacatgttggttcccactgctgtgtggtctggaggacatgattggctcgctgatgtatatgatgtcaatatacttctcactcagattacaaatctcgtttttcacgaatcgattccagagtgggagcaccttgacttcatttggggtcttgacgctccttggagactctataacaagatcataaatcttatgcgtaaatatcagtag

SEQ ID NO: 2654 - DNA, 1206 bp, synthetic construct
  misc_feature 1..1206: note = source = /note="Description of Artificial Sequence: Synthetic coding sequence"
  source 1..1206: mol_type = other DNA
atggcatgcctggagttcgtgccctttgacgtgcagatgtgtcttgaatttctgccttcaggcgaattcgtcgttttgctcacatccggcgtacagctgcaaaccttcactgtatcagtgaccgaccttaaggggggcgcatctggcgttgtccggtcctctcggtgggtaagggggtttaccgattttcggtccaaggcagtggatctgtgtgggcctaaaccagtggtgttcttgcagcacgggttgctggcggattcctctaattgggtgacgaatttagccaacagctccttgggcttcatcttagctgatgctggatttgacgtctggatgggtaatagtagaggaaacacttggtcaaggaaacacaagactctctcagtcagccaggatgagttctgggcttttagggtgcccttcctggattattcatacgatgagatggctaaatacgatctgccagcttcaatcaacttcattctgaacaaaacaggccaagagcaggtgtactacgttggacatagtcagggaaccactatcggatttatcgccttcagtcagattcctgaactagcaaaacgcattaagatgtttttcgcccttgggccagtcgccagtgtcgccttttgtactagccccatggcaaagctcggccgtctgcccgaccatcttatcaaagatctgtttggcgacaaagagttcctgccccagagcgcttttttgaaatggttaggcacccacgtctgcacgcacgtcatcttgaaagaactgtgcggcaacctttgttttctgctgtgtgggtttaatgagcggaacctaaatatgagtcgtgtagacgtctacaccactcattcccctgctggcaccagcgttcagaacatgctgcactggtctcaggctgtaaaattccagaagttccaggcctttgactgggggtcatccgccaagaactatttccattacaaccaatcctacccccctacctataacgtgaaagatatgttggtaccaacagcggtatggtctggtggacatgactggttagccgatgtctacgacgttaacatcctgctcacgcagattacaaacttagtcttccacgagtcgatacctgagtgggaacacctcgatttcatttggggacttgatgccccctggcggctgtataataaaattataaatctgatgcgtaaatatcagtag

SEQ ID NO: 2655 - DNA, 873 bp, synthetic construct
  misc_feature 1..873: note = source = /note="Description of Artificial Sequence: Synthetic coding sequence"
  source 1..873: mol_type = other DNA
atgaaaatgaggttcctgggtctggtggtctgcctggtcctatggacgctgcactctgagggctccggtggcaaactaacagctgttgacccagaaacgaatatgaacgtctccgagattatctcttattggggatttccctctgaagagtaccttgtggaaacagaagatggctatattctgtgcctgaatcgaattccccatggccgcaagaatcatagcgacaagggaccaaagccagtcgtgttccttcagcacggtctcctggccgactccagcaactgggtgaccaatttggcaaactcaagccttgggtttatactggccgatgctggatttgacgtctggatggggaattcacgcggtaatacttggtcccggaagcacaaaactctctcagttagccaggacgagttctgggccttcagctacgacgagatggccaaatacgatttgcccgcctcgattaattttattctgaacaagactggccaggagcaggtatattatgtcggacattctcaaggtacgaccattggcttcatcgcattctcacagattccggagctggccaagagaatcaaaatgttcttcgccctgggcccagtcgcttcagtcgcattctgtacgagtccaatggcaaaactggggaggcttcctgaccatctgattaaggatctgtttggggataaagaatttctgccacagtctgcttttctcaaatggctgggcacacacgtgtgcacccacgtgatcttgaaggaactgtgcggcaatttgtgtttcctgttgtgtgggttcaatgagcgcaatctcaacatgagccgcgtcgacgtctatacaactcactcaccggccggcacctcggtgtag

SEQ ID NO: 2656 - DNA, 1200 bp, synthetic construct
  misc_feature 1..1200: note = source = /note="Description of Artificial Sequence: Synthetic coding sequence"
  source 1..1200: mol_type = other DNA
atgaagatgcgctttctgggacttgtggtgtgtttagtgttatggactctgcacagcgagggcagtggcggcaaactgaccgccgtggatcccgagacgaatatgaacgtttcagaaattatcagctattgggggttcccatccgaagagtacctagtcgagactgaagatggatatatcctttgtctgaatagaattccacacgggcgaaagaaccattctgacaagggcccaaagcccgtggtcttcctgcagcacggtcttctcgctgactcttccaactgggtgaccaacttggccaattcttcgctcggatttatcctggctgatgcgggcttcgatgtttggatgggcaattcccgcggtaacacttggtcaaggaaacacaaaaccttgagcgtgagtcaggatgaattttgggcattctcttacgacgaaatggctaagtatgacttgccagccagcatcaatttcatactcaacaagacagggcaagaacaggtgtattacgtgggtcattcccagggtacaacaattggctttatcgctttttcccagatccctgagcttgccaagagaatcaagatgttcttcgcgctgggccctgtggcctccgttgcattctgtactagcccaatggccaaactgggtaggttgcccgaccacctgattaaagacctcttcggcgataaggaattccttccgcagagcgcattcctgaaatggctgggtacccacgtgtgtacgcacgttattctcaaagaattgtgcggcaatctgtgctttctgctctgcggattcaatgagaggaacctaaacatgagcagagtggatgtatacactacccattcaccagctgggacttccgtccagaacatgctacattggagccaggctgtcaaatttcagaaatttcaagctttcgactggggctccagcgctaagaactattttcactataatcaaagttaccctccaacgtacaacgtgaaagacatgctcgtgcctacagctgtttggtcagggggacatgattggctggccgacgtatacgatgttaatattctgctgactcagataaccaatctggtgtttcacgagagcatcccggaatgggaacatttggattttatctggggccttgacgccccttggagactctataataaaatcatcaacctaatgcgtaagtatcaatag

SEQ ID NO: 2657 - DNA, 87 bp, synthetic construct
  misc_feature 1..87: note = source = /note="Description of Artificial Sequence: Synthetic coding sequence"
  source 1..87: mol_type = other DNA
ctgtgcttcctcttgtgcggttttaatgaaaggaaccttaatatggccgtgaagttccagaagttccaggccttcgactgggggtag

SEQ ID NO: 2658 - DNA, 1200 bp, synthetic construct
  misc_feature 1..1200: note = source = /note="Description of Artificial Sequence: Synthetic coding sequence"
  source 1..1200: mol_type = other DNA
atgaaaatgaggttcctcggcttggtggtgtgccttgtgctgtggaccctacactcagagggatcgggcgggaaattgactgctgtagatcccgaaaccaatatgaatgtttcggaaattattagttactggggcttcccgtccgaggagtatttggtggaaaccgaggacggctatattctttgccttaataggataccccacggcagaaaaaatcacagtgataaggggccaaagcccgtggtgttcctgcagcacgggttactggccgatagctcaaattgggtcaccaacttagcaaacagctccctgggatttattctcgcagacgccggttttgatgtgtggatgggaaactccagagggaatacatggtctcgcaagcataagactttgagtgtgtcccaagacgaattctgggccttttcttacgacgaaatggctaagtacgacctgcccgcctcaatcaacttcattttgaataaaacaggacaggagcaggtctactatgtgggacattcacagggcaccactataggtttcatcgccttttcacagatcccggagcttgccaaacggatcaagatgttctttgcccttggtcccgttgcatctgtggcgttttgcacatccccaatggcaaaactgggtagactgccagaccatctgattaaagacctgtttggtgataaggagtttctgccccagtccgccttcctgaaatggcttgggacacacgtgtgtacgcacgttatattgaaagagctgtgcggaaacctgtgctttttgttgtgcggtttcaacgaaaggaatctcaatatgtcacgtgttgacgtgtatactacgcactcacccgctggcacatccgtacaaaatatgttgcattggtcgcaggcagttaagttccagaaattccaagccttcgactgggggtctagtgcaaagaattactttcactacaatcagagctacccacctacttataacgtcaaagatatgcttgtgccaacagcggtttggagtggcgggcacgactggctggcagacgtgtatgacgttaacatactgctgacccagattacaaatctggtattccacgagtctatcccagaatgggaacatctggactttatctggggcctggatgccccatggagactgtataacaagataatcaatctaatgaggaagtaccaatag

SEQ ID NO: 2659 - DNA, 411 bp, synthetic construct
  misc_feature 1..411: note = source = /note="Description of Artificial Sequence: Synthetic coding sequence"
  source 1..411: mol_type = other DNA
atgaagatgagatttctcggcttggtcgtttgcctggtgttgtggaccttacatagcgaaggtagcggtggtaagctgaccgccgtggacccagagacaaatatgaatgtaagtgagatcatcagttattggggctttccatcggaggaatacctggtggagaccgaagatgggtatatcttgtgtctcaatcggatcccgcatgggaggaaaaaccatagcgataagggtcctaagccagtggtgtttttacagcatggactgcttgccgattccagcaattgggtaacaaacttggcgaattctagccttggattcattctcgcagacgccggattcgacgtatggatgggaaatagtcgcggcaatacctggagccgcaagcatgtaacactagagcctgggtgctag

SEQ ID NO: 2660 - DNA, 1428 bp, synthetic construct
  misc_feature 1..1428: note = source = /note="Description of Artificial Sequence: Synthetic coding sequence"
  source 1..1428: mol_type = other DNA
atggagtccaaagcactgctcgttctcaccctagcagtgtggctgcagagcctgactgcctcgcggggaggagttgctgcggccgaccagcgccgggactttatcgacatcgagtctaaattcgccctgcgcaccccagaggatactgccgaagacacctgtcatctaatcccaggggttgccgagagcgtagccacatgccatttcaaccactcttccaaaacattcatggtcatccacggttggacagtgactggtatgtacgagagctgggtgccaaagctcgtggcagctctgtacaagagagaaccggattctaacgtgatcgtcgtggattggctgagcagagcccaggaacactatccagtgtctgccgggtatacaaaactcgtcggccaggatgtggccaggttcattaactggatggaggaagaattcaattaccctttggacaacgttcatctgcttgggtactcactgggtgcacatgccgccggtatcgccggttctttgactaacaaaaaggtgaacaggatcactgggttagacccggcaggccctaactttgagtacgccgaagcaccaagccggctctccccagatgatgctgatttcgttgatgtcctacacactttcacacgcgggtcccccggccgttctatcggaattcagaagccagttggccatgttgatatctaccctaatgggggtacttttcagccaggctgtaacatcggggaggccattagagttatagcagagaggggcctcggagacgtcgaccagttggtgaagtgcagtcatgaacgctcgatccatctgttcatcgattccctgctgaatgaggagaacccgagcaaggcatatagatgttcctccaaagaggcctttgagaaggggctctgcttgtcctgtaggaagaaccgatgcaacaacttgggttacgagataaacaaggtacgtgctaagaggtcttctaaaatgtatctgaagacgcggagtcagatgccctacaaggtctttcattaccaagtcaaaatacatttctctgggactgaatcagagacgcatacgaaccaagcctttgaaatcagcttgtatggtactgtggctgagagtgagaatatcccgtttacccttccagaagtttcaaccaataaaacttatagctttctgatctacactgaggtagacattggagaactgctgatgttgaaattgaagtggaaaagcgacagctacttctcctggagcgactggtggtcctcgcccggcttcgccattcagaagatcagggttaaggccggggagacgcagaagaaagttattttctgttctagggagaaggtttctcaccttcaaaagggaaaagcccccgcagttttcgtgaaatgccatgataaaagcttgaacaaaaagtccggatag

SEQ ID NO: 2661 - DNA, 348 bp, synthetic construct
  misc_feature 1..348: note = source = /note="Description of Artificial Sequence: Synthetic coding sequence"
  source 1..348: mol_type = other DNA
atggtcattcatgggtggactgtgacaggtatgtatgaatcttgggtccccaaattagtcgcggctctttataagcgggagcctgatagcaacgtgatagttgtcgactggttgagtcgagcccaggagcactatcctgtgagcgcaggatataccaaattggtcggccaagacgtcgcgagatttatcaactggatggaagaggaatttaactatccccttgataacgtgcacctcctggggtactccttgggcgctcatgctgccggcatcgctggcagcttaaccaataagaaggtcaaccggattactggcctggatcccgccggcccaaacttcgagtactag

SEQ ID NO: 2662 - DNA, 321 bp, synthetic construct
  misc_feature 1..321: note = source = /note="Description of Artificial Sequence: Synthetic coding sequence"
  source 1..321: mol_type = other DNA
atggaatctaaggcactactggtgctaactctcgcagtgtggctgcagagtctgaccgcctcacgagggggagttgccgccgctgaccagcggagggacttcattgacatcgaatctaaatttgcattgagaactccggaagatacagctgaggatacatgccacttaattccgggtgttgccgagtccgtcgccacttgccacttcaaccattcctccaaaaccttcatggtgatccatggatggacagttacggggatgtacgagtcttgggtgcctaaactggtcgctgccttgtacaagagagagcccgacagctag

SEQ ID NO: 2663 - DNA, 393 bp, synthetic construct
  misc_feature 1..393: note = source = /note="Description of Artificial Sequence: Synthetic coding sequence"
  source 1..393: mol_type = other DNA
atggagagcaaagccttgttagtgctcacactggcggtttggctccagagcctgacggcctcaagagggggcgttgcagccgccgatcagaggcgcgatttcatcgacattgaatctaaatttgcactccgaacgcccgaggatacggccgaggacacatgtcacttgattcccggcgtcgctgagagcgtggctacttgtcactttaatcatagcagtaaaactttcatggtgattcatgggtggaccgtgaccggcatgtatgagtcatgggtacctaaactggtggcggcactgtacaaacgggagccagattctaacgtcatcgtcgtcgattggttgtcccgtgcacaggaacactacccagtgagtgcaggatacaccaagctgtag

SEQ ID NO: 2664 - DNA, 1386 bp, synthetic construct
  misc_feature 1..1386: note = source = /note="Description of Artificial Sequence: Synthetic coding sequence"
  source 1..1386: mol_type = other DNA
atggagtcaaaagctctgcttgtgctgactctggctgcagcagatcagcgcagagactttattgatattgagtccaagttcgctcttcgtactcccgaagacactgccgaagacacctgccacctgatcccgggcgtcgccgagtctgtggccacctgccatttcaatcactcatcaaaaaccttcatggtaatccacggctggacggtcaccgggatgtatgagtcctgggtgcccaaactggtggccgcattgtataagagagagccagatagcaatgtcatagtggtggactggctttcgcgtgctcaggagcactatccggtttccgctgggtacacaaaactcgtcggccaggatgtcgcacggtttatcaattggatggaagaagaatttaattacccactggacaatgtccatctcctagggtattcgctcggagcccacgctgcaggtatcgctggctcactgacgaacaaaaaggtgaaccgcatcaccgggctcgacccggcgggtccaaactttgaatatgccgaggctcccagtaggcttagtccagacgacgccgatttcgtggacgtcctgcataccttcacaaggggcagtccggggaggtcgattggcattcagaagcccgtgggccacgtggacatatatccaaatggtgggacctttcagcccggatgcaatatcggagaggcgattagggtcatcgccgaacggggtcttggcgacgttgatcagctagttaaatgcagtcacgagcgcagtattcatttatttatagattctctcctcaacgaagagaatccctcgaaggcctatcggtgtagctctaaggaagcttttgagaagggactgtgccttagttgcaggaagaaccgatgcaataatctgggctatgaaatcaataaggtgcgagcaaagagaagctcaaaaatgtacctgaagacccgcagccagatgccatacaaagttttccactaccaagtgaagattcatttctctggcacggagagcgagacacacactaaccaggccttcgagatatcgttatatggcacagtcgcagaatctgagaatatcccatttacgcttcccgaagtatctacaaacaagacatactcattcctgatatacaccgaagtggacattggagagctactgatgttgaaattgaagtggaagagtgactcctatttctcttggagcgattggtggtcgtctcccggcttcgctatccagaaaatacgcgtaaaggcaggtgaaacccagaaaaaggtcattttctgctcaagagaaaaggtcagccacctacagaagggcaaggcccctgcagttttcgtgaagtgtcatgataagtctcttaacaagaagtcggggtag

SEQ ID NO: 2665 - DNA, 828 bp, synthetic construct
  misc_feature 1..828: note = source = /note="Description of Artificial Sequence: Synthetic coding sequence"
  source 1..828: mol_type = other DNA
atggtgatccacgggtggactgtcacaggcatgtacgaaagctgggtgccgaagctggttgctgcattgtataaaagagagcccgattctaatgtgatcgtggttgattggctcagtagagcccaggaacactatcctgtatccgctggatacacgaagctggtcgggcaagatgtagcacgatttatcaactggatggaagaggaattcaattatccacttgataatgttcacttactgggatactctctgggcgcacacgcagcaggtatcgctggtagcctcaccaataagaaagttaaccgaattacaggattggatcctgcagggcccaattttgagtacgccgaggctcctagcaggctctctccagatgacgctgactttgtcgatgttctgcacactttcacccgcggttcgcccggcagatccataggcatccaaaagccagtgggtcacgttgacatttaccctaacggcgggacatttcaacctgggtgcaacataggcgaggcgatcagagtcattgctgagaggggactgggtgacgtcgatcagctcgttaagtgctcacacgagaggtccatccatctgtttatcgattcgcttctcaacgaagagaatcccagcaaggcgtacagatgcagctcaaaagaggcatttgaaaaagggctatgcctgagctgtcgaaagaaccggtgtaataatttgggctacgaaatcaataaagtgagggctaagaggagctccaagatgtatgaggacagtttttccgatgccctacagtccctgccgcttcccagcaaagacagcttcttctgggattag

SEQ ID NO: 2666 - DNA, 2079 bp, synthetic construct
  misc_feature 1..2079: note = source = /note="Description of Artificial Sequence: Synthetic coding sequence"
  source 1..2079: mol_type = other DNA
atggggccatggggctggaagctgcgatggaccgtagccttgctactggctgcggccggcaccgccgtgggcgatcgctgtgagcgcaatgaattccagtgtcaggacggtaaatgcattagctacaaatgggtatgcgacgggagtgccgagtgtcaagatggatcagatgaaagccaggagacgtgcctgagcgtgacgtgtaaatcaggcgacttctcttgcggcggcagagttaatcgctgtatcccacagttttggcggtgcgacggtcaggtggattgcgataacggatccgatgagcagggctgtctgactttatgcgaaggacctaacaaatttaaatgtcattccggcgagtgcattaccctagacaaggtgtgtaatatggccagagattgcagggattggtctgacgaaccaataaaggagtgtggcaccaacgaatgtctggacaataatgggggttgttcacacgtgtgcaatgatctgaaaataggatacgagtgcctctgcccggatggcttccagctcgtggcacagaggagatgtgaggatatagatgagtgtcaggacccggatacctgttcccagctttgtgtcaacctggagggagggtacaagtgccagtgcgaggaggggtttcagctggacccccacacaaaagcgtgcaaagctgttggcagcatagcataccttttctttacaaacaggcacgaggtgagaaagatgacattagaccgcagcgaatacacctcacttatacccaatctaaggaacgtcgtcgccctggacacagaggtggctagtaacagaatttattggtcggatctgtctcaacgcatgatctgttcgacacagctggaccgcgctcatggcgttagctcatacgatactgtgatctcgcgggacattcaggcacctgatggcctcgccgtagactggatccatagtaatatttactggactgattctgtgttaggcaccgtttctgtggctgacaccaagggcgtcaagaggaagactctgtttagggagaatgggagcaaacccagagctattgtggtagatcccgttcatggattcatgtattggactgattgggggacgcccgcaaaaatcaagaagggcggactgaatggagtggatatttacagcctggtgactgagaatatccaatggccaaacggaatcaccctggaccttttgtccgggcgactttactgggtagacagtaaactccacagcatctcttctatcgatgtaaacggagggaatcgtaaaacgattctggaagacgagaagcgattggctcaccccttttcactggcagtcttcgaggacaaggtgttttggacggacatcatcaatgaggctattttcagcgccaatcgccttaccggttccgatgtaaatcttctagccgagaatcttttgtcaccagaagatatggtgctcttccataatttaactcagccaaggggcgtgaactggtgtgagaggaccaccctgtcaaacggcggatgccagtacctgtgcctcccagcccctcagatcaaccctcatagccccaagtttacttgtgcctgtcccgacggaatgctcttagctcgggacatgaggagttgcttgaccgaggcggaggcagccgttgccacccaggaaacttcgaccgtacgtcttaaagtcagttctaccgccgtccggacacagcacacaaccacccggcccgtacccgatactagtcggttgcccggggctacgcctggacttactaccgtggagattgtgaccatgtctcaccaggcgctgggcgacgtggccgggcggggaaatgaaaagaaaccatccagtgtcagggcactgtctatcgtgttaccaatagtgctgttggttttcttgtgtttgggagtgttcttgctttggaagaattggagactcaagaatataaattctataaatttcgataaccccgtctatcagaaaaccaccgaagacgaggtgcatatttgccacaaccaagacggctatagctacccaagccgccagatggtaagcctggaagacgatgtagcttag

SEQ ID NO: 2667 - DNA, 2460 bp, synthetic construct
  misc_feature 1..2460: note = source = /note="Description of Artificial Sequence: Synthetic coding sequence"
  source 1..2460: mol_type = other DNA
atggggccctggggttggaagctgcgttggactgtggctttgctgctagctgctgccggaacagccgttggggatcggtgcgagcgcaacgaattccagtgtcaggacgggaaatgtatcagctacaaatgggtctgtgatggctccgctgagtgtcaggatggcagtgatgagtcacaagaaacctgctcaccgaagacgtgttctcaggatgaattcaggtgccacgacggcaagtgtatctcccgccagttcgtgtgcgatagtgaccgggactgcctagacggatccgacgaggcatcctgtccagtccttacttgcggcccagcgtcattccagtgtaactctagcacctgcattcctcagctgtgggcatgtgataatgaccccgactgcgaggatggttctgacgagtggcctcagcggtgcagaggactctatgtgttccagggagattcctctccgtgctctgcctttgaattccactgcctgagtggggaatgtatccactcttcatggcgttgtgacggaggacctgattgcaaggataagtcggacgaggaaaattgtgcggtggctacctgtcgcccagacgagtttcagtgcagtgatggcaactgtatccacgggagcagacagtgtgacagggaatacgattgtaaggacatgtctgatgaggtggggtgcgtcaatgtgaccctgtgtgagggtcccaataaatttaaatgccacagtggtgagtgcatcacgctggacaaggtgtgcaatatggccagggattgtcgggattggtccgatgagccgattaaggaatgtggaaccaatgagtgtctcgataacaacggaggatgcagccatgtgtgcaacgacctgaaaattggatatgaatgcctgtgtcccgacggatttcagctggtagcccagcggaggtgcgaggatattgacgagtgtcaggatccagatacctgcagccagctttgtgtgaatcttgagggcggttataagtgccagtgtgaagaagggttccagcttgacccacacacaaaagcttgcaaggcggttggcagcatcgcgtatctgtttttcacaaacaggcatgaggtgcggaaaatgactctggataggagtgaatacactagccttattcccaacctcagaaacgtggtagcactggataccgaggtggcgtctaaccgaatttactggagcgacttgagccagcggatgatctgcagtactcagcttgatagggcccatggtgttagctcttacgacacagtgatatccagggatatccaagctccagatggcctggcagtggactggattcactctaacatctactggacagatagcgtgctcggaacggtctcagtggctgacaccaaaggtgttaagcgcaagaccctatttagggaaaacggaagcaaaccaagggccatagtcgtggatcccgtccacgggttcatgtactggaccgactggggaactcctgccaaaatcaagaagggcgggctcaacggggttgatatttattctctcgttacagagaatatacaatggcccaatggaatcacccttgacctcctttctgggcgactgtactgggtggactccaagctccacagtatttcgtccatagacgttaatggggggaatcgaaaaacgatcctggaggacgagaagcgactggctcacccgttcagcctagccgtgtttgaggacaaggtgttttggacagacataattaacgaggcaatcttcagtgctaatcgcttaaccggatcagatgtaaatctgctcgccgagaacctcttgtcccctgaggacatggtactcttccacaatctgacgcaaccacgcggtgtgaactggtgcgaacgcaccacgttgagcaatggggggtgccagtacctgtgtctccccgccccccagattaacccgcattccccgaaatttacttgcgcctgcccagacggaatgcttcttgcccgggacatgcgctcttgcctcaccgaagccgaggctgccgtcgctactcaagagacctcgactgtgcgtctcaaggtgtcgtcaaccgccgtccgaactcagcacactacgacccgccctgttcccgataccagtcgtctgccaggggctacgcctgggctgactacggtggagattgtgacaatgagccatcaggctctaggagatgttgccggcaggggaaacgaaaagaagccatcatcagttcgcgcactttcaatcgtattgccaatagtcttgctggtgtttctttgcctcggagtgttcttgctctggaagaattggagattaaagaacataaacagcattaattttgataatccagtctatcagaagacaaccgaggatgaggtgcatatatgccataatcaggacggctattcatacccatcacgtcagatggtgagcctcgaggatgacgtggcgtag

SEQ ID NO: 2668 - DNA, 2049 bp, synthetic construct
  misc_feature 1..2049: note = source = /note="Description of Artificial Sequence: Synthetic coding sequence"
  source 1..2049: mol_type = other DNA
atgggaccgtggggatggaagcttcggtggactgtcgctctactgctggccgccgctggcactgccgtcggtgatagatgtgagaggaatgaattccaatgtcaggatggtaagtgcattagttataagtgggtctgtgatggcagtgcggagtgtcaggatggctctgacgagagccaggaaacttgtctcagcgttacctgcaagagcggcgacttctcgtgcggcggtcgagttaaccgctgcatcccccagttctggcgttgcgatggacaggtcgattgtgacaacgggagcgatgagcagggctgccctgtggcgacgtgtcgacctgacgaattccaatgcagcgacggaaactgtatccatggaagcaggcagtgcgatcgcgagtacgactgtaaagacatgagtgacgaagtgggctgcgtcaacgtgacactttgtgaaggcccaaacaagttcaaatgccactctggcgagtgtataactttggataaagtctgtaacatggcccgcgactgcagagattggtctgatgagcctattaaagaatgcgggaccaacgagtgcttggataataatgggggatgtagccatgtgtgcaatgacttgaaaatcggttacgagtgtctctgccctgacgggttccagctggtggcacaacgacggtgcgaagatatcgatgagtgtcaggacccagacacatgtagccagctttgtgtcaatctggaaggtggttacaagtgtcagtgcgaagagggctttcaactcgaccctcacaccaaggcttgcaaggctgtcggctcaatcgcctaccttttttttactaatcggcacgaggttcgtaagatgactttggaccgctctgaatacacgagcctgatccctaatttaagaaatgtggttgcactggatacagaggttgcttcaaacaggatatactggtcagatctgagccagaggatgatctgctcaactcagcttgatagagcccacggagtctcatcttacgatacagtaattagcagagacatccaagcccctgatggcctcgccgtggactggatccactcaaatatatactggaccgactctgtgctggggaccgtgagcgtggcagacacgaaaggtgtgaaacgtaagacgctctttagggagaatgggtcgaagccccgcgcaattgtcgtggaccccgtccatggtttcatgtactggaccgattggggaacacccgcaaaaataaagaaggggggccttaacggggtagatatttatagcctcgttacagagaacattcagtggccaaatgggattaccctcgatttacttagcggccgcctctactgggtggacagcaaactccacagcatttcgtccatcgacgtgaacgggggcaaccgcaagacaatactcgaggatgaaaagagactggcccatccattctccctggccgtgtttgaagataaggtgttctggactgacattatcaacgaggcgattttcagtgcaaacaggctgaccggatccgatgtgaacctgctggctgagaatttgctatctccagaggatatggtgctgtttcacaacctgacccagccaagagaggctgaggccgcagttgccacacaggaaacctctaccgttaggctgaaagtcagctccactgcagtgagaacacagcacacaacgacaagaccagtacccgatacatcacgcctgcccggggctacacctggactcaccactgtcgaaatcgtgaccatgtctcaccaggcgttaggtgacgtagctgggagaggcaacgaaaagaagccaagttctgtgcgcgctctgtccatcgtactccctattgtcctgttggtgtttttgtgtcttggcgtgtttttgttgtggaagaactggcgacttaaaaatattaattccataaactttgacaaccccgtgtatcagaagaccactgaggatgaagtgcatatctgtcataatcaagacggctacagttaccccagcaggcaaatggtgtctctggaggatgacgtagcatag

SEQ ID NO: 2669 - DNA, 2577 bp, synthetic construct
  misc_feature 1..2577: note = source = /note="Description of Artificial Sequence: Synthetic coding sequence"
  source 1..2577: mol_type = other DNA
atgggcccctgggggtggaagctgcggtggaccgtggcattgctgctggctgccgcggggactgccgtgggagatagatgcgaaagaaatgaatttcaatgccaggatggaaagtgtattagctataagtgggtctgtgacggctctgccgaatgtcaggacgggagtgatgagagtcaggagacatgcctgtcagtcacctgcaaaagtggtgacttctcatgcggtggcagggtgaaccgatgtattccacagttctggcggtgcgatggtcaagtggactgcgataacgggtctgacgaacagggctgtccgccgaagacatgtagccaagatgagttcagatgtcatgacgggaagtgcatttcaaggcagttcgtgtgtgattctgatcgggattgtctagacggaagtgacgaagcctcatgcccagtcctgacatgcggccctgcttcctttcagtgcaatagctcaacctgcatacctcagctgtgggcttgcgacaatgatcccgattgtgaggatggaagtgatgaatggccccagcgctgtaggggcctgtatgtgtttcagggcgatagttccccctgctctgccttcgaattccattgcttatcaggggaatgcattcatagcagctggagatgtgacggcggtccagattgcaaagataaatccgatgaagagaactgtgccgtggcaacttgcaggcctgacgagttccagtgctcagacgggaattgtattcacgggtcccgccagtgcgatcgggagtacgattgcaaggacatgtcagacgaagtcggttgtgttaatgtgaccctctgtgaaggaccgaataaatttaagtgccattctggtgagtgtataaccctcgacaaagtctgcaatatggcccgggactgtcgggactggagcgacgagccaatcaaggagtgcggaacaaacgagtgcctcgataacaacggaggctgctcccacgtgtgcaatgacctgaagatagggtacgaatgcttatgcccggacgggttccagctcgtggctcaacgccggtgtgaagatatcgacgaatgccaggatcccgatacatgtagccagctgtgtgtgaaccttgagggcggttataagtgtcagtgtgaagagggattccagttagatccccatactaaggcgtgcaaggctgtaggaagcatcgcgtacctctttttcaccaaccgtcacgaggttaggaagatgacactggatcgaagcgagtatacctctctgatccctaacctgaggaatgttgtcgctctagacactgaggtggcttcgaaccgaatctattggtccgacctctcccaacgcatgatctgttctacccagctggacagagcacatggtgtctcgtcatacgacacggtgatttcgagagatatccaggctcctgatggactggccgtagattggatccactccaacatctattggacggactccgtgctgggaactgtctcagtggcagacactaagggagtcaagcgcaagactcttttcagagagaatggttctaaaccccgggccatcgtggttgaccccgtgcacggtttcatgtactggactgattggggcacacctgccaagataaaaaaaggcggccttaacggggttgacatttatagccttgtgacggaaaacattcaatggcccaacgggatcacactcgaccttctgtccggtcggctgtattgggttgatagtaaacttcactccattagcagcatcgacgttaatgggggaaacagaaagaccatactggaagatgagaagcggctcgctcacccattcagcctggcagtattcgaggacaaagtgttctggaccgatataataaatgaggccatcttctctgccaatcgccttaccgggtcagatgtgaatttgctggcggaaaacctactcagccccgaggacatggttctgttccacaacctgactcagcctaggggcgtgaactggtgcgaaagaaccacactcagcaatggggggtgccagtacttatgtcttcccgcaccgcagataaacccccatagcccaaagttcacctgtgcctgcccggatgggatgctactggctcgagacatgagaagttgtctcacggaagccgaggccgccgttgccactcaggaaacttctacagtccgactgaaagtgtcgtctacagcagtgcgtactcagcatactaccacaaggcctgtgcctgatacatctcggctccctggggctacccccggtctgacaactgtggaaattgtgactatgtcacatcaggctctcggtgatgttgccgggagaggcaatgaaaagaagcctagcagtgtgcgggcgttatccattgtactcccgattgtcctgttggttttcctctgtctgggagtgttcctgctgtggaaaaactggaggctcaagaacattaatagcatcaactttgacaaccccgtttaccagaaaaccacagaggacgaagtacacatctgtcacaaccaggatggctattcttatccctcaatggtgtccttggaggacgatgtggcgtag

SEQ ID NO: 2670 - DNA, 2583 bp, synthetic construct
  misc_feature 1..2583: note = source = /note="Description of Artificial Sequence: Synthetic coding sequence"
  source 1..2583: mol_type = other DNA
atgggtccttggggctggaagctcaggtggaccgtggcgcttctgctcgcagccgctgggacagcggttggagatcgatgtgagcgtaacgagtttcagtgtcaagacggtaaatgtatctcatacaaatgggtttgtgacggatcagccgaatgccaggacgggagcgatgaatcgcaggaaacatgtttgtccgtgacttgtaagtctggcgatttttcctgcggaggaagagtgaaccgctgtatcccccaattttggaggtgtgatgggcaggtggactgtgataatggatctgatgagcagggatgcccaccaaagacttgcagccaggatgaattccgctgtcacgatggcaagtgtatctccaggcagttcgtgtgcgattccgatagggattgcctcgatggctctgatgaagcatcttgtcctgtcctaacttgcggaccagcttcatttcaatgcaactcttcaacgtgtatccctcagctgtgggcctgcgacaatgacccagattgtgaggatggctctgacgagtggccccagcggtgcaggggtctgtatgtttttcagggcgatagcagcccatgttccgcgtttgagtttcactgccttagtggggagtgcattcattcctcctggcgctgcgatggggggcccgattgcaaggacaaatccgatgaagagaattgtgccgttgccacctgtagacccgatgaatttcaatgctcggatgggaattgcatccatgggtcacgccagtgtgacagggagtacgactgtaaagatatgtcagacgaagtgggatgtgtgaacgtgactttgtgcgagggtccaaacaaattcaaatgccactccggagagtgtataactctcgacaaagtctgcaatatggccagagactgccgggattggtctgacgagcctattaaagagtgtggcactaacgagtgtctcgataacaatggggggtgttcccatgtttgtaacgacctcaagataggctacgaatgcctttgtcccgacggatttcagctggttgcacagaggcgatgcgaagacatcgatgagtgtcaggaccctgatacatgtagtcagctgtgtgtcaacctcgaaggtggatataagtgtcagtgcgaggaaggcttccagctggatcctcacactaaggcttgtaaggccgttggcagtatcgcctacctattcttcacaaaccgacatgaggttagaaagatgactcttgatagatccgaatatacctctctgattcccaacttgaggaacgttgtcgccctggatacggaggtggccagtaataggatatactggtcagacctgtcacagcgcatgatctgcagtacccaactggaccgggcccacggtgtctcctcttatgatacagttatctcccgtgacatacaggcccccgatggcctggcggtcgactggattcatagtaacatctactggactgacagcgttttaggcacagtgtccgtagcagatacaaagggtgtgaaaaggaagacactcttcagagagaacgggagcaaaccacgagctattgttgtcgaccccgtgcacgggtttatgtactggactgattggggaactcctgctaagatcaagaaaggaggacttaatggtgttgacatctatagtcttgtgactgagaacatccagtggccaaatgggatcacactcgaccttctctctggccggctgtactgggtggacagtaaactacacagcatcagcagcatagacgtgaacgggggcaatcgcaaaaccatcctcgaggatgaaaaaagactggcccacccttttagtcttgctgtttttgaagataaggtgttttggactgatataatcaatgaggcgatattttccgctaatcggcttacggggtctgatgttaacctgttagctgaaaatttactcagtccagaagacatggttctctttcacaacctgactcaacctaggggggtcaactggtgcgaaaggaccaccctctctaatggcggatgtcagtatctctgtctgcctgcgccccagattaatccccatagtccgaagttcacatgtgcgtgtcctgatggaatgctccttgcccgggacatgcgttcatgcctgacagaagctgaggccgctgtggcaacccaagagacttctactgtccggctcaaagtcagctcaacggccgttcgcacccagcacacaaccactagacccgtgcccgacactagtcggttaccgggcgctaccccggggctgactacggtcgaaatagtaacaatgagccatcaggcactgggcgacgtcgcaggaagaggcaacgaaaaaaagccctctagcgtcagggccctgtcaatcgtgctgcccatcgtgctgctcgtgtttctgtgcctcggcgtttttttattgtggaagaactggcggttgaaaaacattaattctatcaacttcgacaaccccgtgtatcagaagacaacagaggatgaggtgcacatttgtcacaatcaggacgggtatagttacccaagtcggcagatggtgtccttggaagatgacgttgcttag

SEQ ID NO: 2671 - DNA, 2220 bp, synthetic construct
  misc_feature 1..2220: note = source = /note="Description of Artificial Sequence: Synthetic coding sequence"
  source 1..2220: mol_type = other DNA
atgggcccttggggctggaaactgcggtggactgtagctctgctgctcgctgccgccggtactgcagtgggagacaggtgtgagcggaacgatttccaatgcaactcctccacatgcatcccacagctctgggcctgtgacaacgaccccgattgcgaagacggtagcgacgaatggccccagcggtgtagggggctgtacgtgtttcaaggtgatagttcaccgtgttccgcctttgaattccactgcctctctggagagtgcattcattcttcttggaggtgcgatggcggccctgattgtaaggataaaagcgatgaagaaaactgtgccgttgctacatgcaggcccgatgaattccaatgcagcgatggcaactgtattcacggctcaaggcagtgcgaccgggagtatgactgcaaggacatgtcagacgaggttgggtgcgtgaacgtaacactttgcgaaggcccgaacaagttcaagtgccactcaggggagtgtattactctggataaggtgtgtaacatggctcgagattgccgggattggtcagacgagcccatcaaggagtgcgggacaaacgaatgcctagacaacaatgggggttgttcccacgtgtgtaacgatttaaagattggctacgagtgcctctgccccgatgggtttcaactcgtcgcacagcgccggtgcgaggacattgatgaatgtcaggacccggacacatgctcacagttatgtgtaaatctggaagggggctacaagtgccagtgtgaggagggcttccagttggaccctcacacaaaggcctgcaaagcggtcgggtccatcgcttatttgtttttcacaaaccgacacgaagtacgaaaaatgaccctcgacagatcggagtacacgagcttgatacctaacctcaggaacgtggtagcactggatacagaagtcgcttccaataggatttattggagcgacctatctcagaggatgatatgctcaacccagttggatcgtgcccacggagtgagttcttatgatacagtgatctcacgggatatccaggcccctgatggcctggccgtcgattggatccacagcaatatttactggacagactcggttctcggaaccgtttcagtggccgacaccaaaggcgtaaaaaggaagacactgttccgtgagaatggctctaaaccaagagcgattgtggtggaccccgtacatggatttatgtactggaccgactggggcactcccgctaaaatcaaaaaggggggactgaacggagtagatatatacagcctggtgacagagaacattcagtggcctaacggcattactctagacctgctgagcggacgactttactgggtggatagcaagcttcactccatcagctctattgatgtaaacgggggcaacagaaagacaattctggaggacgagaaacgactggcccatccttttagcctcgccgtattcgaggacaaggtgttctggaccgatatcataaacgaagcaatcttttctgccaacaggctgacaggctccgatgtcaatctgctggccgagaacctgttgtccccagaagacatggtgttgtttcacaatttaactcagccccggggagtgaattggtgcgaaagaaccacgctgagcaatggggggtgccagtacctctgcctccctgccccacagatcaacccccactctccgaaattcacttgcgcttgcccagacggaatgttgctggcccgggatatgcgtagttgtctcaccgaagcagaggcggccgtcgctacccaggaaacatccacagtgcggctgaaggtgtcgtctaccgccgtgaggacccagcatactacaacacgacctgtccctgatacttctagactcccaggggccactcccgggctaaccacagtcgaaatcgtgacaatgtcacatcaggccctcggagacgtggccggccggggtaatgagaagaaaccatcttccgttcgggctttgtccatcgtcctccctatcgtcttactggtttttctgtgtctgggggtgtttttactatggaagaactggaggctgaagaacataaactctattaactttgataacccggtgtaccagaagactaccgaggacgaagttcatatctgccacaatcaggacggctacagctacccctctcggcagatggttagcttagaagatgatgtagcctag

SEQ ID NO: 2672 - DNA, 2838 bp, synthetic construct
  misc_feature 1..2838: note = source = /note="Description of Artificial Sequence: Synthetic coding sequence"
  source 1..2838: mol_type = other DNA
tagggcaggccaggcgttcccccgcgcttcctgtcccagcgtaggcgacaagtccctgggccccgtagcagattacgagacatccacgaatctcctagcgtgatcctgggacctccaggtgaggtgccaggctttagatgtgctctctggcgccatctcagaccccatttagtacttgggggcgcgctggctcccccagcccccattaaattcaccgagggtcctcctgctaccttaaaggcttccgtcccctacgaagtggaaacactgccccaaaacctgcccgcgcctccatggtctgctgccgagattttctcacacgtgggcgaccgatgtgagcgtaatgagttccaatgtcaagatgggaaatgtatttcttacaagtgggtgtgtgatggtagcgccgagtgccaagatggatcagacgaatctcaagagacttgtctgtcagtaacatgtaaatccggggacttctcttgcggaggacgcgtaaaccgttgcattccacaattttggcggtgtgatggtcaggtagattgtgacaacggatctgatgaacagggctgcccaccaaaaacttgttcccaagacgaattcagatgccatgacggcaagtgcatcagtagacagttcgtgtgcgattcggatagagattgcctagacggcagtgacgaagcctcatgcccagtgctgacttgtgggcctgcctcctttcaatgcaactcctccacctgcattccccagctctgggcctgtgacaatgatccagactgcgaggacggcagcgacgagtggccccaacggtgtaggggcctgtatgtctttcaaggcgattcctctccatgctcagcctttgagtttcactgcctgagtggagaatgtatacacagctcgtggagatgtgacggtggtccagactgtaaggataaatctgatgaggaaaattgcgcagtggctacgtgtcggccagacgagtttcagtgcagcgatggtaactgtatacacggctcacgccagtgcgacagggaatacgattgtaaggatatgtccgacgaagtgggctgcgtcaatgttacgctgtgcgagggaccgaacaaatttaagtgccatagcggtgaatgcattacacttgacaaagtgtgtaacatggcccgcgactgccgggactggagcgatgagcccattaaagaatgcgggacgaacgagtgtctagacaataacggaggatgttctcatgtctgtaacgatctgaagatcgggtatgagtgtctttgccctgacggctttcaattggttgctcagaggcgctgtgaggatatcgacgagtgccaagatcctgatacatgttcacagttatgcgtcaacctcgagggggggtataagtgtcagtgcgaggaagggtttcagttggacccacacaccaaggcctgcaaggccgtggggtcgattgcctacctgttttttaccaaccgtcatgaggttcgcaagatgacattggataggtcagaatatacgagcctcatcccaaacctacgtaatgtcgtagctctggacacggaggttgcctccaatagaatctactggtcagatctttcacaaagaatgatatgttcaacacagttggaccgcgcccatggcgtgtctagctacgacacggtaatttcccgagacattcaggctcctgatggccttgccgttgactggatccattcaaatatctattggactgacagtgtgctgggaacggtttctgtagctgatactaagggagtgaagaggaagacactcttcagggaaaacggatctaagccccgtgcaatagttgtggatccagtgcatgggttcatgtactggactgactggggcacccccgcaaaaatcaagaaaggaggcctcaatggcgttgacatatactcactggtgacggagaatatccaatggcccaacggaattactctggatctgctaagtggtcgcctgtattgggtggactcgaagctgcacagcatttcctccattgatgtgaacgggggaaatcgaaaaacaatcctagaagacgagaagcgactcgcccatccatttagcttggcagttttcgaggacaaggtcttctggaccgatataattaacgaggcgatcttcagtgccaataggctgaccggctctgacgttaatctcttggccgagaatctgcttagcccagaggacatggtgttgtttcacaacctgacccagccccgaggcgtcaattggtgcgaacgaactacactgtccaacggcggatgtcagtatttatgtttgcccgccccacagatcaatccccatagtcccaaattcacttgtgcctgtccagacgggatgttgcttgctcgagatatgcgttcctgtctgacggaagctgaagccgcagtggcaacccaagaaacctcaactgtgaggcttaaggtctccagcaccgccgtgcgtacccagcacacaaccaccagacccgtgcccgatacctccaggctcccgggcgcaacacctggcttaaccaccgtagaaatcgtgacaatgtctcaccaggctttgggcgatgttgccgggcgggggaatgagaagaaaccctcatcagttagagcactctctatagttcttcctatcgtgctactcgtgtttctctgcctcggcgtgtttctcctatggaagaactggagattaaagaatataaacagcatcaattttgataatcccgtgtatcagaagacaaccgaggacgaagtgcacatctgtcacaaccaagacggctattcctatccatctagacaaatggtgagtctcgaggacgacgtggcgtag

SEQ ID NO: 2673 - DNA, 1770 bp, synthetic construct
  misc_feature 1..1770: note = source = /note="Description of Artificial Sequence: Synthetic coding sequence"
  source 1..1770: mol_type = other DNA
atgtcccgccgcctgctccctagagccgagaagcggcgtaggaggctcgagcagcggcagcagccagatgaacagcgccggagatcaggagcaatggtcaaaatggcggccgccggaggtgggggcggtgggggccggtactacgggggcggcagtgaggggggaagggctccaaagagactaaaaaccgacaacgctggagatcagcacggagggggtggcggggggggaggaggcgccggggctgccggtggcggcggagggggggagaattacgatgatccacacaagacccccgcctctcccgtggttcacatcagaggtctgatcgacggcgttgtggaggctgacctggtagaagccctccaggagtttgggcctattagttacgtcgttgtgatgccaaagaagagacaggccctggtcgagttcgaggacgtcttaggagcatgcaacgccgtgaattacgcagcagataatcaaatttacattgctggtcatccagctttcgtcaattactcgaccagtcagaaaatctctagaccaggcgatagcgacgattcaaggagcgtcaacagcgttctgctgttcaccatcctgaatccaatctatagcataactaccgatgtgctctacacaatttgtaatccatgcgggccggtgcagagaattgtcatatttcggaaaaacggagtccaggccatggtagaattcgattctgtccagagtgctcagcgcgccaaggcttcattaaacggagctgatatctactcaggatgctgtacacttaaaatagagtacgcaaagcctactcggctgaatgtatttaaaaacgatcaggatacctgggactatactaatccaaacctttcgggccaaggcgatcctggttcaaatccaaacaagaggcagagacaacccccactcctgggggaccatccagccgagtatggaggccctcacggcgggtaccacagtcactaccacgacgagggttatggccctcccccgccacactacgagggaagacggatgggacctccagtggggggccaccgacgcggcccaagcagatacgggccacaatatggccaccctcccccccctccacctcccccagagtacggaccgcatgcagactcccccgtgctgatggtatacggcctggaccaatcaaaaatgaactgcgacagagtatttaatgtgttctgtttgtatggaaacgtcgagaaggtcaagttcatgaaatcaaaaccgggggcggcaatggtcgaaatggccgacggctatgccgtggatcgcgccattacacatttgaacaataattttatgtttgggcagaaactgaacgtctgtgtgagcaaacagcctgccatcatgcccggacagtcatacgggttagaagacggatcatgtagctacaaggacttctccgagagcagaaataatagattcagtacaccagaacaggctgctaagaacagaatccagcatccctcaaacgtgctgcatttctttaatgctccactagaggtgaccgaagaaaacttctttgaaatatgtgacgaattaggggtcaaaagaccttcttccgtcaaggttttttcaggaaagtctgagcggtcttcttcaggcttactggagtgggagtctaagtctgacgcccttgaaacgttgggatttcttaaccactaccagatgaagaatccaaacgggccatacccctatacacttaagctttgctttagtactgcccagcatgccagttag

SEQ ID NO: 2674 - DNA, 540 bp, synthetic construct
  misc_feature 1..540: note = source = /note="Description of Artificial Sequence: Synthetic coding sequence"
  source 1..540: mol_type = other DNA
atgggacgccctggacttggtgccgccgtttctgatcttggggaggccgtttctctgagtcagggacttttgctgctcctcctgctgtctatgggaggtgcttgggcctctcgggagcccctgaggccatggtgtcatcctattaacgcaatattggcggtggagaaagagggatgccctgtgtgtataaccgttaatacaaccatttgtgctggatactgcccgaccatgatgcgggttcttcaggccgttcttccacccctgccgcaagtagtttgtacataccgtgacgtgcgctttgagtcaattcgacttccgggctgccctaggggcgttgatccagtcgttagcttccctgtggctctgtcctgccgatgtggcccatgccgcagaagcacatcggactgcgggggcccaaaagatcaccccctaacctgtgaccacccccagcaggcttccagctcctctaaagaccctcctagaagcctacccagcccgagccgccttctagagcccgatactcctattctgccgcagtag

SEQ ID NO: 2675 - DNA, 294 bp, synthetic construct
  misc_feature 1..294: note = source = /note="Description of Artificial Sequence: Synthetic coding sequence"
  source 1..294: mol_type = other DNA
atgcagctgggcactggacttttgctcgcagctgtcctgtcgctgcaactagcagccgctgaggccatttggtgtcaccagtgcacagggtttggcggatgtagccacggatcgcggtgtctgagagacagcacacattgcgtaaccactgccacccgcgtgttgagtaacacagaagacctccccttagtgaccaaaatgtgtcacatcggctgcccagatatcccctccctgggccttggcccctacgtctccattgcctgctgccagacgtcgctgtgcaatcatgattag

SEQ ID NO: 2676 - DNA, 2058 bp, synthetic construct
  misc_feature 1..2058: note = source = /note="Description of Artificial Sequence: Synthetic coding sequence"
  source 1..2058: mol_type = other DNA
atgccagcttatacgcacgcctctcctatacacaatacacacaaaccttacgagtgcaaggagtgcgggaagtacttctcttgtgggagcaatctcatccaacaccagagcattcacaccggtgagaagccgtataagtgcaaggagtgtggcaaagccttccagctgcatatccagctcaccagacatcagaagtttcatacgggtgaaaagacatttgaatgtaaagaatgcgggaaagccttcaacttgcctacccaattgaatagacacaaaaacatccacaccgttaaaaaactgtttgaatgtaaggaatgcggcaaatccttcaaccggtcatcaaatctcacccagcaccaatccatccatgctggggtgaagccctaccagtgtaaggaatgcggcaaggcctttaaccggggcagcaacctgattcagcatcagaaaattcactcaaatgaaaaacctttcgtctgcagagaatgtgaaatggcctttcgctaccattaccagctgatcgagcattgccggatccacaccggcgagaaacctttcgaatgcaaggaatgcaggaaggccttcaccctcctcactaagctggtgaggcatcagaaaatccatatgggagaaaagccatttgaatgccgagagtgtgggaaggcttttagcctgctgaaccaactgaatcgccacaagaacatacacaccggagaaaagccttttgaatgtaaggaatgcggaaagagctttaacagatctagcaatctgatacaacaccagtccatccacgctgatgtcaagccctacgagtgtaaggaatgcggaaagggctttaataggggcgcaaatctaattcaacaccaaaaaatacattcaaacgaaaagccatttgtgtgcagagagtgtgaaatggcattcagataccattatcagttgattcagcattgtcagatccacaccggtggaaaaccatttgagtgcaaagagtgcggcaaggcattctcactgttgacacaacttgcgaggcacaagaacattcatactggcgagaagccctttgaatgtaaggattgtggaaaagcttttaatcgggggagcaaccttgtacaacaccagagcatccacaccggtgagaagccctacgaatgtaaggagtgcggcaaggcttttcgtctccatctgcagctgtctcagcacgaaaagacacacactggggagaagccatttgagtgtaaagaatgtggaaaattctttcgcaggggttccaatcttaaccaacatagatctatccacactggaaagaagccttttgagtgtaaagagtgtggcaaggcatttcgacttcatatgcacctgatccgccaccagaagttccacaccggcgagaagccattcgagtgtaaagagtgtggtaaagctttttctctgcacactcaactgaaccatcacaaaaacattcacacgggcgagaaacccttcaagtgcaaagagtgtggcaaatctttcaatagggtgtcgaacctggtccagcaccagtcgatccacgccggggtgaaaccctatgagtgcaaggaatgcgggaaaggattctcacgggtgtccaacctgattcagcaccagaagactcacagcagtgctaagccatttgtgtgtaaggaatgcaggaagacctttagatatcattaccagctcacagaacactaccgtatccacacaggggaaaagcctttcgaatgtaaggaatgcggtaaggctttcggactgttaactcagctggcacaacaccagattattcacaccggggagaagccttttaagtgcaaagaatgcggaaaggcgtttaatcgtggttcgaatttggtacagccccaaagtatacacacaggtgagaagccctatgagtgcaaggaatgtggcaaggccttccggctgcacttgcagctgagtctccaccagaagctcgtccaagtgagaaacccactgaacgttaggaacgtcgggcagccttctgacattagttctaacctgttgaacatccgcaagttcattctcggctag

SEQ ID NO: 2677 - DNA, 564 bp, synthetic construct
  misc_feature 1..564: note = source = /note="Description of Artificial Sequence: Synthetic coding sequence"
  source 1..564: mol_type = other DNA
tgacgcggaggcggggactcatacggcgtcttgctctcaaacgcgctggccagacttaggggcttcaaggatcacttcaccttctgccagcagttaaatataagcatatgtcccctctcacagacagccgctaggttccaggttattgtgtataatcctctggggcgcaaggtgaactggatggtcaggctgccagtatctgaaggggtgttcgtggtcaaggacccaaatggacgaaccgtcccaagcgacgttgtgatcttcccctcaagcgacagccaggcgcatccccccgaactccttttttccgcaagcttaccggccctgggcttctctacatactcagtggctcaggtgccacggtggaagcctcaagccagggcccctcagcctatcccacggagaagttggtcacctgccctcaccattgagaacgagcacattagagcgaccttcgaccccgacactgggctgctcatggaaattatgaatatgaaccagcagctcctcctgcccgtacgtcaaaccttcttttggtataacgccagtattggagacaactag

SEQ ID NO: 2678 - DNA, 3036 bp, synthetic construct
  misc_feature 1..3036: note = source = /note="Description of Artificial Sequence: Synthetic coding sequence"
  source 1..3036: mol_type = other DNA
atgggggcctacgccagagcaagtggcgtctgtgcacggggctgtctggacagcgccgggccatggactatgtctcgggccctccggccccccttgcccccactatgcttcttcctgcttctcctggcagcagctggagcccgcgctggggggtacgaaacctgtcccacagttcaacccaacatgctgaatgtccacctacttcctcatacccatgacgatgtcggctggctaaagacagtggatcaatacttctacggaattaagaacgatatccagcacgcaggtgtacagtatatccttgacagcgttattagtgctctgcttgctgatccgaccaggcgattcatttatgtagaaattgcttttttctcacgctggtggcaccagcagacaaatgctacgcaggaggttgtcagggatctcgtccgccagggcagactcgagtttgccaatggtggctgggtaatgaacgatgaggctgccacccactatggggctattgtggatcagatgacgcttggccttagatttctcgaagataccttcggcaatgacggtcgcccacgcgtcgcctggcatattgatccttttggacactctagagaacaagcctctctgttcgctcagatgggttttgatgggtttttcttcggcagactggactaccaggacaagtgggtgagaatgcagaagctggaaatggaacaggtttggcgagccagcacctcgctgaagcctcctactgcagacctctttaccggtgttctccctaacggctataacccaccccgcaacctgtgttgggatgtcctctgcgtagaccaaccattggtcgaagatcccagaagccccgaatacaatgctaaggaactggtcgactactttctcaacgtcgcgacagcccaaggccggtattaccggaccaatcacactgttatgactatgggctctgactttcagtacgagaacgcaaacatgtggtttaagaatttggacaagctcataaggttggtcaacgcacagcaggcaaaggggtccagcgtgcacgtcttatatagtacgcccgcatgctacctttgggagctcaataaggccaatctaacttggagtgtgaaacatgacgacttcttcccatacgccgatgggccccaccagttttggaccggatattttagctcccgacctgctcttaaaagatatgagagactgtcctacaatttccttcaagtttgcaatcagctggaagcactggtcggtctggccgcgaacgttgggccctatgggtcaggtgattccgcccccctgaacgaggcaatggccgtactgcagcaccatgatgccgtcagtggtacttcacgccagcatgtggcaaacgattacgcccggcagctggctgcagggtggggcccttgcgaggtgcttctgagcaatgcactggctaggctgcgggggttcaaggaccattttacattctgccagcagttgaacatatctatctgccccctgagtcagacggcagcacggtttcaggtcatcgtctataacccgctgggcagaaaagtcaactggatggtccggctgcctgtctcagaaggcgtcttcgtagtcaaagaccccaacggtagaacggtcccttccgatgtggtgatcttcccaagtagtgactcccaggcacacccccctgaactgttatttagtgcctctctgccagctttggggttcagcacctattctgtggcccaggtacctcgctggaagccacaggcccgggccccgcagcctattccgcgccgcagctggtctcccgcactcactatcgagaacgagcacatacgtgcaacctttgatcccgacaccggtcttcttatggaaataatgaatatgaaccaacaactgctcttgcctgtgcggcagacattcttctggtataatgccagtatcggtgacaatgaatcagatcaggcctctggcgcctatatatttcgaccaaatcaacagaaaccactcccggtaagccgatgggcccagattcatcttgtgaagacccccctggtgcaagaagtgcaccaaaatttcagcgcctggtgctctcaggtggtgagactgtaccctggacagcggcacctagaattggagtggagcgtcggacctatcccggtaggagacacctggggtaaggaggttatcagtagattcgatacaccattggaaacaaaggggaggttctacactgattctaacggtagggagatcctagagagacggcgagattaccgaccaacgtggaaactcaatcagactgagcccgtggctggaaactactaccctgtgaacactaggatctatatcacagacggcaatatgcagctgaccgtcctaactgatcgctcacagggcggatcttcactccgcgacggtagcctggagctcatggttcacaggaggctgctcaaggacgacgggcgaggcgtgtccgagccgttgatggagaatggtagtggcgcctgggtgcgtggtcgtcacctggtcctgctcgatacggctcaggccgctgcggctgggcacagactcttagccgagcaggaagtactggccccccaagtcgtcctggcccccgggggcggggccgcctacaatctcggggcccccccacggacccagtttagcggtctgagaagagatctgcccccatccgtacacctgctgacgctggctagctggggaccagaaatggtgctgttgcgacttgagcaccagttcgccgtcggggaagacagcggcaggaatctaagtgctcctgttacccttaatctgcgcgacctgtttagtacttttaccattacccgtctgcaagaaactacgctagtggctaatcagctgcgcgaagcagcatcaaggctgaaatggaccacaaacaccgggcctactcctcatcaaactccctatcagttggaccccgctaacataaccctcgaacccatggaaattcggaccttccttgcctcagtacagtggaaggaggtagatgggtag

SEQ ID NO: 2679 - DNA, 2853 bp, synthetic construct
  misc_feature 1..2853: note = source = /note="Description of Artificial Sequence: Synthetic coding sequence"
  source 1..2853: mol_type = other DNA
atgctgaatgtgcaccttctccctcacacccacgatgatgtcggttggctcaagaccgtggaccaatacttctacggtatcaagaatgatatccaacacgctggcgtgcaatatatcctggattctgtgatttctgctctgcttgcagacccaactcggcggttcatctatgtggaaattgcgttcttctctagatggtggcatcaacagacaaacgccacacaggaagtggttagagacttagtcagacagggcaggctggagttcgcaaacgggggatgggtcatgaatgatgaggctgcgactcactatggagccattgtggaccagatgacactcgggctccgcttcctcgaagacacttttggcaacgatggtagaccccgagttgcttggcacattgatccttttgggcattctcgggaacaggcaagtctttttgcgcagatggggtttgacgggtttttcttcggacgcctcgattaccaggacaaatgggtgcgaatgcagaaactcgagatggaacaagtttggagagcatcaacctccctaaaaccaccaacagccgacttgtttaccggtgtgttgcccaacggctacaatccccccaggaatctatgctgggacgtgctatgcgtcgaccaaccgctggtggaggaccctcgcagccctgaatacaatgccaaagaactagtcgattatttcctgaacgtcgctacagcccagggaaggtactaccgcaccaatcacaccgtgatgaccatgggaagcgacttccagtatgaaaacgccaacatgtggtttaaaaatcttgacaaactgatccggctggtgaacgcgcaacaggcaaaggggagcagtgtgcatgtgctgtatagcacccccgcgtgttacctgtgggaactgaataaagctaatctgacatggtctgtgaaacatgacgacttctttccttatgctgacggcccccatcaattttggacaggatacttctcatcacgtccggcacttaaacgctacgaacggctgagctacaattttctgcaggtttgtaatcagctggaggctctggtcggcctcgctgcgaacgttggcccctacggatctggtgacagtgcgccgctaaacgaggcaatggcagtcctgcagcatcatgatgctgtgtctggtacatcacgacaacacgtcgctaacgactacgctaggcaactggccgcggggtggggaccctgcgaagtcctgctgtctaatgcactggctaggctacggggattcaaagatcattttactttttgccaacaactgaatatctctatttgccctctctcacagacagcagcacgattccaggtgatagtgtataatccactgggccgaaaagtgaattggatggtgcgcctgccagttagtgaaggggtgttcgtggtgaaggacccgaatggaaggactgtgccatcagacgtcgtgatattccctagcagtgattcgcaggcacatccccccgagctgctcttctctgcaagtttacccgccctggggttctcaacatactccgtagctcaggttccccggtggaaaccacaggcccgagctccacagccaattcctagaaggtcttggagtccagccctcaccatagaaaatgagcatataagagcgacatttgatccagataccggtctgctcatggagatcatgaacatgaaccagcagctgctgctccctgttcgccaaacgtttttttggtacaacgcatcgattggggataacgagtctgaccaggcctctggggcttacatttttcgaccaaaccaacaaaagcctctccctgtgagccggtgggctcagatccacctagtcaaaacccccctggtgcaagaggtccaccaaaacttcagcgcttggtgtagccaggtcgttcgtctgtatccgggtcaaaggcatcttgaactggagtggtccgtcggccctattcctgtgggcgacacctggggtaaggaagtgatttccaggtttgacacgcctctcgagaccaaaggtcgcttctataccgattccaacggtagagaaattctcgaacgcagaagggactatcgcccaacttggaaactgaaccagactgaacctgtagctggcaattactaccccgtcaatactagaatctatataactgatggcaacatgcagctgactgtgctgaccgataggtcacagggaggaagtagcttgcgagatggcagcctcgagctcatggtgcatcgccgcctactcaaggacgacggacgcggagtctccgagccactcatggagaatggtagcggtgcttgggtgcgtggacgacaccttgtccttctcgacaccgcacaggccgcggcagcaggccatagattactcgctgaacaagaggtgctggctcctcaggttgtcttggcccccggtggcggagctgcatacaatctgggagctcccccaagaacccagttctcaggcctccgcagggacttgcccccaagcgtgcatttgctgacactcgctagttgggggccggagatggttctgttacgattagagcaccagtttgccgttggcgaggacagcgggcgtaacctgtccgccccagtcacactgaacttaagggatctgttcagcacgttcacaattactcgtctgcaagaaaccaccttagtggccaatcagttaagggaggcagcctccaggcttaaatggaccacgaatacaggacctacccctcatcagactccatatcagctggaccccgctaatatcactctagagcccatggaaattcgcacttttttagccagtgtgcagtggaaggaagtcgacggatag

SEQ ID NO: 2680 - DNA, 882 bp, synthetic construct
  misc_feature 1..882: note = source = /note="Description of Artificial Sequence: Synthetic coding sequence"
  source 1..882: mol_type = other DNA
atgggcttccctgctgctgccctcctctgcgccctttgctgtggactgctcgcacctgccgcccgggccgggtacagtgaagagcgctgctcatggagaggttctggcctaacccaggaacccggcagcgtggggcagctagccctagcatgcgccgagggcgctgtcgaatggctgtatcctgcgggggctctccgcctgactctcggggggcccgaccccagagcaaggcccggaatcgcatgcttgagaccagtaaggccttttgcaggcgcccaagtcttcgctgaaagggcggggggggcgctcgagcttctccttgcggaagggcctggtcccgcaggcggccgctgcgtcagatggggccctcgagagcggagagcacttttccttcaggccacccctcatcaagacattagccgccgcgtagctgcttttaggttcgagctgagagaggatggtaggccagagctgcccccgcaggctcacggcttgggcgtggatggggcttgccggccctgtagtgacgctgagctcctcctcgccgcgtgtacttccgattttgtgatccatggcattatccatggggtgacgcacgacgtcgaattgcaggagtctgttatcaccgttgttgctgcccgcgttcttcgtcagacaccacctctctttcaggccgggcgctctggcgaccaggggctgacgagtattcgcacccctttgaggtgcggtgtgcacccaggtcccggcacatttctgtttatgggatggagtaggttcggtgaagctagactcggctgtgcgccccgtttccaggaattccggagggcctatgaagctgcccgggccgcccatctgcacccctgcgaggtagctctccattag

SEQ ID NO: 2681 - DNA, 708 bp, synthetic construct
  misc_feature 1..708: note = source = /note="Description of Artificial Sequence: Synthetic coding sequence"
  source 1..708: mol_type = other DNA
atggaacaggacgaccctgtagaagccttgaccgaattgcgagaaaggaggttaggtgctctggagctgctgcaggcagccgccggatctggccttgcggcctacgccgtctgggcgttactcctgcaacctggattccggcgcgtacctctgcgcctgcaagtaccttacgttggtgcctcggctcggcaagtcgaacatgttctaagtctccttcgaggccgaccgggaaagacagtcgatttaggctctggggatggaagaatcgtactggctgctcaccggtgcggattgaggcctgcggttgggtacgaactgaacccatggctggtggccctggcgagacttcacgcctggcgggctggctgcgccggctctgtatgctaccggcggaaagacctgtggaaggtgagcctgagagactgtcggaacgtttccgtgttcctggcaccctccgtgctgcccttactggaagacaagttgcgcaccgaacttcctgccggagcccgagtggtgagtggcaggtttcctttacctacctggcagcccgttacagcagttggcgaaggactggatcgcgtgtgggcctacgatgtccccgagggagggcaggccggagaagcagcctcatccagaattcccatacaagcggcccctggacctagcagtgcccctatcccaggtgggctcatttctcaggccagctag

SEQ ID NO: 2682 - DNA, 2253 bp, synthetic construct
  misc_feature 1..2253: note = source = /note="Description of Artificial Sequence: Synthetic coding sequence"
  source 1..2253: mol_type = other DNA
atgctgagggcgaagaaccagctatttctcctttccccccattatctcagacaggttaaggaatcgagtggctctagattgattcaacagaggctgcttcatcagcagcagcccttacaccctgaatgggctgcattggcaaagaaacagttaaagggtaagaatcccgaggacctgatctggcacaccccagagggaatcagcatcaagcctctgtattctaaacgggatacgatggacctgcctgaagaactgcccggagtcaaaccttttaccagaggaccataccctaccatgtatacattccgcccttggactattaggcagtacgccggttttagtacagtcgaggagagcaataagttctacaaggacaacattaaggcgggtcagcagggccttagtgttgcctttgacctagccactcatagaggatatgacagtgacaacccacgggtgcggggcgacgtgggtatggccggcgtcgctatcgacaccgtggaagacaccaagattctcttcgacgggatccccttagaaaaaatgagtgtgagtatgacaatgaacggagctgttattccagtgctggccaattttattgttaccggagaagagcagggagtacccaaagagaagcttaccggcactattcagaacgatatccttaaggaatttatggtacgcaacacatacatattccccccagagccctctatgaaaataattgccgatatttttgaatacacagcgaaacacatgcctaagttcaattctataagcatttccggctaccacatgcaagaagctggcgcagatgccatccttgagcttgcctacactctcgccgatggactggagtactctaggacaggccttcaagccggcctcaccatcgatgaatttgcacctagactttcttttttttgggggatcggtatgaatttctacatggaaatcgccaagatgagagctggcagacgcctatgggctcacctaatcgaaaagatgtttcagccgaaaaattccaaaagtttgttactgcgggcacactgccagacctcaggctggtccctcaccgaacaagacccatacaacaatatcgtaagaaccgctatcgaagcaatggccgccgtctttggcggcacacagtcactccacacgaattcattcgatgaggccttaggcctccccacggtcaaaagcgcacgaattgcccgtaacacccagataatcattcaagaggagagcggaatacctaaggtcgcagatccttggggcgggtcttatatgatggaatgtctgactaacgatgtgtatgacgctgctttgaagttaataaatgagatagaagaaatgggcgggatggctaaagccgttgctgaaggaattcccaagttacgaatagaagaatgcgccgccaggaggcaggctcggatagatagcgggtccgaggttattgtaggtgtcaataagtatcagcttgaaaaagaggatgcagtggaggttcttgccattgacaacacatccgtcaggaataggcagatcgaaaagctgaagaagatcaaaagctccagggatcaggccctcgcagagaggtgcctagccgcactgaccgagtgtgctgcgtccggggatggcaatatactcgcactcgccgtggacgcgtctcgcgcacgctgcacagttggcgagattacggatgcactaaagaaggtctttggagaacacaaggcaaatgaccggatggtgtctggggcatataggcaggagttcggcgaatcaaaagaaatcacctctgcgattaagcgggtacataaatttatggaaagagaagggaggagacctcgcctccttgttgccaagatgggacaggatggtcacgacaggggagctaaggtcatcgccactgggtttgcagacctgggttttgatgttgatattggtccactgtttcagacccccagagaggttgctcagcaggccgtcgacgcagacgtgcacgctgtagggatctcgactcttgcagccggccataagaccttggttcccgaactcatcaaagaactgaatagcctgggtcgccccgacatattggtaatgtgtggtggggtgattcccccacaggactacgaatttctgtttgaggtaggagtctccaacgtgtttggcccaggaacccggatcccgaaagcagctgtgcaggtgttagatgacattgagaaatgcctggagaagaaacagcaaagtgtttag

SEQ ID NO: 2683 - DNA, 594 bp, synthetic construct
  misc_feature 1..594: note = source = /note="Description of Artificial Sequence: Synthetic coding sequence"
  source 1..594: mol_type = other DNA
actaggtatctagcccgctgtaccgtcggggagatcacagacgcactgaaaaaagtgttcggtgagcataaggccaatgataggatggtcagcggagcctatagacaggagttcggcgaatcaaaagagatcacatcagccatcaagagggtccacaaatttatggaacgcgagggaaggagaccccggctgctcgtcgcaaaaatgggacaggatggccatgatcgaggggccaaagtgattgccactggttttgctgacctcggatttgacgtggacataggtcctctctttcagacaccacgggaagtcgcacagcaggctgtggacgcagatgtacacgctgttggaatttcgaccctggctgctgggcacaaaacactggtacctgagctgatcaaagagctaaattccctaggaaggccggatatccttgttatgtgcggcggcgtcatcccccctcaggattacgaatttctgtttgaagttggcgtgagcaacgtgtttggccccggaacccggatccccaaagctgcagtccaggtccttgacgatatcgagaagtgcttggaaaagaaacagcaaagtgtatag

SEQ ID NO: 2684 - DNA, 2685 bp, synthetic construct
  misc_feature 1..2685: note = source = /note="Description of Artificial Sequence: Synthetic coding sequence"
  source 1..2685: mol_type = other DNA
atgatcctcctcgctgtcttgtttctttgctttatctcctcctacagtgccagcgtcaaaggacataccactggactcagcctgaataatgaccgcctttacaagctaacttacagcaccgaggtcctccttgaccgcggtaagggaaagctccaggattcagtgggatataggatctcatcgaacgtcgatgttgctttgttatggagaaacccagacggagacgatgatcagctgatacagatcactatgaaggatgtgaacgtggaaaatgttaatcagcagagaggggaaaagagcattttcaaaggaaaaagtccctctaaaattatgggtaaagaaaacctggaagcattgcaaagaccaaccctcctgcacttgatccacggtaaggtcaaagaattttattcttatcaaaacgaggctgtcgctattgagaatataaaacgcggacttgccagccttttccagacacaactgagctctgggaccaccaacgaagtggacattagcgggaactgtaaagtaacctaccaggcccaccaggataaggtgataaaaattaaggctctggacagttgtaagatcgccagatccggctttacgacaccgaaccaggtcttaggggtgagtagcaaagccacgtcagtcactacgtacaagatagaagattcttttgtcatcgccgtgcttgcagaagaaactcataattttgggttgaatttcctgcagaccataaaaggtaagattgtttcaaagcagaagctggaactgaaaactaccgaggccgggcccaggctcatgagcggcaaacaggcagctgctatcatcaaggcagtggattccaagtacactgcaattcccattgtcgggcaggtctttcagtctcattgtaagggctgcccatccctcagcgagctttggcgtagcactaggaagtatcttcagccagacaatttgagcaaggctgaagctgtgcgcaacttcctggctttcatccagcatctacgcactgcaaagaaggaagagatcttgcaaatccttaaaatggaaaataaggaagtgttgccacagttggtggatgcagtcactagcgctcagacctctgattcactcgaggccatcctggactttctggacttcaaaagcgactccagtatcatcctgcaagagaggttcttgtacgcttgcgggttcgcttcccaccccaacgaagaattgcttcgcgccctgatctccaaattcaaaggcagtatcggctccagcgacataagggagaccgtgatgataatcaccggcactctggttagaaaactatgtcaaaatgaggggtgtaaactgaaggctgtggtggaggccaaaaaactgatccttgggggcctggagaaggcagagaaaaaggaggatacaagaatgtacctgctggccctgaaaaatgcactgctgccagaaggaatccccagcctgttgaaatacgctgaggccggcgaaggacctatcagccacttagcaaccacagcgttacagagatacgacctgccgtttatcaccgatgaagtcaaaaaaacactgaacagaatataccaccagaatcgcaaagtgcatgagaagactgtgaggacagccgctgctgcgatcattttaaacaacaacccctcctatatggatgtaaagaatattctcctaagtattggtgagctgccccaggagatgaataagtacatgttagccatcgtgcaggacatcctgagattcgagatgccagccagtaagattgttcgaagagtgctgaaggagatggttgctcataattacgacaggttctcacgcagtggctcatcttccgcctacacgggctacatcgagaggtcaccccggtctgcctccacctattccttagatatactttacagcggaagcggaatcctcaggcgttctaatctgaatatctttcaatatatcggcaaagcgggcttgcacggttcccaagtcgtgattgaagctcagggcctggaggccctcattgcagccaccccagacgaaggggaagagaatctggactcatacgccgggatgagcgccatcctattcgatgtgcaacttcgacccgtgactttttttaacggctacagtgaccttatgtcaaaaatgctgagtgcttcgggagatcccatctccgtggtgaaaggactgatcctgctcattgaccacagtcaggaattacaactgcagtctgggctgaaggccaacatcgaagttcagggagggctagctattgatatatctggcgccatggagttttctttgtggtatcgcgagagcaaaacccgcgtgaagaaccgggttaccgtagtgattacgaccgatattactgttgattctagttttgtcaaggcagggttggagactagtactgaaacagaagccggtctggagttcatttccacggtgcaattctcccagtaccctttcctcgtttgcatgcagatggacaaggacgaagcaccttttcgccagttcgaaaaaaaatacgagagactctctaccggtagagggtacgtttctcagaagcgaaaggagagcgtgttagccgggtgtgagttcccactacatcaagagaacagtgagatgtgcaaagttgtgttcgcaccacagcctgacagcactagctccggctggttttag

SEQ ID NO: 2685 - DNA, 2685 bp, synthetic construct
  misc_feature 1..2685: note = source = /note="Description of Artificial Sequence: Synthetic coding sequence"
  source 1..2685: mol_type = other DNA
atgatcttgctggccgtgctttttttgtgctttatttcaagctatagcgcaagtgtgaaaggacacactactgggctgtcgctcaataacgaccgactctacaagctgacatactccactgaagtccttctggacagggggaaggggaaactgcaggactcagtaggctacagaatatcttctaatgtggacgtcgcccttttatggagaaacccagatggggacgacgaccagctgattcagatcactatgaaagatgtgaacgtggaaaacgtcaaccagcagcggggcgaaaagagtatctttaaaggcaaatcccccagtaagattatggggaaagagaatctcgaggctctgcagcgcccaaccctactgcatcttatccatgggaaagtgaaggagttttattcataccagaatgaagctgtagccatcgagaacatcaagagggggttggcaagcctgttccagacgcagttaagctccggaacaactaatgaagtggacatttctggaaactgcaaggtgacttatcaggcacatcaggacaaggtgatcaaaatcaaagccttagattcttgcaagatagcgagatctggattcaccaccccaaaccaggttctaggagtttccagcaaggctacatccgtgacaacttacaaaatcgaggactccttcgtcattgccgtgctggcagaagaaactcacaattttggactgaattttctgcagaccatcaaaggaaagattgtttccaagcaaaagctggaactcaaaacgactgaggctggcccacgcctgatgtccggcaagcaggcagccgctatcataaaggctgtggatagcaaatacaccgccatccctattgttgggcaggtgtttcaatcgcactgcaagggatgtccatctttgtccgaattgtggcggtcgaccagaaagtatctccagccagataacctgtcaaaggccgaagcagtgcgcaattttttggctttcattcagcacctgcgcactgctaagaaagaagagatactgcaaattctgaaaatggaaaataaagaggtattgccacagctggtggacgccgtcacatcagcccagacatccgactcactggaggccattcttgattttctggacttcaaatcggattcttcaataatcctccaggagagatttctgtatgcttgtggatttgcttcacaccccaacgaggaactcctgagagccctaattagcaaattcaaggggtcaataggaagttccgatatccgggagaccgtcatgatcatcacaggtaccctggtacggaaactctgtcagaatgaagggtgtaaactgaaagctgttgtcgaagctaagaagttaatcttaggtggactggagaaggctgaaaagaaggaagacacccgcatgtatttgctagctctgaagaatgctctgcttcccgagggcattcctagcctgctcaaatatgcggaggcgggtgaagggcccatctctcatcttgcaaccacagcgcttcaaaggtacgacctgccatttatcactgatgaggtcaaaaagaccttaaataggatctatcaccagaatcgtaaagtgcacgagaagacagtccgaaccgctgccgccgctattattctgaacaataacccctcttacatggacgtgaagaatattctactgtcaatcggcgagttgcctcaggagatgaataagtatatgctggctatcgttcaagatattcttagatttgaaatgcctgcttctaagatagtacgaagagtgctgaaggaaatggtggcccataactacgacagattctccaggagtggctcaagtagtgcctataccggttacatcgagaggagtcccagatcagcttccacttattccttggatatcctgtactcaggctctgggatcctgaggcggagtaaccttaacattttccagtatatcggcaaggcagggctacacggctctcaggtagttatcgaagcccagggactcgaggcgttgatcgcagccactccggatgaaggagaggaaaacctggacagttatgcagggatgtctgccatcctgttcgatgtgcagttaagaccggtgacctttttcaacgggtacagtgatttaatgtccaagatgctgagcgcctctggagaccccatcagcgtggtgaaagggcttatactcctgatcgatcatagtcaggagctccaattgcagagcgggcttaaggcaaatatcgaagtacagggaggcttagctatcgatatctcgggcgccatggaattctcactgtggtaccgtgagagcaaaacaagggtgaaaaatcgagtcaccgttgtaattaccaccgatatcacagtcgactctagctttgtgaaggccggactcgagacatctacagaaaccgaggccggcctcgagtttatttcaaccgtgcagttctctcagtatccatttttggtgtgtatgcagatggacaaagacgaggcccccttcagacagttcgaaaagaaatatgagcggttaagtactgggcgaggctacgtgagccagaagagaaaagaatccgtgttggcagggtgtgaattcccgctgcaccaggagaattctgagatgtgcaaggttgttttcgcccctcagcccgatagcacatccagcggctggttctag

SEQ ID NO: 2686 - DNA, 537 bp, synthetic construct
  misc_feature 1..537: note = source = /note="Description of Artificial Sequence: Synthetic coding sequence"
  source 1..537: mol_type = other DNA
atggccagagccccgctgcggcccgaaaatactattgtgcgcggcagcgcaaatcagtgtcaggatacctacagggcagaagagcttaccggacacaccaccgggctaagtctgaataacgacagactgtataaattaacctattccacagaggtactgctggacagaggcaaggggaaactgcaggatagcgtgggctatagaataagctcgaatgttgacgtcgccctgctgtggaggaacccagatggtgatgatgatcagctcatacagatcacgatgaaagacgtgaacgtggaaaatgtgaatcagcagcgtggggagaaaagcatcttcaaagggaaatctccgagcaaaatcatgggcaaggaaaaccttgaagcattacaacgcccaacccttttgcatctcattcacggcaaggtgaaggagttctactcatatcagaacgaggccgtagcgatagaaaacataaagcggggcctggcaagcctttttcagacacagttatccagtggtactacgaatgaggtttag

SEQ ID NO: 2687 - DNA, 1551 bp, synthetic construct
  misc_feature 1..1551: note = source = /note="Description of Artificial Sequence: Synthetic coding sequence"
  source 1..1551: mol_type = other DNA
atgattcttcttgccgttctctttttatgttttatttcatcttatagcgcatctgtcaagggacatacaacgggactctctcttaataatgatcgactgtacaagctgacctactccaccgaggtccttctggaccgcggcaaaggcaaactacaggattcggtggggtacagaattagcagcaacgtcgatgtggccctactttggcggaatccagatggcgatgatgaccagctgatccagatcaccatgaaagacgtaaatgtcgagaacgttaaccagcaacggggcgagaaatctatcttcaagggcaagtccccctcaaagatcatgggaaaggagaatttggaggctttacagcgaccaacactgctacaccttatccacggaaaagtgaaggaattctacagttaccaaaacgaggccgtagccatcgagaacattaaacgcgggctcgcaagtctgtttcagactcagctcagtagtggaaccaccaatgaggtggacatttctggcaactgcaaggtgacctatcaggcccaccaggacaaggttatcaaaatcaaggctctggatagttgtaagattgcacggagcggttttacaacgcccaaccaggtgcttggagttagttcaaaagcaaccagcgtcaccacctacaagatcgaagactcattcgtgatcgccgtactggctgaagaaacacataactttggtcttaatttcttacagaccattaaaggaaaaattgtctctaagcagaaactggagctcaaaactaccgaagctggacccaggctaatgtctggaaagcaggcagctgcaatcattaaggcggtggatagcaaatacaccgcaatccccattgttggccaggtgttccagagtcattgcaagggttgcccatctctgtccgaactgtggcggagtacccggaagtatttacagccagataacctgagtaaggccgaagccgtccgcaacttcctcgcctttatccagcacttgcgaactgcaaaaaaggaagagattctgcagatcttgaagatggagaacaaagaggtgttgcctcaactcgttgatgccgtcacaagcgcccagacttctgattccctggaagccatactcgactttctagattttaagagtgacagcagtatcatcctccaggagcgctttttgtacgcctgtgggttcgcttctcaccccaatgaggagttgctgagagcgctcatatccaagtttaaaggcagtattggctccagtgacatccgggagactgtcatgatcataaccggcactctggtacggaaattgtgccagaacgaggggtgtaagctgaaagctgtcgtcgaagccaagaagttgatcttaggaggcctagaaaaggctgagaagaaggaggacacccggatgtatctcctggctctgaagaacgctctactgccagaaggcattccttccctccttaagtatgctgaggctggtgagggtccaatcagtcatctggctactaccgcattgcagcgctacgatctgtttcacaactag

SEQ ID NO: 2688 - DNA, 3771 bp, synthetic construct
  misc_feature 1..3771: note = source = /note="Description of Artificial Sequence: Synthetic coding sequence"
  source 1..3771: mol_type = other DNA
atgctgttcaagctgctccaacggcaaacgtatacgtgtctgagtcatcgatatggactgtacgtgtgtttcttgggtgtcgttgtcaccatcgtcagcgcttttcagtttggcgaagtcgttctcgagtggagtcgggatcagtaccacgtcctgttcgactcgtacagagataatatagcgggaaagagctttcagaatcggctgtgccttcccatgcccatcgatgtggtgtatacatgggtgaatggcactgatctggaattgctgaaagaactgcagcaggtgagagagcagatggaggaagaacagaaggccatgagggagattctaggaaaaaacacaacggagcctacaaaaaagtccgagaagcagttagagtgccttctaacacactgcataaaagtacctatgctggtgctggacccagctctgcccgcaaacattaccctgaaagacctgccatcactctaccccagcttccatagcgcaagcgatatttttaacgtcgctaagcctaagaatccctccactaacgtgagcgtggttgtgtttgacagcacaaaggatgtcgaagacgcacactctgggttgctcaaggggaacagccgacagactgtgtggcggggctacctgaccacagataaagaggttcctggtctcgtactgatgcaggacttggcttttctgtccggctttccccccaccttcaaggaaaccaatcagttgaagacaaagctgccagagaatctcagtagtaaggtaaaactgctgcaactttacagcgaagcgtcagtggcactactgaagctgaacaaccccaaagacttccaggaattgaacaagcagaccaagaaaaacatgacgatcgatggaaaggagctcaccatctccccagcgtatctgctgtgggacctgtctgcaatctctcagtccaagcaggatgaagacatctccgccagtcgattcgaagacaatgaggagctccgttacagtctgaggtccatcgaaagacatgccccatgggttagaaatatctttatagtcactaacggccaaattccctcttggttgaacctggacaatcctcgggttacaatcgtcacccaccaagatgtgttccggaacctctctcatttgccaaccttttcttccccagctattgaatctcacattcacagaatagaaggactcagccagaagttcatttacctaaatgatgacgtgatgttcggtaaagacgtgtggcccgacgatttttatagccactcaaagggccagaaagtgtacctgacttggcccgttccaaactgtgccgaaggttgtcctgggagctggatcaaggatggctactgcgataaagcttgcaacaacagcgcctgcgactgggatgggggcgactgcagcggtaatagcggaggctctagatacatcgcgggcggcggggggactgggtcaatcggcgttgggcagccctggcagttcggagggggcattaacagtgtgtcctactgcaatcaggggtgtgctaattcctggttagctgataagttctgtgaccaagcgtgcaacgtactctcctgcggattcgatgctggcgattgcggtcaggatcactttcacgagctgtacaaagttatattactgcccaaccagacccattacattattcccaaaggagagtgtctgccgtatttctcctttgcagaggtggccaaacgtggggtagagggtgcctacagcgacaatcccattattcggcacgccagtattgccaataagtggaaaaccatccatctgattatgcattccgggatgaacgccacgactatccatttcaacctcaccttccagaacactaacgacgaagaatttaaaatgcaaattactgtcgaggtcgacactcgcgaaggcccgaagttaaattctacagctcagaagggatacgagaatctcgtgtctcctatcaccttgttacccgaggccgagatcctattcgaagatatccctaaagagaagcgattccccaagtttaagcggcacgacgtgaactccactaggcgtgcgcaggaagaagtgaaaattcccctcgtcaatattagtctcctgcctaaggatgcccaactatctctgaataccctggatctgcagttggaacatggcgacatcacccttaaaggttacaatttgagcaaatctgccctcttacgaagttttctgatgaactcccagcatgctaaaattaagaaccaggctattatcacggacgagacgaacgatagtctggtagctccccaggaaaagcaggtgcataagtctattctgccaaacagccttggcgtgtctgagcggctacagaggttgactttccccgcagtcagcgtgaaagtgaacgggcacgaccagggccaaaacccccctctggacctggagactacggccagattccgagtcgaaacacacacacagaaaacaatcggggggaatgtgaccaaagagaagcccccatcccttattgtgccactggagagccagatgaccaaggagaagaaaatcacaggaaaagaaaaggagaacagccgtatggaggaaaacgcagaaaaccacataggagtaaccgaagttctgctcggcagaaaactgcagcactataccgactcatatctgggctttctcccttgggagaagaagaaatatttccaggacctgctggatgaagaggaatcattgaagacccaactggcctactttacagatagcaagaacacaggacggcaattaaaggatacttttgcagactcgctccgatatgtcaataagatactgaactccaaatttggatttactagtaggaaagtcccagcccatatgcctcacatgatagaccgaatcgtcatgcaggaactccaagatatgttccctgaggagtttgacaagaccagcttccacaaagtccggcactcggaagatatgcagtttgccttcagctacttctactacctgatgagcgccgttcaacccctgaacatcagccaggtcttcgatgaggtggacacggatcaatctggagtgctctctgatcgcgaaatacggactctagccacaagaatccacgagctgcctttgtcgttacaggacctaacggggcttgagcacatgttaattaactgctcaaagatgctgccagccgatatcacccaattgaacaatattccgcccacccaggagtcatattacgaccccaatctcccgcccgtcacaaagagcttggtcacaaactgcaagccagtgacagacaagattcataaggcctacaaagataagaataagtaccgctttgagatcatgggcgaggaagagatcgcatttaaaatgatccgaacaaatgtgtcccatgttgtgggtcagctcgatgatatccgcaaaaaccccagaaagttcgtgtgtctgaacgacaatatcgatcacaaccacaaggacgcgcaaaccgtcaaagcagtcttacgcgacttctatgagtcaatgttccccattccctcacagttcgagctccctcgcgagtatcgcaatagattccttcatatgcatgagcttcaggaatggcgagcgtaccgcgataagcttaagttttggacacactgtgtgctggctacactgatcatgttcaccatcttcagcttttttgcagaacagctgatcgcactgaagcggaagatatttcctcgtagaaggattcataaagaagcttctccaaaccgcattcgggtttag

SEQ ID NO: 2689 - DNA, 1473 bp, synthetic construct
  misc_feature 1..1473: note = source = /note="Description of Artificial Sequence: Synthetic coding sequence"
  source 1..1473: mol_type = other DNA
atgctgtttaagctcctgcagagacagacctacacgtgcttatcccacagatacggcctgtacgtttgttttctgggcgtcgtggtcacaatcgtctctgcctttcagtttggggaggtcgtcctggaatggtcacgggatcagtatcacgtactgtttgattcttaccgcgacaacatcgctggcaagtcatttcagaaccgtctgtgcctgccaatgccaatagatgtcgtgtacacctgggtaaatgggacagacctggagctgctgaaagaacttcagcaagtaagagaacagatggaggaggagcagaaggccatgcgggagattctgggcaagaatacaaccgagcccaccaagaagagtgagaaacaactagaatgtctgcttacccactgtatcaaggtacccatgctggtgctggaccccgccttgcccgcaaatatcacgttgaaagacctgccttccctgtatccaagcttccactccgcctctgacatcttcaatgtcgccaaaccaaagaaccctagtactaatgtgagcgtggtggtgttcgatagcacaaaagacgtggaggacgctcactcagggttgttaaagggcaattcgagacagacggtgtggcgggggtatttgaccactgacaaggaggtacccgggttagtcctaatgcaggatcttgctttcctgtccggatttccacctacattcaaggaaactaatcagctcaaaaccaagttgcctgaaaacctctccagcaaggttaagttacttcaactatactctgaggcttcagtggcactgctaaaattgaataaccctaaagatttccaagaactgaataagcaaacaaaaaaaaacatgactatcgacggtaaggagctgactatttcaccggcctacctactctgggacttgtcagccatctcacagagtaagcaagacgaagacatttcagctagcaggtttgaggataacgaggagcttaggtattctctgcgatctatagaacgccacgccccttgggtgagaaacatatttattgtgaccaatggccaaatcccttcctggttgaatctagacaaccccagggtgaccattgtgactcaccaggatgtatttagaaacctctctcatttgcctacctttagcagcccagcaatcgagtcccatattcacaggatagagggcctctcccaaaagttcatttatctgaacgacgatgtgatgtttggcaaagatgtctggcccgacgatttttattctcattcgaaagggcagaaggtctatctcacttggcccgtacccaattgcgccgaaggatgccccggctcctggattaaggatggctactgcgacaaagcctgcaataattcggcttgtgattgggatggcggcgattgtagtgggaaggatgtcttaaactgcaatagtttcatcttcatggagtactttctgttaaaccactactag

SEQ ID NO: 2690 - DNA, 1605 bp, synthetic construct
  misc_feature 1..1605: note = source = /note="Description of Artificial Sequence: Synthetic coding sequence"
  source 1..1605: mol_type = other DNA
atggctactgcccttatggcagtggtgctgcgcgcagcagctgttgcaccaagactgcggggtagaggcgggactggtggagcacgtagactctcatgcggcgcccggagaagagcggcgagaggtacctctccaggacggcgtttaagtacggcctggtctcagcctcagcctcctccagaagaatacgccggggccgacgatgtctcccaatctccagtggcagaggaaccctcatgggttccatcaccaaggccaccagtgcctcacgagtcgccagaaccaccaagtggcagatccctcgtccagagagacatccaagcttttctcaaccagtgtggggcctcccccggggaggcccgacactggttaacccagtttcagacttgtcaccattctgccgacaagcctttcgctgtcatcgaggtcgacgaggaggttctgaagtgtcagcagggggtgagtagcttggcttttgctctcgcatttctgcagcgcatggatatgaaaccactggtagtcttgggcctgcctgcgccaaccgccccgtcggggtgcctttcattctgggaagcaaaggcccagctggccaagagctgcaaagttctggtggacgcactgagacacaacgccgcagccgctgtgccgttttttggagggggttccgttctccgggcggcagagcctgcgccacatgcaagttatggagggatcgtctcagtggaaacggatcttctccagtggtgtctcgagtcaggatcgattccgattctgtgtccaattggggagacagccgcgcggcgctcagtgctcctagactctctggaggttacagcctcattagccaaagccctccggcctacgaagatcatcttccttaacaacacaggaggcctgcgggattcaagccacaaggtactgtctaacgtaaacctgcctgctgatcttgatcttgtgtgtaatgcagagtgggtgagtactaaagagcgtcagcaaatgcgcctaatagtggacgtccttagtagactcccacatcactcttcagccgtcatcacagccgcatctactctcctgacggaactgttttcaaacaaagggagtgggacactgtttaaaaacgctgaacggatgctgcgtgtccgcagcctggataaactcgaccaaggcaggcttgttgacctggtgaatgcgtccttcggaaaaaagttgcgagatgattatttggccagccttcgaccccgcctgcactccatctacgtcagcgagggttacaatgcagctgccattctgactatggagcctgtcttaggcggtaccccctacttggacaagtttgtggtgtcatcttcccggcaggggcaggggtccggccagatgctgtgggagtgcctacgcagggacttgcagaccttgttttggaggtccagagtgaccaatcctattaacccgtggtacttcaaacacagcgatggcagcttttctaataaacagtggatcttcttttggtttggtctcgccgatatccgggactcttacgagctggtgaaccacgccaaagggctccctgactctttccataaaccagccagcgaccccggctcttag

SEQ ID NO: 2691 - DNA, 1107 bp, synthetic construct
  misc_feature 1..1107: note = source = /note="Description of Artificial Sequence: Synthetic coding sequence"
  source 1..1107: mol_type = other DNA
atggatatgaaacccctggtcgtgctgggactccccgctcctactgcccccagtggctgtttatcgttctgggaggctaaggcacaacttgcaaagtcttgtaaggtgctggtggacgcgctccggcacaatgcggctgctgctgtgccatttttcggggggggatctgtcctgcgggccgccgaacctgcaccacacgcgtcctatgggggcatcgtgagtgttgagaccgatctactacagtggtgtctcgaatcagggagtatacccatactgtgtccaatcggcgagaccgcggcccgcaggtctgtcctactggactccctcgaggttacagcttcactggctaaggcactgaggccaactaaaatcatcttcctgaataataccggcggcctccgggattcctcccacaaagttctttccaacgttaacctgccagctgatctcgatttggtctgcaatgccgaatgggtgtccaccaaagagcggcagcaaatgcgccttatagtagatgtgctgtcccgtctcccccaccactcatctgctgttattactgctgcatctactctgctcaccgagctgttttccaacaaaggctcagggacactgttcaaaaatgccgaaagaatgctgcgcgtccgtagtctcgataaactggatcagggacgtctcgtcgatctggtgaacgctagttttggaaagaaactgagggacgactatcttgcctctcttagacccagactgcacagcatttacgtgtcagaaggatataatgccgccgcaatccttactatggagcccgtgctcggcggtacaccgtacttggacaagtttgttgtctccagcagtcgccaaggacagggttccggccagatgttgtgggaatgcctgagaagggaccttcagaccctcttctggcgatcccgagtgaccaaccccatcaacccctggtactttaaacacagtgacggatcctttagtaacaagcaatggatctttttctggtttggcctagctgacattcgcgatagttacgaactcgtgaatcacgccaaggggcttccggacagctttcacaaaccggcaagcgaccccggaagttag

SEQ ID NO: 2692 - DNA, 1188 bp, synthetic construct
  misc_feature 1..1188: note = source = /note="Description of Artificial Sequence: Synthetic coding sequence"
  source 1..1188: mol_type = other DNA
atgcctgggcggtcttgcgtagcactggtgttgctggcggcggcagtttcctgtgctgtcgcacagcacgccccaccgtggactgaggactgcagaaagtctacatacccccctagcggccccacatataggggcgctgtgccttggtataccataaacctggacctccccccatataaacgctggcacgaactcatgctcgacaaagcacccgtgcttaaggtgatcgtgaacagcctcaaaaatatgattaacaccttcgttccttcagggaagataatgcaggtcgtcgatgaaaagctgccagggctgctgggaaacttccccggcccctttgaagaagagatgaaaggaatagccgcagtcaccgacatccctctcggagagataatctccttcaacatcttctatgaattgttcacaatctgcactagcatcgtggccgaagacaaaaaagggcatctgattcacgggaggaacatggactttggagtcttcctcggttggaacataaacaatgatacctgggtgatcactgagcagctcaagccccttaccgtgaatctagactttcagcggaacaataagaccgtatttaaggcatctagctttgccggatatgtcggcatgctgacaggctttaaacccggtctcttcagcctaacgctgaatgagcgcttctccattaatggcggctatctgggcatcttagagtggatcctcggtaagaaagacgttatgtggatcgggttcctgacaagaaccgtattggagaacagcacttcgtacgaggaagcaaaaaatctgctcacgaagaccaaaattcttgctccagcctattttatacttggggggaaccagtctggtgaggggtgtgtaatcacccgcgaccgaaaggagtccttggatgtctacgaactggacgcaaagcagggtcggtggtatgtggtgcagactaattatgaccggtggaagcaccccttttttctggacgaccggcggacaccagccaaaatgtgcctcaatcgtacttcccaggagaatatcagtttcgagacaatgtacgatgtgctgagtacaaagccagtgctgaataaattaactgtatacactaccctgattgatgtcactaaagggcagttcgagacttacctccgagactgccccgacccttgtattggatggtag

SEQ ID NO: 2693 - DNA, 1170 bp, synthetic construct
  misc_feature 1..1170: note = source = /note="Description of Artificial Sequence: Synthetic coding sequence"
  source 1..1170: mol_type = other DNA
atgaactgctgcatcggccttggtgagaaggctcgcggatcacatcgtgcctcctaccccagcttgtcggctcttttcacagaggcttcaattctaggcttcggctctttcgctgtgaaagcccagtggacagaggactgcagaaaaagcacgtatccacctagtggtcccaccgtttttccagccgtaattaggtatcgaggagctgtgccttggtacacaatcaatcttgacctcccgccttataagaggtggcatgagctgatgctggacaaagctcctgtgcccgggctactgggaaactttcctgggcccttcgaggaggagatgaaaggcatcgccgcggttaccgacattcccttgggagagatcatcagtttcaatattttctacgagctcttcactatctgcaccagcatcgtggccgaagataaaaaaggacacctcatccacggccgtaatatggatttcggcgtttttctgggatggaacatcaataacgatacatgggtcattaccgagcagctcaagcctctaaccgtaaatctggattttcaacggaacaacaaaaccgtctttaaggcttcctctttcgcaggttatgtcgggatgctgacgggatttaaaccagggctgttcagtcttaccttaaacgagcggttttctataaatgggggctatcttggcatacttgaatggatcctgggtaagaaggatgtgatgtggatcggtttcttaacccgaactgtgttggagaactctacttcctacgaggaggcaaaaaatctgctgaccaaaaccaagatcctggcacccgcctattttatcctgggaggcaatcagtctggcgaggggtgcgtgatcaccagagacagaaaagagtctctcgatgtatacgagttggatgcaaagcagggcaggtggtacgtcgtccaaaccaattacgatagatggaaacatcccttctttctggatgacaggcgaacacccgcaaaaatgtgtctgaaccgcacatcccaggaaaacatttcattcgagacgatgtatgatgtcctgtctaccaaacccgtgctgaacaaattgacagtctataccaccttaattgacgtgacaaagggccagttcgagacatacctccgtgattgtcccgatccttgcatcggatggtag

SEQ ID NO: 2694 - DNA, 1236 bp, synthetic construct
  misc_feature 1..1236: note = source = /note="Description of Artificial Sequence: Synthetic coding sequence"
  source 1..1236: mol_type = other DNA
atgaactgctgtattgggcttggcgagaaagcgcggggatcgcacagggcctcttaccccagcttgagtgcattattcacggaggctagcatactcggatttggtagcttcgccgtgaaggctcagtggacagaagattgccggaagtctacttaccctccaagtggtcctacttaccgtggagctgtgccttggtacactatcaatttggatttacccccctacaaaagatggcacgaactgatgttggataaggcccctgttctaaaagtcatcgtcaactcattaaagaatatgattaacacctttgttccctcaggcaagattatgcaggtcgtggacgagaaactacctggcctgctcggcaattttcctggcccctttgaggaagaaatgaaaggtattgcggctgttaccgatatacccctcggggaaatcatcagcttcaatatcttctacgagctctttacaatttgcactagcatcgtcgctgaagataagaaggggcacttaatccatggaagaaacatggattttggggtctttctgggctggaatattaataatgacacctgggtgattacagaacagttgaagccactgacagtgaatttggacttccagaggaacaacaagaccgtgttcaaagcaagttccttcgcgggctatgtgggaatgctgacgggttttaagccaggcttgttttccctgacactgaacgagcgtttttccatcaacggcggctacctgggcattcttgagtggatcctggggaagaaggatgttatgtggattggtttccttacgcgcacggtgctggagaactcgacctcttacgaggaagctaagaatctcctcaccaaaactaaaattctcgcgcccgcttacttcatcttaggggggaaccagtccggcgagggctgcgtcatcactagagaccgtaaggaatctctcgatgtttacgagctggatgccaagcagggacgctggtatgtggtccaaaccaactacgaccgctggaagcatccattttttctcgatgatcggcgaactcccgcaaaaatgtgtcttaatagaaccagtcaggaaaatatcagcttcgaaactatgtacgacgtgctttcaacgaaacctgtactgaacaaactaactgtgtacactacgctgatcgatgtgacaaagggccagtttgagacgtacctgcgcgactgtcctgacccctgtattgggtggtag

SEQ ID NO: 2695 - DNA, 918 bp, synthetic construct
  misc_feature 1..918: note = source = /note="Description of Artificial Sequence: Synthetic coding sequence"
  source 1..918: mol_type = other DNA
atgctcgataaggctcctgtgcttaaggtgattgtgaactcactgaagaacatgattaatacctttgtcccaagcgggaagatcatgcaggtggtagatgagaagttgcctggcttgctgggcaattttcccgggcctttcgaggaagagatgaaaggaattgccgccgtgaccgacatccctcttggacatctcatccacggcaggaacatggattttggcgttttcctaggatggaatataaataacgatacatgggtgattaccgagcagctgaagccactgacagtgaatctcgacttccagagaaataacaaaacagtgtttaaagcaagctcctttgctggatacgtcggaatgctcacaggtttcaagccaggactgtttagtctcaccctgaacgagaggttttcaatcaacggcgggtacctagggatcttggaatggattttgggaaagaaggacgttatgtggataggttttctgaccaggacagtgctcgaaaattcaacaagctatgaggaggcgaaaaacttactgactaagacaaagattctggcaccagcttacttcattctgggaggaaaccagtctggagagggctgtgtcatcacccgcgatcgaaaagaatctctggatgtgtacgaattggatgccaaacagggtcggtggtacgtggtgcagaccaattacgatcggtggaaacacccattctttctggacgataggcgcacacctgctaaaatgtgcctcaatagaactagccaggagaacatctcctttgaaaccatgtacgatgtactatctacaaaacctgtcctgaacaaattgactgtttataccactttgatcgacgtgaccaaaggccagtttgaaacgtatttgcgcgactgccctgatccgtgcatcggatggtag

SEQ ID NO: 2696 - DNA, 1113 bp, synthetic construct
  misc_feature 1..1113: note = source = /note="Description of Artificial Sequence: Synthetic coding sequence"
  source 1..1113: mol_type = other DNA
atgcccgggcggagctgcgtcgcattggtgctcctggcggcagcggtgtcctgtgctgttgctcaacatgcaccgccatggaccgaggattgtcgtaaatcgacctaccccccttccggtccgacataccggggggcggtgccatggtacaccataaacctcgatttgcctccttataagcggtggcatgaactgatgttggataaagccccggtcctcaaagtgatagtgaacagtctgaagaacatgatcaataccttcgtgccttccggcaagatcatgcaggtggtggatgagaagctgccgggcttgttaggcaatttccccggcccctttgaagaggaaatgaaaggtatcgccgcagtgactgatatccctctagggcacctcatccatggccgaaacatggatttcggggtttttctgggctggaatatcaacaatgatacctgggtgatcacagagcaactcaagcccctcacagtgaatttggactttcagcgcaacaataagactgtcttcaaggcaagttccttcgccggttacgtgggtatgctgaccggcttcaagcctgggctgttcagcttaactctcaatgagaggttctcgataaatggagggtatctgggaatcttagagtggatcttgggcaagaaggacgttatgtggatcgggtttctgacaaggacggtgcttgagaacagcacgagctatgaggaggcaaaaaacctactcaccaagacaaagatactcgctcctgcttactttattctaggcggcaatcagtccggggagggatgtgtgatcacacgcgaccgtaaagaatccctggatgtgtacgagctcgacgcaaagcagggaaggtggtacgttgttcagacaaactatgatcgatggaagcacccattcttccttgacgatcggaggactcctgctaaaatgtgcctcaacaggacatctcaagaaaatatctcattcgaaacaatgtacgacgtcctgagtacaaaacccgtgctcaacaagctgactgtgtatacaacattaatcgatgtgaccaagggacaatttgagacatacctgagagattgtccagacccatgtatcggatggtag

SEQ ID NO: 2697 - DNA, 405 bp, synthetic construct
  misc_feature 1..405: note = source = /note="Description of Artificial Sequence: Synthetic coding sequence"
  source 1..405: mol_type = other DNA
atggatccgcagactgcccccagtcgggcactactcctcctgctgttccttcatctggcatttttgggcggtagaagtcacccacttggctcaccggggtccgccagcgacctagaaacatccgggctgcaagagcagcggaaccacctgcaaggtaagttaagcgaactgcaagttgagcagaccagcctggaacccttgcaggagtccccacggcccactggcgtatggaaatctagggaagtggccacggaaggcatccgcgggcacaggaaaatggtcctgtatactttacgcgctcctcgctcccctaagatggtccaggggagcggatgctttgggaggaaaatggacaggatctcctcttctagtggcctcggttgtaaagtgctcaggcggcattag

SEQ ID NO: 2698 - DNA, 726 bp, synthetic construct
  misc_feature 1..726: note = source = /note="Description of Artificial Sequence: Synthetic coding sequence"
  source 1..726: mol_type = other DNA
atgagcatgctcttctacactctcattacagctttcctcatcggcattcaggcggagccccattccgagtctaatgttccagctggacacactatccctcaggcccactggacaaagctgcagcattccctggacaccgccttaaggcgcgctaggagcgcgcccgcagccgcaatagcggctcgggttgccgggcagacacggaatattactgtcgatcctcggctgtttaagaagcggcgcctgcggagcccacgtgtcctcttttcaacacagcctccacgtgaggccgcggatactcaggacctcgatttcgaagtggggggtgctgcaccgtttaatcgtacacaccggtcaaaaaggagctccagtcatcctattttccatagaggtgagtttagcgtgtgcgacagcgtgagcgtgtgggtgggcgacaagacaacagctactgacattaaaggaaaggaagtgatggtgctcggcgaggtgaacataaataacagtgtgttcaagcagtacttttttgagacaaaatgccgcgaccctaacccagtcgattcgggttgtcgtggaattgattccaagcattggaacagttattgtactacgacccatacttttgtgaaagctttgacaatggacggcaagcaggccgcttggagatttatccgcatagacactgcctgcgtctgcgtgctctctcgaaaagcagttagacgcgcttag

SEQ ID NO: 2699 - DNA, 1923 bp, synthetic construct
  misc_feature 1..1923: note = source = /note="Description of Artificial Sequence: Synthetic coding sequence"
  source 1..1923: mol_type = other DNA
atgagcgagcggaaagaaggacgcgggaaggggaaggggaagaagaaagagaggggttctggtaagaagcccgagtctgcggccggtagccagagtcccgcattaccaccacggcttaaagagatgaagtctcaggagtccgctgccggaagtaagctagtgctgcgttgtgagaccagctccgagtatagttctctgagatttaagtggtttaaaaacgggaacgagttgaatcggaagaacaagccacagaacatcaagatccagaaaaagcccggtaagtcagagctcaggattaacaaagccagcctggccgactcaggggagtatatgtgcaaagtcatcagtaagctcgggaacgattcagcaagtgccaacataaccatcgtcgaaagcaatgaaattataaccgggatgcccgccagcaccgaaggtgcctatgtatcttcagaatcgcccatcaggattagtgttagtaccgagggcgctaacaccagcagttcaacctccacatctactactgggacttctcacttagttaagtgcgccgagaaagaaaagacgttctgtgtaaatggaggggagtgttttatggtcaaagacctgtccaacccgagtcgttacctgtgcaagtgccagcctggtttcactggtgcacgctgcacggaaaacgtccccatgaaggtccagaatcaggagaaggccgaagaactgtatcagaagcgggtgctgactattacgggcatctgtatcgcgcttcttgttgtgggcatcatgtgcgtcgtggcttattgtaagacgaagaagcaacgcaaaaagctgcacgacaggctgcgacagtcactgcggtcagagagaaacaatatgatgaatatcgcgaacgggccacaccaccctaatccaccccctgaaaatgtgcagctcgtgaatcagtacgtgtccaaaaacgttatctctagcgaacatatcgtggaacgagaggctgaaacatccttctccacctcacattatacttctaccgcccatcattccacaacagtaactcagaccccatcgcactcctggtctaacggccatactgagtctatcctaagcgagagccactcagtgatcgtgatgtcctccgtggagaactctcggcacagttctcccacggggggccccagagggcgactaaacggaaccggcggccctcgcgagtgcaactcctttctgagacatgccagagagacccccgactcgtatcgcgatagtccccatagtgagcggtacgtgtccgccatgactacgcctgccagaatgtcaccagtggatttccacactccatcgtcccctaagtctccaccgagcgagatgtctccaccggttagtagtatgacagtgtctatgccatccatggctgtgagtccctttatggaggaggaacggccactgctgttagtgacccccccacggcttagggagaagaaattcgaccaccatccccagcaattcagctctttccatcataatcctgcccacgactctaactccctgcctgctagcccactcagaatcgtcgaggacgaggagtacgagaccacccaagagtatgaaccagcccaggaacctgtgaagaagttagctaattccaggcgtgccaagagaaccaaaccaaatgggcatatcgcaaacaggcttgaggtggactcaaacactagctcccagagttctaacagcgagtccgagaccgaagatgaaagagtgggcgaggatactcccttcctgggaatccaaaaccccttagcggccagcctggaagctacgccggccttcagactggccgactcacgaacaaaccccgccggtcgcttctcaacccaggaggaaattcaggcccgcctgagcagtgtgatagccaaccaagaccctattgccgtgtag

SEQ ID NO: 2700 - DNA, 1914 bp, synthetic construct
  misc_feature 1..1914: note = source = /note="Description of Artificial Sequence: Synthetic coding sequence"
  source 1..1914: mol_type = other DNA
atgagcgaaaggaaggagggccggggtaagggaaagggaaaaaaaaaagagcgaggtagcggcaagaagcccgaaagtgcagccgggagccagtcaccagcgcttccaccccggctcaaggagatgaaatcccaggaatccgctgctggaagtaaattagtgctgagatgcgaaacaagttctgagtattctagcttgcgatttaagtggtttaaaaacggcaacgagctgaatcggaagaataaaccacagaacataaagatccagaagaagcccggtaagtcggagctaaggatcaataaggcaagcttggctgactctggcgagtatatgtgcaaagtaatttctaagctcgggaatgacagcgccagtgccaacatcactattgtcgagagtaatgaaatcattactgggatgcccgcgtccaccgaaggcgcctacgtgagctctgaatcgccaattagaatatctgtctctacagaaggcgcgaacacaagctcaagcaccagcacgtcaaccaccggaacttcacacctggtgaagtgcgcagagaaggagaaaacgttttgtgtgaacggtggcgaatgttttatggtgaaggacctcagcaatccttcccggtatctttgcaaatgtcctaatgaattcactggcgaccggtgccaaaactacgttatggctagtttttacaaagcagaagagctataccaaaagagggtcttgacaatcactggcatatgtatagctcttcttgtggtgggtatcatgtgcgtagtcgcttactgtaagacgaagaagcagcgcaagaagctccatgacaggcttcggcagagtcttaggtctgaacgaaataacatgatgaatattgccaacggacctcaccatccaaatccaccgccagagaatgttcagcttgtgaatcagtatgtctccaagaacgtaatctcatctgaacacatcgtggagcgcgaggctgagacatcgttcagtacttcacactatacatcaactgcgcatcactctaccacagtcactcagactcccagccactcgtggagcaatggccacactgaatctatacttagcgaatcccattctgtgattgttatgtcttctgtggagaatagcagacattctagtcccactgggggtccaagaggccggcttaacgggacagggggtccacgggaatgtaactcctttcttcgccatgctcgggaaacaccagattcgtacagggactccccgcacagcgaaaggtatgtctcagctatgacaacgccagctaggatgtctcctgtcgactttcacaccccatcatcaccgaagtctcccccctcagaaatgagcccaccagtttcctctatgaccgttagtatgcccagcatggcagtgagtccattcatggaagaggagcgccctctgctccttgtgacccctcctcgccttcgcgagaaaaagttcgaccaccacccccagcagttcagctcattccatcataatccggctcacgattccaactctctacccgcctcacctcttaggatagtggaggatgaggaatatgagacgactcaggagtacgagcctgcccaggagccagtaaagaaattggccaattcaaggcgagcaaagaggactaaacccaatggccacatcgcaaaccgtctggaggttgactccaatacctccagtcaatcatcaaattcagaatctgagaccgaggacgagcgcgtaggagaggacacacccttcctcgggatccagaacccgctggcagccagcctcgaggccacaccagcattccgactagccgactcacgaaccaaccccgctgggcggttctcaacccaggaggaaatacaagcgcgtctgtccagtgtgatagcaaaccaagaccctatcgccgtgtag

SEQ ID NO: 2701 - DNA, 1836 bp, synthetic construct
  misc_feature 1..1836: note = source = /note="Description of Artificial Sequence: Synthetic coding sequence"
  source 1..1836: mol_type = other DNA
atgagcgaaagaaaggaggggaggggtaaggggaagggcaagaaaaaagaaagaggaagcggcaagaaacctgaatccgcagccgggtcacagtccccagccctcccccctagacttaaggagatgaagagccaagaatcagctgccgggagcaagcttgtactgagatgcgagacttccagcgagtattccagtctccgcttcaaatggttcaaaaatggaaatgaactgaatcggaagaataagccccaaaacatcaagattcaaaagaaacccggcaagtcggagctccggatcaacaaagcctcactggccgacagcggggaatacatgtgtaaggtgatctcaaaattggggaatgattccgccagcgcgaacatcacaattgtcgagagcaatgctacttcaacatctaccactggaacctctcatctcgttaagtgtgcagagaaagagaaaacgttctgtgtgaatgggggagagtgctttatggtcaaggacctgagcaacccctcacggtatctatgcaaatgtcccaatgagtttaccggtgaccgatgccaaaactatgtcatggcttcattctacaagcatctcgggattgagtttatggaggctgaagagctgtaccagaaaagggtgttgacaatcaccggaatctgcatcgcactgctcgtggtgggcataatgtgcgtcgtcgcttattgtaagacaaaaaaacagcgtaagaagctgcacgacagactcagacagtctctgaggtctgagcgtaacaatatgatgaatattgctaacgggccgcaccatcctaacccaccccccgaaaacgtccaattagtgaaccagtatgtgagcaagaatgttatctcctccgaacatattgtcgaaagggaggccgagacgagtttctcgacaagtcattacacaagcacagctcaccactctacaaccgtcacccagaccccaagccacagttggtcaaacggtcatacggaatctatacttagtgagtcacattccgtgatagttatgagctctgtcgaaaactcccggcatagctctccaacggggggacctagaggcaggttgaacggcactggaggtccacgtgaatgcaattcatttctcaggcacgccagggaaacccctgactcgtacagagacagtccccactcagagcgctatgtgtctgcaatgaccacaccggcacgtatgagtcccgttgacttccataccccatcatctccaaaatcacccccgtctgagatgagtccacccgtctcatcgatgaccgtgagcatgcctagcatggccgtgtcaccattcatggaggaggaacgtcctctgctgctcgtgactcccccacggctgcgggagaagaagttcgaccatcacccccagcagtttagttcatttcatcataatccagcccatgattctaattcactccccgcctcacccctgcggattgtggaagacgaggagtatgagactacccaggagtacgaaccagcccaagaacccgttaagaaacttgctaactcaagacgcgcaaagcgcacaaagccaaacggccatatcgccaataggctcgaggtggattcaaacacttctagccagtccagcaattccgaatccgagactgaggatgaaagagtgggggaagatactccgttcctgggcatccagaatcctctggcggcgagccttgaagcaactccagctttccgactggctgactcccgcactaatcccgcagggaggttttcaacacaagaggaaattcaggctagactgtcctccgtgattgcgaatcaggacccaatcgctgtttag

SEQ ID NO: 2702 - DNA, 1947 bp, synthetic construct
  misc_feature 1..1947: note = source = /note="Description of Artificial Sequence: Synthetic coding sequence"
  source 1..1947: mol_type = other DNA
atgagtgagaggaaggaaggtcggggaaagggcaaaggcaagaaaaaggaacgcgggtcaggcaaaaaacccgaatctgctgcaggcagccagtcgcctgccctgccgccgcgactgaaggaaatgaaatctcaggaatctgcagctggtagtaaacttgtgctgagatgcgaaacctcctcggaatactcctctcttaggtttaaatggtttaaaaatggaaatgagttgaaccgcaagaataagccccagaatatcaagatccagaagaaaccaggaaaaagtgaactcagaataaacaaagcctcccttgcagattctggggagtacatgtgcaaggttatttctaaactaggcaatgactcagcgtctgcaaatatcacaatagtggagagtaatgagatcatcacaggcatgcccgctagtaccgaaggcgcttatgtctcgtccgagtcaccaatcaggatctcagtttccacggaaggcgccaatacaagcagttccacttccacctcaacgactggaacctcacatctggttaagtgtgcagagaaggagaagactttctgcgtgaacggaggggaatgcttcatggtcaaggacctgagtaacccctctagatacttgtgtaaatgccaaccaggctttacaggcgctcgttgtactgaaaatgtgccaatgaaagtccagaatcaggaaaaacacagtggtgagccattccccgaggctgaggagctctatcagaagagagtcctgactataaccggcatctgcattgccttactggtggtggggatcatgtgtgtagtcgcctactgcaaaaccaaaaagcagcgcaagaaattgcatgacagattgcggcagagtctccggtcagagcggaataatatgatgaacattgctaacggaccgcatcacccaaatcccccgccagaaaacgtacaactcgtgaatcagtacgtttctaaaaatgtgatttcctctgagcatattgtcgaaagggaggctgaaacctctttttcaacaagtcattatacatcgaccgctcatcactcaaccaccgtcacgcagactccttcccacagttggtctaatggacatacagaaagtatattgagcgagtcccactctgtgatcgtgatgtcgagtgttgagaactcacgccactcatctcccactggaggtcccagaggccggcttaatggcacaggaggtccaagggaatgcaactccttccttaggcacgcgcgggaaactccagacagttaccgagacagcccccactctgagcgctacgtatccgctatgacaacgcccgcccgaatgagcccggtggactttcatactcctagttctccaaaatcgcctccatctgaaatgtctcctcccgtatcaagtatgaccgtttccatgccgtcaatggctgtgtccccttttatggaggaggaaaggccattgctcctggtcacgcctccccgcctgagagagaaaaagttcgatcaccatcctcagcaattttccagcttccatcacaatccagctcacgatagcaacagtcttcctgcaagcccattgcgcattgtggaggatgaagagtatgaaactacacaagagtatgaacccgcgcaggaaccggtgaaaaagctggccaattctcgtcgcgctaagaggacgaagcccaacggacacatcgcaaaccgtctggaggtggactcgaacacttcatcccagagttcgaacagcgaatccgagacagaggacgagcgcgtgggagaagacaccccttttctcggcattcagaatcctcttgctgcttcacttgaagcaactccggcctttcgtctggcagatagcaggactaatccggcggggcgcttctctacccaggaggagatccaggctcggctatcatctgtgatagctaatcaggatcctattgcggtgtag

SEQ ID NO: 2703 - DNA, 744 bp, synthetic construct
  misc_feature 1..744: note = source = /note="Description of Artificial Sequence: Synthetic coding sequence"
  source 1..744: mol_type = other DNA
atgtccgaacgtaaagaaggaagaggcaagggaaagggtaagaagaaggagaggggtagtgggaaaaaaccagagtcagcagcaggttcacaaagtcctgcccttccaccgcgcctgaaagagatgaaatcccaagaaagcgccgctggatcaaaactcgtcctgcgctgtgagacatcatccgaatatagcagtctgaggttcaagtggtttaagaacgggaacgaactcaaccggaagaataagccccagaatattaaaatacagaagaagccggggaaatccgagctacgtatcaacaaagcatctctggccgatagcggggaatacatgtgcaaagtgatttctaagctagggaatgattctgccagcgccaacatcactatcgtggagtcgaatgagatcattaccggaatgcccgcatccacagaaggagcatatgtttcctccgagtcccccattagaattagcgtgtcaactgagggagcaaataccagctcaagcacttctacatctaccactggtacttctcatctggtgaaatgcgccgaaaaggaaaagactttctgcgtaaatggcggcgaatgctttatggttaaagatttgtccaacccatcccgctacctttgcaagtgccagccagggtttactggagcaagatgcacagaaaacgtgcccatgaaggtgcagaaccaggaatcagctcaaatgtccctactggtcatagccgcgaagactacatag

SEQ ID NO: 2704 - DNA, 1938 bp, synthetic construct
  misc_feature 1..1938: note = source = /note="Description of Artificial Sequence: Synthetic coding sequence"
  source 1..1938: mol_type = other DNA
atgagcgagagaaaagaaggcagggggaagggaaaagggaagaaaaaagaaaggggctccgggaaaaagcccgaatctgcagccggcagccaatcccccgcactcccgccgcggcttaaggaaatgaagtcacaagaaagtgctgccggtagtaagttggttctacgctgtgagacatcctccgagtactcaagcctgagattcaaatggtttaagaatgggaatgagctgaaccgaaaaaacaaaccccagaacatcaagatacagaaaaagccaggcaagtcagagctgcggatcaacaaggcctccctcgctgactccggtgagtacatgtgcaaggtgatatcaaaactgggtaatgatagcgcctccgctaatataacaatcgttgagagcaacgaaatcatcaccggaatgcccgccagcaccgagggtgcttatgtcagcagtgaaagccccattcgaataagcgtgagcacagagggtgcgaacacatcaagttccacatctacaagcacaacaggcaccagtcatcttgtcaagtgtgcagagaaggaaaaaaccttttgcgtaaatggcggggaatgttttatggtgaaagatttgtctaatccctcacgatatctatgcaagtgccccaatgaatttaccggagataggtgccagaattacgtgatggcctctttctataagcacctggggattgagtttatggaggccgaagaactgtatcagaaaagggtcctgaccattaccggcatatgtattgccctgttggttgtagggattatgtgtgtggtcgcatactgcaaaactaagaagcaaaggaagaagttgcatgaccgacttagacagtctttgagatcagagagaaacaacatgatgaacattgctaacggccctcaccatcccaatcccccgcccgaaaatgttcagctggtcaatcagtacgtttctaagaacgtcatttcatccgagcatattgtcgagagggaggcagagacttccttctctacttcgcactatacgtccaccgcccaccattcgacgaccgtgactcagacaccgagtcacagttggagcaatgggcatactgagtccatcctcagcgagagtcacagtgttatcgtgatgtcgtcagttgaaaattcaaggcactcaagtcccaccggcggcccgagaggacgactgaacggaacgggcggccctagggaatgtaacagtttcttaagacacgctagagagacgccagattcttatagagactctccccactcagagcgttacgtctccgctatgactacacctgcacgcatgagtcctgtcgattttcacaccccaagcagccccaagtcccccccttcagaaatgagtccgccagtgtcttcaatgactgtgtctatgccaagtatggcggtgagcccttttatggaggaagaacgacccctgttgctggtgaccccccccagactacgggagaaaaaatttgaccaccaccctcaacagttctcttctttccaccacaatcccgcccacgactccaactctctgcccgcttcacccctgcgtattgtcgaagacgaggagtacgaaaccactcaggagtatgagcctgcccaggagcccgtgaagaaacttgctaattcacgccgggctaaaaggactaagcctaacggccacatagctaataggttagaggtagattccaataccagctcacagagcagtaactcggagtctgaaacagaggacgaacgcgtgggggaggatactccattcctggggattcagaatccattggccgcaagtctggaggccacacctgctttcaggcttgccgatagcagaaccaaccccgccggcagattcagtacccaggaagaaatccaggcaaggcttagcagcgtgatcgcgaaccaagatccaatagctgtgtag

SEQ ID NO: 2705 - DNA, 1923 bp, synthetic construct
  misc_feature 1..1923: note = source = /note="Description of Artificial Sequence: Synthetic coding sequence"
  source 1..1923: mol_type = other DNA
atgtccgaaaggaaggagggcagaggtaagggaaagggaaagaagaaagaacgaggttccggtaagaagcccgagagtgccgccggctcgcagtcccccgccctgccaccacgcctgaaggaaatgaagtcccaagagtccgctgcgggcagcaagcttgtgctccggtgcgagaccagcagcgaatactcaagccttcgcttcaagtggtttaaaaacgggaatgaactgaaccgcaaaaataaacctcaaaatatcaagattcagaagaagccaggcaagtccgagttaagaatcaacaaagcatcattggctgacagtggagaatacatgtgtaaagtgattagcaagctgggcaacgactccgcctccgcgaacatcactatcgtagagtcaaacgagatcataactggcatgccagcctcgacagagggggcctatgtgtcaagcgagtcaccaatcaggatttctgtcagcactgagggtgccaacacaagtagctctaccagtacctccacgactgggaccagtcacctcgtgaagtgcgccgagaaggagaaaactttctgcgtcaatggcggcgagtgctttatggttaaggatcttagcaacccgtctaggtatctttgtaaatgtcagcccggattcaccggagctcggtgtacagaaaacgtccccatgaaagtacagaaccaagaaaaagctgaggagctataccaaaagcgcgtcctgaccattacagggatctgcattgcactgttagtggttgggattatgtgtgtggtggcttattgcaaaaccaagaagcagaggaaaaaactccatgataggctgcgccagtcattaagatcagagcggaacaacatgatgaatatcgcaaatgggccacaccaccctaatccaccacccgaaaatgtacagctcgtcaatcagtatgtctccaaaaatgtgatctcttccgagcacatagttgagcgagaggccgagacgtccttctcaacttctcactacacgtcaacggcccatcattccacaactgtcacacagaccccctctcactcttggtcgaatggccatacagagtccattctgagcgaatcccactccgtgattgtgatgtcaagcgtggagaactcacgacacagctcccccacgggcggtccccgcggtagactgaacggaaccggaggtcctcgggaatgcaactcatttctgaggcacgcccgcgaaacacccgatagttaccgagacagtccacattcagagcgatacgtcagcgctatgaccacacctgccaggatgagtcccgtggactttcacactcccagctccccaaagtctccaccctctgaaatgtcgccgccagtcagttccatgaccgtttctatgccatcgatggccgtctctccctttatggaagaagaaagaccactcctccttgtcacgcctcccagactgcgggagaagaaattcgatcaccaccctcaacaattcagttcgttccaccacaatccagcccacgattccaactctttaccagcttcgcccctgagaattgtggaagacgaggagtacgagacgacgcaagagtacgagcccgctcaggagccagtaaaaaaattagccaatagccggcgggctaaacggaccaagcccaacggtcacattgccaatagactggaggtcgactccaatacaagttctcaaagctccaactctgagagcgagacagaggacgagcgagtcggcgaagatacccctttccttggcatccagaatccattagccgcctcactcgaagccactcctgcttttaggctggctgacagccgaacaaatcctgccggacggttttcaacacaagaggagattcaggctcggctgtcttctgtgatcgccaaccaggatcccatcgccgtgtag

SEQ ID NO: 2706 - DNA, 1773 bp, synthetic construct
  misc_feature 1..1773: note = source = /note="Description of Artificial Sequence: Synthetic coding sequence"
  source 1..1773: mol_type = other DNA
atggggaaagggcgtgccggcagggtcggaacaactgccttaccccctcggctgaaagagatgaaatcccaagagagcgcagccggctctaaactggtgttgcgctgcgaaacatcctctgagtactccagtctcaggttcaagtggtttaagaatggcaacgaactgaatagaaaaaataaaccccagaacatcaagattcagaagaagcctggcaaaagcgagctacggattaataaggccagcctcgctgattctggggagtatatgtgtaaggtcatctcaaaactgggcaatgattcagcaagcgccaacatcaccatcgtggagagcaacgcaacttccacatctaccaccggcactagtcatctggttaagtgcgccgagaaagagaagaccttctgtgttaacggtggggagtgcttcatggttaaggatctctccaatccctctcgatatctctgtaagtgcccaaacgaattcaccggcgaccgctgtcagaactacgtaatggccagcttttacaagcatcttggaatcgaattcatggaagccgaagagctgtatcagaagagggtcctgactatcacaggaatttgcattgccctccttgtggtggggattatgtgcgtggtggcatactgcaagactaagaaacagcgaaaaaagctgcatgaccgtctccgacagagcttaagaagcgaacgcaacaacatgatgaatatcgccaacggtccgcatcaccccaacccccctccggagaatgtgcagctcgtgaaccagtatgtttccaagaatgtgatatcttcagagcacattgtggaaagggaggccgagaccagttttagtacgtcccattacacaagcaccgcgcatcattctacaacagtgacccagaccccaagtcacagctggtccaatgggcacacagaaagtatcctatccgagtcgcacagcgtcatcgtgatgtccagtgttgagaattcccgacattcttccccgacaggaggtcccagaggcaggctcaatggcactggcggcccgcgagagtgcaactctttcttgagacatgcccgcgaaactccagacagttaccgggactcccctcactctgaacgatacgtaagcgcgatgacaactcctgctcgcatgtcccccgtcgatttccatacacctagtagtcctaagtcccctccctccgaaatgtcccctcccgtgtcctccatgactgtcagcatgcccagcatggctgtaagcccttttatggaggaggagcggccactgctcctggttactccgccacgactacgagagaagaaatttgaccatcacccgcaacagttttcctccttccatcacaacccagcacacgactccaattccctgcctgcctcccccctgcgaatagtcgaggacgaggagtacgagaccactcaggaatacgaaccagcccaggaaccggtgaagaaactcgcgaactcaagaagagcaaagcgaacgaaaccaaacggccacatagccaacagacttgaagtggactctaatacaagttcacagtctagcaatagtgagtcagaaaccgaggacgagcgagtgggggaggacacacccttccttggcatccaaaatcccctggcagccagcctcgaagcgacacctgcatttcgtctggctgattcccgtacaaaccccgccggtcggttcagcacacaggaggaaattcaggccagattgtctagcgtgattgcaaaccaggatcctatcgcggtgtag

SEQ ID NO: 2707 - DNA, 1269 bp, synthetic construct
  misc_feature 1..1269: note = source = /note="Description of Artificial Sequence: Synthetic coding sequence"
  source 1..1269: mol_type = other DNA
atgaggtggcgccgggctccaagaaggtctggacgccccggtcctcgtgcacagaggcctggctcggccgcgcggtcttcgcctcccctgccgcttctgccactgttgctcttgctcgggacagccgccctggcgcctggcgcagccgcaggaaacgaagcagccccggccggcgcctccgtgtgctacagcagccctcctagcgttgggtccgtgcaagaactggcccaacgcgctgcggtcgtgattgaggggaaggtacaccctcagcggaggcagcagggcgcacttgacagaaaggccgccgctgccgccggggaagccggcgcatggggcggcgatcgggaaccccccgccgcaggccctagggcattgggcccccccgccgaggaacccttactggccgcgaatggcaccgtgccatcctggcccacagcgcccgtcccctctgcgggagaacctggagaggaagccccctatcttgtgaaagtacatcaggtctgggccgtgaaggccggaggcctcaagaaagactctctgttgactgtcaggctaggcacatggggacacccagcgtttccatcttgtgggaggcttaaagaagatagcaggtacattttttttatggaacccgatgctaatagtacaagccgggctcccgcggccttccgtgcgtccttcccccccctcgagaccggcaggaatctgaagaaagaagtgagcagggttctgtgcaagcgctgtgcacttcctccgaggctgaaggaaatgaaatcccaggagtccgcagctggttccaagttggtcctccgctgtgaaacaagttccgagtatagttcgctccggttcaaatggtttaagaacgggaacgaactgaataggaagaacaaaccccaaaacataaagatccagaaaaaacccggcaagtcggaactcaggatcaacaaagcttccctggccgacagcggggaatacatgtgtaaggttatctctaaactcggcaatgactctgcttctgccaatataacaatcgttgaatccaatgcgacatcaacgtcaacaacaggcacctctcacctggtgaaatgcgcggaaaaagaaaagacattctgcgttaatggcggcgaatgctttatggtcaaagatctgtctaacccctccaggtatctgtgtaagtgtccaaatgagtttacaggtgatagatgccagaactatgttatggcctctttctattctacctctaccccctttctttcactgccggaatag

SEQ ID NO: 2708 - DNA, 891 bp, synthetic construct
  misc_feature 1..891: note = source = /note="Description of Artificial Sequence: Synthetic coding sequence"
  source 1..891: mol_type = other DNA
atggaaatatattcaccagacatgagcgaagtagcagccgaaagaagtagcagtccctctacgcagctaagcgccgaccccagcctggacgggctcccggctgcggaggatatgcctgaaccccaaaccgaggacggacgcacccccggactggttgggctggccgtgccttgctgcgcttgtttagaagcggaacgcctgcggggctgtctcaatagtgagaaaatttgcattgtgcctatcttggcctgtttggtaagcctctgcttgtgcattgccggcctgaaatgggtctttgtggacaagatatttgagtatgacagtccaacacacttagatccgggcggattagggcaggatcctattatctcactggacgcaactgctgcctccgccgtctgggtgtctagcgaagcttatacaagccccgtttctagagcccagagtgaatccgaagtgcaggtgactgttcagggggataaagctgtggtgtcattcgagccttctgccgcccctacacccaaaaataggatatttgccttcagctttcttccttccactgccccatcctttccttcacctacacggaaccccgaggttcgaacacctaagtcggcaactcagccacagacgacagaaaccaatttgcagacggcacctaagctcagcactagcacctctacgactggcacctcacatttggttaagtgtgcagaaaaggagaaaactttctgcgtgaatggaggggagtgttttatggtcaaggatctgtctaatccaagccgatacctgtgcaagtgcccgaatgaattcaccggggataggtgtcagaattatgtgatggcaagcttttacagtacttcaactcctttcctgtctctccccgagtag

SEQ ID NO: 2709 - DNA, 1389 bp, synthetic construct
  misc_feature 1..1389: note = source = /note="Description of Artificial Sequence: Synthetic coding sequence"
  source 1..1389: mol_type = other DNA
atgtccgaacgcaaagagggccgtgggaagggaaaaggaaagaaaaaagagagggggagtggtaagaagccagagtccgccgccgggtcacagagccccgcccttcccccgcggctgaaggaaatgaagtctcaggagtcggcggccggttcaaagctagtgttacgttgcgagacttcgagcgagtactcctcactgaggttcaaatggttcaagaacggaaatgaactcaatcgtaagaataaacctcagaacattaagattcagaagaagcctggaaaatccgagctgcggataaataaggcctcgctcgcagactcaggagagtacatgtgcaaagtgatcagtaagcttgggaatgactctgccagcgctaatataacaatcgttgaaagtaacgagataatcaccggaatgcctgcctccacagagggcgcatatgttagttcagaaagccctattagaattagcgtgagtacagaaggtgcgaacacttcaagctcaacaagtacgagtactaccggtacaagccatttagtaaagtgcgccgagaaggaaaaaactttctgcgtcaacggcggcgaatgtttcatggtcaaggacctgagtaacccaagtcgctacctgtgtaagtgtcagcctggtttcactggtgcacgctgcacagagaacgtacctatgaaggtccagaatcaggaaaaagccgaggaactttatcagaagagagtattgacgatcactggtatctgtatcgcactcttagtcgtagggatcatgtgcgtggtggcgtattgtaaaactaagaaacagagaaaaaaactccatgacaggctgagacagtcgctgaggtccgagcggaataacatgatgaatattgctaacggccctcaccatcccaaccctccacctgaaaacgttcagctggtgaatcaatacgtctctaaaaatgtgataagcagcgaacatatcgtagagcgggaagctgagacctcattcagtactagtcactataccagtaccgctcaccattcaacaactgtgactcagaccccctcacatagctggtcaaacggtcatactgagagtatcctgtccgagagtcacagcgtgattgtaatgtctagcgttgagaactccagacactccagtcctactggcgggccacgaggacggcttaacggtacggggggcccacgggagtgcaattcttttctgcgtcacgctagagaaacgccagactcttaccgggatagcccccactccgagagacacaatctcattgccgagctgcgtcgcaacaaagcacatcggagcaagtgcatgcagattcaactgtccgccacacacttgcgctcgtcgagcataccgcacttgggcttcatcctatag

SEQ ID NO: 2710 - DNA, 1452 bp, synthetic construct
  misc_feature 1..1452: note = source = /note="Description of Artificial Sequence: Synthetic coding sequence"
  source 1..1452: mol_type = other DNA
atgcaaatacccaaacacattagcatagaggacataaccgcaacgtccacaagtaccacaggcacttcccacttggtcaaatgcgcagaaaaagaaaagaccttctgtgtgaatggaggggagtgcttcatggttaaggacttaagtaaccccagtcggtacttgtgcaagtgcccaaacgagtttactggggataggtgccagaattacgttatggcctcattttacaaggcagaagaattgtatcagaaacgggtgctcacgatcaccggcatttgtatcgcgttgttggtggtcgggataatgtgtgtcgtagcatattgcaagactaaaaagcagcggaagaagttacacgatcgtttgaggcaaagcctgagaagtgagcggaacaacatgatgaacatcgccaacggtccacaccatcccaacccgccgcccgaaaacgtccagctggtgaaccaatatgtgtctaagaatgttatcagctccgaacacatagtagagcgggaggcggagacaagtttctccacgagccactacaccagtacagcacatcacagcacaaccgttactcagacaccctcgcattcttggtcgaacggtcatacagaatctattctctcagagagtcatagcgtgatcgtaatgtcctccgtggagaatagccgtcatagttctccgactgggggcccccgcggacggctaaatggtaccggtggcccacgtgagtgcaactcatttttaagacatgcaagggaaacacctgatagctatagggactcccctcactccgaacgctatgtttcagccatgacaacgccagcccgaatgagccccgtggacttccatactccatcctcaccaaagtcaccgcccagtgagatgagtcctcccgtgtcatccatgacagtgtccatgccgtccatggccgtgtccccgttcatggaggaggagcgtcctttactattagtcacccccccccgtttacgggaaaagaaattcgaccatcaccctcaacagttcagcagttttcaccacaatcccgcacacgacagcaattcacttcctgcatccccactgcgaatcgtggaagatgaagagtatgaaaccacccaggaatatgaaccagcacaggaacctgttaagaaactcgcgaactcccggcgggcaaagagaacaaaaccgaacggacacatcgctaaccgactagaagttgacagcaatacctctagccagagcagcaattctgagagtgagacagaagatgagagggtgggtgaggacacaccattcctggggattcaaaatcccctcgcggcatccctggaagccaccccggcctttcggctggccgatagccgaaccaacccggccggaagattctcgacccaggaggaaatacaggcaagactgtcctcagtgattgcaaaccaagaccctatcgcggtgtag

SEQ ID NO: 2711 - DNA, 1263 bp, synthetic construct
  misc_feature 1..1263: note = source = /note="Description of Artificial Sequence: Synthetic coding sequence"
  source 1..1263: mol_type = other DNA
atgagcgaacggaaggagggcaggggaaagggaaagggcaaaaagaaggagcgtggtagcggcaagaaaccggaatcagcagccggttcccagagccccgccttaccacctcggctgaaagaaatgaagtcccaggagtcggcagcgggtagtaagcttgtgctgcgatgcgaaacatcaagcgaatatagttcccttcggtttaagtggttcaagaatggcaacgaactgaacaggaaaaacaaaccccagaatatcaaaatacaaaagaaaccgggtaagtcagagcttcgcatcaacaaggcatctctggctgattctggcgagtatatgtgtaaagtgattagtaagttggggaacgactcagccagcgcaaacataactatcgtggagtctaacgagatcatcacaggcatgcctgcgtctactgagggtgcatacgtgtcctcggagagtcctatccgtatctcagtgtctactgagggggccaacaccagtagttcaacctcaacaagcaccaccggcacatcccatttagtgaaatgcgctgagaaagaaaaaacgttctgcgtgaacggtggcgagtgctttatggtaaaagatctgtctaacccatcccggtacctatgtaagtgcccaaacgagttcaccggcgataggtgccaaaactacgtgatggcttccttttataaggccgaagagctgtatcagaagcgcgttcttacaatcacagggatttgtatcgcgctgcttgtggtaggaatcatgtgcgtggtggcttactgcaaaaccaagaaacagcggaagaaattgcatgatagactgagacagtccctgaggtccgagcggaacaacatgatgaacattgccaacggaccacaccacccaaacccgccccctgagaacgtgcaactcgttaaccagtacgtgtctaaaaacgtcatttctagcgaacatatcgtcgagagggaggcggaaacatcattttccacgtcacactataccagtaccgcacaccattcaacgaccgtgacacagacacctagtcatagctggagcaacggccatacagagtcgattctaagcgagagtcattctgtgatcgtgatgtcatccgtggagaactcacgacattcctcgcctacaggaggacccaggggtagacttaatgggacgggggggcccagagagtgtaattccttcctaagacatgcaagagagacaccggactcctatagagatagcccccactccgaaagatag

SEQ ID NO: 2712 - DNA, 1065 bp, synthetic construct
  misc_feature 1..1065: note = source = /note="Description of Artificial Sequence: Synthetic coding sequence"
  source 1..1065: mol_type = other DNA
atgttgtttaatctgaggattttgcttaataacgccgcctttcgcaatggccacaatttcatggtacggaattttcggtgtggacaacccctgcagaacaaagtccagcttaagggccgcgacctgttaacgctgaaaaacttcacaggggaagagattaagtatatgctgtggctcagcgccgatctgaagtttcgaattaagcagaagggtgaatatttgccccttttacagggcaagtctctgggtatgatcttcgagaagaggtccacacgcacacgcctctctacggagaccggatttgctttgcttggcggtcatccttgcttcctgaccactcaggacatccacctcggagtcaatgaatcattgaccgatacagcacgggtgctgagctctatggccgacgccgtcctagcccgggtttataaacagtccgatcttgataccctggcaaaagaggcatcaatccccatcatcaatggcctgtccgatctgtaccacccaatacagattctcgcagactatctcactctccaagagcattactcgagtctaaaaggtttgaccctgagttggatcggggacgggaataacatcctgcattctattatgatgagtgctgcgaaatttgggatgcatcttcaggctgccacccccaagggctatgaacctgacgcctctgtaaccaagctcgccgaacagtacgcaaaggagaacggcaccaaactgctgttaactaacgatccacttgaagctgcccatggaggaaatgtactcattacagacacctggatttcaatgggacaagaggaggagaaaaagaaacggctccaggcctttcaagggtatcaagtaacaatgaaaaccgctaaggtagcggcgtctgactggacattcctgcactgccttcccaggaagccagaggaggtcgacgatgaggtgttctactcgccacggagtcttgtgttcccagaggccgagaataggaaatggacaatcatggcggttatggtgtccctccttacagactattctccacagttgcagaagcctaaattctag

SEQ ID NO: 2713 - DNA, 348 bp, synthetic construct
  misc_feature 1..348: note = source = /note="Description of Artificial Sequence: Synthetic coding sequence"
  source 1..348: mol_type = other DNA
atgatccctgccaaggatatggctaaggtcatgatcgttatgctggctatttgcttcctgacaaagtctgatgggaaaagcgtcaaaaagcgcagtgtaagtgaaattcagctaatgcataatctggggaaacatcttaattccatggagcgcgtcgagtggctgaggaaaaaattgcaagatgtgcataattttgtcgccctcggcgctcctctggcacccagagatgctggatctcagcggccacgcaaaaaagaggacaatgtgctggtcgaaagccatgaaaagtcattgggtgaagccgacaaagccgatgttaatgtgctgacaaaggcaaaaagccaatag

SEQ ID NO: 2714 - DNA, 348 bp, synthetic construct
  misc_feature 1..348: note = source = /note="Description of Artificial Sequence: Synthetic coding sequence"
  source 1..348: mol_type = other DNA
atgatacccgcaaaagatatggccaaagtaatgatcgttatgttagctatttgctttttaacaaagagcgatgggaagtcagtcaaaaagcgctctgtgagtgagattcagttgatgcacaatctcggcaagcaccttaactcaatggagcgagtagagtggttgaggaagaagctgcaggacgtccacaacttcgtcgccctaggggccccactggccccccgtgatgccggttctcagcggccccggaaaaaagaggataatgtgctagtcgagagccatgaaaaatctttaggcgaggcagataaagcggacgtgaacgtcctgacaaaggcgaagtcgcagtag

SEQ ID NO: 2715 - DNA, 354 bp, synthetic construct
  misc_feature 1..354: note = source = /note="Description of Artificial Sequence: Synthetic coding sequence"
  source 1..354: mol_type = other DNA
atgtcaacggcagtcctcgagaatcccggccttgggcggaaactcagtgactttggacaggagaccagctacatagaagataactgtaatcagaatggggcaatttccctaatcttcagtctgaaagaggaagtgggcgctttagcaaaggtgttgagactattcgaagaaaatgatgtgaacctgactcacattgagtctcgaccgagcagattgaagaaggatgagtacgaattttttactcatctcgataagcggtccctgccagctctgactaacattatcaagatactccgacacgatatcggcgcaaccgtccacgaactcagtcgcgataaaaagaaggatacttag

SEQ ID NO: 2716 - DNA, 411 bp, synthetic construct
  misc_feature 1..411: note = source = /note="Description of Artificial Sequence: Synthetic coding sequence"
  source 1..411: mol_type = other DNA
atgtccaccgcagtgctggagaatcccggtttgggccgtaagctgtctgacttcggacaggagacctcttatatcgaagataattgtaatcaaaacggcgcgatcagcctcattttttctctgaaggaggaggtgggagccttggccaaagtgcttagactattcgaagaaaatgatgttaacctcacccatattgagagcaggccctcacgactcaagaaggatgaatacgagttcttcacacatttagacaagagaagcctacccgctctgactaacatcatcaagatcctccgccacgatataggtgccaccgtccatgaactgagtcgagacaagaaaaaagatactgtgccatggtttccacgcaccatccaagaactcgaccggttcgccaaccagatcctctag

SEQ ID NO: 2717 - DNA, 1359 bp, synthetic construct
  misc_feature 1..1359: note = source = /note="Description of Artificial Sequence: Synthetic coding sequence"
  source 1..1359: mol_type = other DNA
atgagtaccgctgtgcttgaaaatcccggacttgggaggaagctctccgacttcggtcaagaaaccagttatatagaggacaattgtaaccagaacggggcaatctccttaatcttcagccttaaggaggaggtgggagctctggccaaggtcctgcggctgttcgaggaaaatgatgtaaacttgacccatattgagtctcgaccaagcaggttaaagaaggatgaatatgaattctttacacatctggataagcggagtctccccgctttaaccaacataatcaaaatattacggcatgatataggagctaccgtgcacgaactttctcgtgacaaaaaaaaggataccgttccttggtttccaagaaccattcaggagctggatcgcttcgcaaatcagattttgtcatacggtgccgagctcgacgcagaccaccccgggtttaaagatccagtttatagagccagacgaaagcaattcgctgacatcgcttataattaccggcacggacagccgattcccagagtcgagtatatggaggaggagaagaagacctggggaaccgttttcaagactctaaagagcttgtacaaaacccacgcttgctacgaatataatcacatcttccccctgttggagaagtactgcggtttccacgaggataatatcccccagttagaagacgtgagtcagtttctgcagacttgtacgggtttccgcctgcgccctgtagctggactgctgtcatctagggacttcctcggaggccttgcgtttcgtgtctttcactgtacccagtatatcagacatggcagcaagcccatgtacactccagaacccgacatctgccacgaactcctcggccatgtacccctgttctctgatagatcattcgcgcagtttagccaggaaattggtctggcttcactgggggccccggacgaatatattgagaagctggcgacaatctactggttcactgtggaattcggcctgtgcaaacagggcgattcaattaaggcctatggcgccggccttctttcttctttcggggaactgcagtattgcctcagtgagaagcccaaattgctcccattggagctggaaaagactgccatccagaattacactgtgactgagttccagccgctgtattatgtggcagagtcattcaatgatgctaaagagaaggttcggaacttcgccgcaacaattcctagaccttttagtgtgagatatgacccttacactcaacggatcgaagttttggacaacacccagcagctgaagatcctcgccgacagtattaactcggagattggcatcctctgctctgccctgcagaaaatcaaatag

SEQ ID NO: 2718 - DNA, 3261 bp, synthetic construct
  misc_feature 1..3261: note = source = /note="Description of Artificial Sequence: Synthetic coding sequence"
  source 1..3261: mol_type = other DNA
atggcttgcagcccggatgccgtcgtgagcccttcaagtgcattcctccgcagcggaagcgtctacgagccgctgaagtctattaacctgcctcgccccgataatgagaccctatgggataagttggatcattattataggatcgtgaaaagtaccctgctcctataccagagtcctactacaggcctcttccccacgaagacatgtgggggagatcagaaagcaaaaatacaagactctctgtattgcgccgcaggggcgtgggcactcgcactggcctacagaaggatcgacgatgataaaggtcggactcacgagctggaacatagtgcgatcaaatgcatgagaggtattctttattgttacatgcgacaggcagataaagttcagcagtttaaacaagatcctagacctaccacatgtcttcattcagtattcaatgtccacacaggcgacgagctcctcagctacgaggagtatggccatctgcagattaacgccgtgagcctctatctcctatatctggtggagatgatctcatccggcctccaaatcatctacaacacagacgaggtcagttttatccaaaacctggtgttttgcgtggagcgtgtgtaccgggttcccgattttggggtgtgggagcgcggcagcaagtacaataacggcagcacagagctgcacagttcctcagtggggttggccaaagcagctctcgaagctatcaacgggtttaatctttttggaaaccaagggtgcagttggtcagtcatcttcgtggacttggacgcacacaatagaaatagacagacactctgcagcttactgcctcgcgagtcacgctcccacaataccgatgccgctttactgccttgcatcagttacccggccttcgctcttgacgatgaggtgctcttcagccaaactctggacaaggtcgttcgaaaacttaagggtaaatatggctttaagagattcctgcgagatggctacaggacttcactggaggatcctaaccggtgttactacaagcctgctgagataaaattatttgacgggattgaatgtgagtttcctattttttttctgtacatgatgatagacggggtgttccggggtaaccccaagcaagtgcaagaatatcaagacctgctgactccagtgctgcaccacaccactgagggatatcctgtagtccccaagtactactatgtccccgctgacttcgttgaatacgagaaaaataacccagggagtcaaaaacgcttcccgtcaaattgtggaagggacggcaagctgtttttatggggccaggctctctatatcatcgctaagttgctagcagatgagctgataagtccgaaggacatcgacccggtgcaaaggtacgtcccactgaaagatcagagaaatgtgagcatgagattcagcaaccaggggcctctggagaacgatctggttgtccatgtagctctgatcgctgaaagtcagaggctgcaagtttttctcaacacttatggcattcaaacacagacaccgcagcaggtggagcccattcagatatggccacaacaggaacttgttaaggcttacttacagttaggcataaacgaaaagctcggcttatcaggcaggcccgaccgacctatcgggtgcctgggtacgagcaagatatatcggattttgggaaaaacagtcgtgtgttacccaatcatttttgatctcagcgatttttacatgtcacaggacgtgttcctgttgatcgacgacatcaaaaatgcccttcagttcataaaacagtactggaagatgcacgggaggccactctttctagtcttgattcgtgaggataatatccgtggctctaggtttaaccccattctggacatgctggcagctctcaagaagggcatcataggaggcgtgaaagttcacgttgaccgactgcagaccctgatttctggggccgtcgtggaacaactggatttcctgcgaatatctgatacagaagagctcccggaattcaagtcgtttgaagaattggaaccccctaaacacagtaaggtgaagaggcagtcatccactccatcagcccccgaactgggacagcaaccggacgtcaatattagtgagtggaaggataagcctacccatgaaatccttcagaaattgaacgattgtagctgcctggcatcccaggctattctgttaggcatactcctgaaacgggaagggcccaacttcataaccaaggaaggcaccgtcagtgaccacatcgaacgggtttacaggagagccgggtcccagaaactgtggtcagtggtgaggagagccgccagcctgctgagtaaggtggtcgattctcttgctccaagtatcacgaacgtcctggttcagggcaagcaagtgacactgggtgccttcggacatgaagaagaggtcatctccaaccctctttcgcctagggttatacagaacattatctactataaatgcaacactcatgatgagcgtgaggcagtgatccagcaagagcttgtgatacacatcggctggattatttctaataaccctgagctcttttcgggaatgctgaaaattaggatcggctggatcatccatgctatggagtatgaattgcaaatccgcgggggtgacaaacctgcactggacctataccagttgagccccagcgaggttaaacagctcctgcttgacatcctccaaccacagcagaacggcaggtgttggctcaacaggcggcagatcgacggctcccttaataggacccccactgggttctacgacagagtttggcagatactggagagaacacctaatgggatcatagtggcgggtaagcacctgccccagcagccaacactctccgacatgaccatgtacgagatgaatttctccttgttagtagaggataccctcggtaacattgaccaaccgcaatacagacagatcgttgtggagctgctgatggtggtgtcgatcgtcttagaacgtaaccccgagctggaatttcaggataaggtggatctggatcgcttagtaaaggaggccttcaacgaattccagaaagaccagagccgtctcaaggagatcgagaaacaagacgacatgacctctttctacaatacccctccactcgggaagaggggcacatgtagttatttaaccaaagccgtgatgaatttgcttctggagggagaagtgaagccaaacaacgatgacccatgccttatttcctag

SEQ ID NO: 2719 - DNA, 1221 bp, synthetic construct
  misc_feature 1..1221: note = source = /note="Description of Artificial Sequence: Synthetic coding sequence"
  source 1..1221: mol_type = other DNA
atgaccctagatgtcggccccgaagatgagcttcctgactgggcggccgcaaaagagttttaccaaaaatacgacccaaaagacgtgatcgggcggggagtctcttccgtggtgcgacgatgtgtgcatcgggcgacagggcatgaatttgccgtgaaaatcatggaggtaactgcagaaaggctgagcccggagcagctagaagaggtcagagaagctaccagaagagagacacatattctcagacaggtggcaggccaccctcacataatcaccctgatcgactcatatgagagctctagctttatgttcctggtttttgatctgatgagaaaaggggaactatttgattatcttacagagaaggtcgcactgtctgagaaggagactcggagcattatgcgcagcctcttggaggcggtgtcctttcttcatgccaataatatcgttcatcgggatctgaagccagagaacatccttttggacgacaatatgcagattagactcagtgattttggtttctcttgtcatctggaaccaggagagaagctccgcgagttgtgtggcaccccaggatatctagctcccgaaatcctaaaatgttctatggatgaaacccacccagggtatggcaaggaggttgatctctgggcctgcggcgtgatcttgttcacactactggcaggcagtccccctttctggcaccggagacagatactgatgctgcgcatgatcatggaaggacagtaccagttctcaagcccggagtgggacgatcgctcatcgaccgtgaaagatctgatctcaagactgctgcaagtcgacccagaggccagacttacagctgaacaggcactgcagcaccctttcttcgagaggtgtgagggctctcaaccatggaatctgacaccaagacagaggttccgggttgcagtgtggaccgtcctcgccgccggcagagtggcactgtcaacacaccgagtgagacctttgactaagaacgctctgctgcgtgacccttacgcactgaggtcagtgcgccacctgattgacaattgcgcatttaggctgtacggccattgggtcaaaaagggggagcagcagaacagagccgctctgtttcagcacagaccccctggaccctttcccataatggggccggaggaggaaggcgacagtgccgcaatcacggaagatgaggccgtgctggtcctgggctag

SEQ ID NO: 2720 - DNA, 3708 bp, synthetic construct
  misc_feature 1..3708: note = source = /note="Description of Artificial Sequence: Synthetic coding sequence"
  source 1..3708: mol_type = other DNA
atgaggagtcgcagcaattccggggtgcgactcgacggttatgcacgcttggtgcaacaaactatcctttgctatcagaaccccgtgaccggcttgctgtcggcctctcacgagcagaaggatgcatgggtacgtgacaacatttattctatactggcggtttggggtttgggcatggcgtatagaaaaaatgccgaccgggacgaggacaaagcgaaagcctacgagctcgagcaaaatgtcgtcaaactcatgagaggactgctgcagtgtatgatgcgacaggtggcaaaggtagaaaaattcaagcatacccaatctactaaggactccctgcacgctaagtacaacacggctacgtgcggaaccgtcgtgggagatgatcagtgggggcaccttcaggtcgacgctaccagcctctttctcctatttttggcccagatgactgcctctgggttacgcattatattcactctggatgaggttgctttcatccagaatcttgtcttctatatcgaggctgcctataaggtggccgactacggaatgtgggagcgcggagacaagacaaaccagggcattccagaactcaatgcttctagtgtaggcatggccaaggcagctctagaggccattgatgagctggatttattcggcgctcatggcgggcgcaagtcagtcattcacgttctccctgacgaggtcgagcattgtcagagcatcctcttctcaatgttaccacgagccagtacctctaaagagatcgacgccgggctgttgagtataattagctttcctgcttttgccgtggaggatgtgaatctcgtcaatgtgaccaagaacgagattatttccaaattgcagggaaggtatggttgctgcagatttctgcgagatggctacaaaacacctagagaggatcctaaccgtctgcactacgatcctgccgaactcaagctgttcgagaatatcgaatgcgaatggcccgttttttggacctacttcataatcgatggagttttttcaggggacgcagtgcaggtccaagagtatcgggaggctttggaaggcatcctgattcgagggaagaatgggatccgattggtcccggaattgtacgccgtgccacccaacaaagttgatgaagaatacaaaaatccgcataccgtggatcgcgtccctatgggaaaagtaccccacctatgggggcagagtctgtacattctgagttcccttctggctgagggattcctggccgctggtgagatcgatccccttaaccgccggttttccacctccgttaagccagatgtcgtcgtccaggtcacggtgttggcggaaaacaaccacatcaaggatctgcttcgaaaacatggcgtgaacgtgcagtctatcgccgatatccatcccatccaggttcagcctggacgcatcctgagccatatttacgcgaagcttgggcgcaataaaaacatgaacctgagcggtcgtccatatcgacacatcggtgtgctgggcacttctaagttgtatgtgatccgcaaccagattttcacgttcacaccccagttcactgaccaacaccacttctatctggccctggacaacgaaatgattgtggagatgctgcgtatcgagctagcgtatctgtgcacttgctggcgcatgaccgggaggccaactctcaccttccctatcagtcgtacgatgctaacaaacgatggctctgatattcacagtgcggtcctcagcacaatacggaaactggaggatggctattttggcggggcccgtgtgaagctgggaaacctgtcggagttcttgactacaagtttctatacctacctgacttttctagaccctgattgcgacgagaagctatttgacaatgcgagcgagggtacattctctcctgacagtgattcagacctcgtggggtatctagaagatacctgtaaccaggaatcccaggatgaactggatcattatatcaaccacctccttcagtctacaagcctgcgcagttacctgccccccctgtgcaaaaacaccgaggaccgtcacgtcttttcagctattcactccacacgcgatattctgtccgtcatggccaaagccaagggtctggaagtgccatttgttccaatgaccttgcctaccaaagtactttctgcccatcggaagtctctgaatctggtggattcaccacagccacttctggaaaaagtgcccgaaagtgattttcaatggcctagggatgaccacggcgacgtcgactgcgaaaagctcgttgaacagttaaaggattgctctaatctccaggaccaggcggatattctgtacatactatatgttatcaaaggcccaagctgggatacaaaccttagcggtcagcacggggtgactgtccagaatctcctcggtgagctatacggcaaggctgggttgaaccaagaatggggcttaatcagatatatctcgggcctgttacgaaagaaagtcgaggtgttagccgaggcctgtaccgatctgctgagccaccaaaagcaacttaccgtggggctccctcctgaacctcgtgagaagattatttcagcccctctgccccctgaagagcttaccaaattgatttatgaggcgtcaggacaagatatttcaattgctgtgctgacgcaggagatcgtggtgtatctcgccatgtatgtccgcgctcagccgtccctgtttgttgagatgctgcgcttgaggattggtttgatcatccaggtgatggccaccgagcttgctcggtctcttaattgtagtggcgaagaagcgagcgagagtctgatgaacctaagtcctttcgatatgaagaacctgctgcatcacattctcagcggcaaagaatttggggttgagcgatcggtccgaccaattcactcatccacatctagtcccacaatctctattcatgaagtaggccataccggggtgacgaaaaccgagcgctcaggcataaatagactgagatcagaaatgaagcagatgacacggcgcttctccgctgatgagcagttcttctccgtcggccaagcggcctcttcatccgcccatagctctaagtccgcccggtctagcaccccaagtagccctacaggtacctcttcatcagacagcggcggacaccacattgggtggggcgaacgccaagggcagtggttgaggcggcggaggcttgacggagctatcaatcgagttcctgtaggattctaccagagggtctggaagatcttgcagaagtgtcacggcctgagtattgacggctacgtcttaccatcgagtaccacacgggaaatgacccctcacgaaatcaagtttgctgtgcacgttgagtctgtgttgaaccgggtgcctcagcccgaatacagacagttactggttgaagccataatggttctgacactgctatcagatactgaaatgactagtatcggcggtattatccacgtcgatcaaatagtgcagatggccagtcagctctttcttcaagaccaggtgtccattggagccatggataccttggagaaagaccaggccacaggaatatgccactttttctatgattctgctccctccggagcatacggcaccatgacatacttaacgagggcggttgccagctacctgcaagagctgctccctaacagcggctgtcaaatgcagtag

SEQ ID NO: 2721 - DNA, 3261 bp, synthetic construct
  misc_feature 1..3261: note = source = /note="Description of Artificial Sequence: Synthetic coding sequence"
  source 1..3261: mol_type = other DNA
atggcctgttctccagacgccgtggtatcacctagctcagccttccttagatcagggtccgtgtatgagccccttaaatctatcaatttgccacgcccggataacgagaccctttgggacaaactggatcactactaccggattgtcaagtccactcttttactgtaccaaagccctactactggtctcttccccactaaaacttgtggcggcgaccaaaaggcaaagattcaggacagcctatactgcgccgcaggtgcatgggccttggcgctggcctataggcggattgatgacgacaaaggtaggactcacgaacttgaacactcagcgattaaatgcatgcgtggcatcctctactgctatatgagacaggcagacaaggtgcagcagtttaagcaggatccacggccaactacctgcttgcactccgtgttcaatgttcatacaggcgacgagctcctgtcttatgaggaatatggccacctccagataaatgccgtgtccttgtatctgctctacctggtggagatgataagcagcgggctgcaaattatctataacactgacgaagtaagctttatccagaacctagtgttctgcgtggaaagagtctacagagttccagatttcggagtatgggaacgcggaagtaaatataataatggctccaccgagcttcactcctcttctgtagggctagctaaggcggctcttgaagcaatcaatggcttcaatctctttggaaatcaggggtgctcctggtctgtcatttttgtggatctcgatgcccacaaccgcaaccgacagacactctgcagcctcctgccacgagagtctcgatcccataacacggatgcagccttactcccatgtatctcatatcctgcttttgctctggacgacgaggtcctatttagtcagactcttgataaagtggtaaggaagctgaagggaaagtatggatttaagagattcctcagagacggatacaggaccagtctggaagacccgaatcgttgttactataaaccagccgaaattaagctgtttgacggaattgagtgtgaatttccgatctttttcctctacatgatgatcgacggagtttttcgtggcaacccaaagcaggttcaggagtatcaggatctgctcaccccagtgctgcaccacacaacggaaggttatcccgtagtccccaagtactactacgtccctgccgactttgtggagtacgagaaaaataacccagggagtcagaagcgcttcccatctaattgcggccgggacggaaagctgtttctgtgggggcaggcactctacattattgccaagctgctggccgatgaactcatctccccgaaagacatcgatcctgtccagaggtacgtacctctaaaggaccaaagaaacgtctcgatgcgtttttcaaaccagggccctctggagaatgatctggtggtccacgtggcattgatcgccgagtctcagcggctccaagtgtttctcaacacttatggcattcagacacaaacccctcagcaggtagagcctatccagatttggcctcagcaagagcttgtaaaggcctacctgcaactagggattaatgaaaaactgggtctatccggcaggccggaccgcccaattggctgcctcgggacaagtaaaatttatcgaattcttggaaagactgtggtgtgctaccctatcatctttgatctctcagatttctacatgagtcaagacgtgttcctgctgatcgacgatataaagaatgccctgcagttcattaagcagtactggaagatgcatggccgccctttgttccttgttctgattcgcgaggacaacatcagggggtctcggttcaaccctattttggacatgctcgctgcactgaaaaaagggatcattggcggagttaaagtccacgtggatcgtctgcagacgctgatttcaggagccgtcgttgaacagcttgattttctccgaattagcgacacagaggagttgcctgaatttaaatctttcgaagaactggagccccccaaacattccaaagtaaagcgacaatctagtaccccctctgccccggaattgggccagcagcccgatgtaaatatctcagaatggaaggacaagccgacccatgagatactccagaagcttaacgactgttcttgtctggcctctcaggcaatattgctcggcattttactgaaaagagagggcccaaattttatcaccaaggagggaaccgtgagtgaccacattgaacgcgtgtaccggcgggctggaagccagaaactctggagtgttgttcgtagagcagcatcattgctgtccaaggtcgtggatagcctggcccccagcattacgaacgtcctagtgcagggaaagcaggtgaccctcggcgcctttggccatgaggaagaggttataagtaatcccctgtcccctcgggtgattcagaacataatttactataagtgtaacacccacgacgaaagggaggctgtgatccagcaggaactggttattcacattggctggatcatctcaaacaaccctgagctcttctccggaatgctgaaaatccgaatcgggtggataatccacgccatggagtatgaacttcagatcagagggggagataagcctgccctagatctctatcagctatcgcctagcgaggtgaagcagttgcttctggacatccttcaaccacaacaaaacggcagatgttggttaaaccggcgacagatcgatggaagcctaaaccgtactccaactgggttctacgaccgggtgtggcaaattctcgaacgcacgcctaacggcattatagtcgctggcaaacatcttcctcagcagccaacgcttagtgatatgaccatgtatgaaatgaattttagcctgctggtcgaggacacactcggtaacatagaccagccacaataccggcagatcgttgtggaactgttgatggtggtaagcattgtgcttgagaggaatccggagctggagtttcaggataaggtggacttggaccgcctggtgaaagaggccttcaatgagttccagaaagatcagagccgactgaaagagattgagaagcaggacgatatgacctctttctacaacaccccccccttgggcaaacgtggcacttgcagctatcttactaaagccgtgatgaatctgctcctggagggcgaggtgaagccgaacaacgatgacccatgcctgataagctag

SEQ ID NO: 2722 - DNA, 3282 bp, synthetic construct
  misc_feature 1..3282: note = source = /note="Description of Artificial Sequence: Synthetic coding sequence"
  source 1..3282: mol_type = other DNA
atggcgggagcagccgggctgaccgccgaggtctcctggaaagtcttggagaggcgtgctagaaccaaaagatccgggtcggtctacgaaccgctgaagagcattaatctgccccggcccgataacgaaaccctgtgggataagctggatcattactataggatcgtaaagagcacactgctcctttatcaatcacccacaacagggctctttcctacgaaaacgtgcggtggagaccagaaagccaaaattcaagacagcctctactgtgccgcgggtgcatgggcccttgctctcgcctatcggcgtattgacgacgacaaaggaaggacccatgagctggagcactcagccattaaatgcatgcggggcattttatattgttacatgcgccaggcggataaggttcagcaattcaaacaggatcctaggcctacaacttgtctccattcagtcttcaatgttcatacaggggacgaattgctttcctacgaagagtatgggcacctgcagatcaatgccgtgtcattgtatctgctatacttggtggagatgatctcctctggcctgcagatcatatataacacggacgaagtatcttttatccaaaaccttgtcttctgtgttgagcgtgtgtatcgggtgccagactttggggtctgggagagaggatctaaatacaataacggatccaccgagctgcactcctctagtgtaggccttgcgaaggccgcacttgaagcgataaatgggttcaacctgtttggtaaccagggttgctcctggtcagtgatcttcgtggatctggacgcccacaatagaaacaggcagacactgtgcagccttcttccccgtgaatctaggagccacaatacagatgccgccctcctgccttgtatatcctacccagcctttgccttagatgacgaagtattatttagccagactctggataaagttgtaaggaaacttaaaggaaaatacgggttcaaacggttcctgcgcgacggttaccgtacgtcattggaagaccccaatcgttgttactataagcctgcagagattaagctgttcgacgggattgagtgcgaattccccatatttttcctatacatgatgatcgacggcgtgttcaggggtaacccgaagcaagtacaggaatatcaagatctcctgaccccagtcctacatcatacaaccgaaggttaccccgtggtgcccaagtattactatgtgcctgctgatttcgtcgaatatgagaagaataatcccgggtcacagaaaagatttcccagcaactgtggaagagatggcaagctctttctgtggggccaggcactttacatcatagcgaaactgctggcagacgagctgatatctcccaaagacatcgaccctgtgcaaagatacgtaccactgaaagatcagcgcaacgtgtccatgagattctccaatcagggtccgctcgagaacgacctcgtagtacatgtggccttgatcgcggaatcccagcgcttgcaggtgtttctgaacacgtacggaattcagacacagactccacagcaagtggaaccaatccagatctggccccagcaggagctggtgaaagcctacttgcagctgggcatcaacgaaaaactgggcttatcagggcggcccgaccgaccaatcggctgtctgggaaccagcaagatctatcgcatcctgggtaaaactgtggtgtgctatccgatcatctttgatctgtctgacttctacatgtctcaggatgtctttcttttgatcgatgatatcaagaacgcactgcagttcatcaaacaatactggaaaatgcatggcagaccactgttccttgtactcatccgcgaagataacattcgaggatcccggttcaatcctatcctggatatgctggccgcactgaaaaagggaatcatcggaggagtgaaggtgcatgtggacaggctccagacactgatctccggagccgtcgtcgagcagctggacttcctgcggatctctgatactgaggagctccctgagtttaaatctttcgaagagctggagccacctaagcatagcaaagtgaagagacaaagctctaccccttctgcccctgagcttgggcagcagcctgatgtcaacatctccgagtggaaggataagccaactcatgagatactccaaaagctgaacgactgcagctgtctcgcgtcacaggcaatcctactcggtattttactgaagcgggaaggcccaaacttcattacgaaagagggcacggtctcagatcacattgagagagtctatcggcgtgcaggttcccagaaactttggctggccgtgagatatggagcagcgttcactcagaaattctcttcgtccatagccccgcacattactacctttctcgttcacgggaagcaggttaccctgggcgcattcggacacgaagaagaagtcatctcgaaccccctcagcccaagagttatccagaatatcatctattataagtgtaacacacatgacgaacgcgaggccgtgatacagcaggagctcgttattcacattggctggataatatcaaataacccagagctgttttctggtatgctgaaaatccggattggctggatcatacatgcaatggaatacgaactccaaatccgggggggcgataaaccagctctggacctgtaccagctctcccctagtgaagtcaaacagttgctgctggatatactacagccccagcaaaacggcagatgttggctcaataggcgacagattgacggatccctgaacagaaccccaaccggcttttacgaccgcgtgtggcagatcctggagcgcacgcctaatggcattatagtagctggaaagcatctaccacagcagccaactctgagtgatatgaccatgtatgaaatgaatttctcattgcttgtggaagatacactaggaaacattgaccaaccccaataccgacagatcgtagtggagttgctaatggtggtgagcatcgtgttggagcggaatccagagctggagttccaggacaaggtcgacctggatcgactagttaaggaagcgtttaacgagtttcagaaggatcagagtaggctgaaagaaattgagaagcaggatgatatgacatcgttctataatactccaccactcggcaagcggggtacttgtagctatctcacgaaagctgttatgaatttgctgctagaaggagaagtgaaacctaacaatgacgatccctgtttaatttcatag

SEQ ID NO: 2723 - DNA, 3261 bp, synthetic construct
  misc_feature 1..3261: note = source = /note="Description of Artificial Sequence: Synthetic coding sequence"
  source 1..3261: mol_type = other DNA
atggcatgttcacccgatgcagtggtgtctccatccagcgcttttctccggagcggatccgtatatgagccactgaaaagcattaatctgcctcgtcccgacaacgaaaccctgtgggataagttggatcattattaccgaatcgtgaaaagtacactgttattatatcagtccccaaccacagggctcttccctactaagacttgtggaggagaccaaaaggcaaaaattcaggactccctctactgtgcagctggtgcatgggcacttgccttggcctatcgtcgaattgatgacgacaagggcaggacacacgaattggaacacagtgccatcaaatgtatgcgcggtatcctgtactgttatatgaggcaagcagacaaagttcagcagttcaagcaggatcctcggcccacaacctgcctgcattcagtttttaatgtgcacacaggagatgagctgctgtcctatgaggaatatggacacctccagatcaatgctgtgtcgctgtacctgttgtacttagttgaaatgattagctccggcctgcagattatttataatacggatgaagtgtcttttatccagaacctggtgttctgcgtagagcgcgtgtaccgcgtgcctgactttggcgtttgggagcggggatctaaatataacaacggatccactgaattgcatagtagtagtgtgggcttggccaaggcggcgctggaagccatcaacggattcaacctatttgggaaccagggctgcagttggtcggttatatttgtcgatctggatgcccataaccggaatcggcaaacactctgctctctgttgcctagagaatctcgctctcacaataccgatgccgcactgctaccttgcatctcctacccagctttcgccttagatgacgaagtgttattctcacagacacttgataaagtggtccgcaaactcaaagggaaatacggattcaaaaggttcctccgcgatggctacaggactagtttagaggacccaaatcgctgctattataaaccggccgagattaagttatttgacggcattgaatgcgaattccctattttctttttgtacatgatgattgatggcgtgtttcggggaaatccaaagcaggtgcaggagtaccaggacctgctgaccccagtcctacaccacaccactgaaggttacccggtcgtacctaagtattactacgttcccgctgattttgttgaatacgaaaagaacaaccctggatcacaaaagagatttccaagtaactgtggccgagacggcaaacttttcctttggggtcaggctctttacatcatcgccaaactgttagccgatgagctgatcagccccaaggatattgaccctgtgcagcggtacgttccattgaaagatcagaggaacgtgtctatgaggttctcaaatcaaggacctttggaaaacgatttggtggtgcacgtcgcattgatcgctgagagccagaggctgcaggtgtttctgaacacctacggaatccaaacccaaacaccccagcaggtggaaccaatccaaatttggccacagcaggagctggtcaaggcgtacctgcagctgggcatcaacgagaaactgggcctctcgggacggcctgaccgccccattgggtgtctcgggaccagcaaaatttaccggatcctgggaaagaccgtcgtgtgctaccccattattttcgacctctccgacttttacatgtcgcaggacgtgtttctccttattgacgatattaagaatgcactgcagttcattaagcagtactggaagatgcacggtcggccgttgtttctggtgcttatcagggaggataacataagagggagtagatttaatcctatccttgacatgctggctgctctaaagaagggcatcatcggaggcgtcaaagtgcacgttgaccgcttacagactctaatctcgggcgccgtagtggaacagctggattttctgcgcatctcagataccgaagaattacctgagtttaagtccttcgaagaactcgaaccccctaagcattcaaaggtgaagcgccagagcagtaccccatctgcacccgaactcggacagcagcccgatgtgaacatctcagagtggaaggataaacccacacatgagatccttcaaaagctgaacgactgttcttgcttagcatcacaagccatcctgctcggtatattgctgaaacgggaaggtcccaattttataaccaaagagggaaccgtatcggaccatatcgagagagtgtatcggcgcgcaggttcccaaaaactgtggctggcagtcaggtacggagccgccttcacccagaagttctccagtagcatcgcaccccacattaccacttttctcgtccacgggaagcaggtgacactgggtgctttcggccatgaggaggaggtaattagcaatcccctgagcccgcgggtcatccagaatattatctactataagtgtaatacacacgacgaacgtgaagcagtgattcagcaagaattggtcattcacattggatggatcatatcaaacaatccagagctcttcagtgggatgcttaagatccgcattggctggatcatccatgccatggaatatgaactacagatacgggggggcgacaaaccagccctggatctgtatcaactttcaccctccgaagtgaagcagctgctgctcgatatcctgcagccgcaacagaacggtagatgctggctgaataggagacagattgatggatctctgaaccggacacccacggggttctacgatagggtgtggcagattctggagagaaccccaaacgggatcattgtggccggaaaacacctcccgcagcagcctacattgtcagacatgacaatgtacgaaatgaacttttcactcctcgtggaggataccctgggaaacatcgatcaaccgcagtacaggcaaatcgtcgtggagctcctaatggtggtgtccatcgtgctggagaggaatccagagctggaattccaggataaggtggatctcgacagattagtcaaagaagcattcaatgaattccaaaaagatcagagcaggctgaaggagattgagaagcaggacgatatgacgtctttctataatacccctccgctgggtaagagagggacgtgttcttatcttacaaaggccgtcatgaatctcctgctcgagggtgaagtcaagccaaacaatgacgacccctgcctaataagctag

SEQ ID NO: 2724 - DNA, 1221 bp, synthetic construct
  misc_feature 1..1221: note = source = /note="Description of Artificial Sequence: Synthetic coding sequence"
  source 1..1221: mol_type = other DNA
atgaccctcgacgtgggaccagaggatgagcttcctgactgggctgcggccaaggaattttatcagaagtatgacccaaaggatgtaatcggccgcggggtcagcagtgtggtgcggaggtgtgtccatagggccactgggcacgagttcgcggtgaaaatcatggaggttactgctgagcgtctgtctcccgagcagttagaggaggtgagagaagctacgaggagggagacccacatcctgagacaggttgccggtcacccgcatattattaccctgatagattcctacgaatcttctagttttatgtttctggtattcgatctcatgagaaagggcgagctgtttgactatctaaccgagaaagtggccttaagtgagaaggagacccggagcatcatgcggagcctgctcgaggcagtttcattcctgcatgcgaacaatattgtacaccgcgatctgaaaccggagaacattctcctggacgataatatgcaaatccgcctgtctgatttcgggttcagctgccacctggagcccggggagaaactaagagaattatgtggcacaccaggctacttggctcccgaaattctgaagtgctcaatggacgaaacccacccagggtatgggaaagaggtcgatctttgggcctgtggagttatcctcttcactctccttgcaggatcaccccccttctggcatcgacggcagattctgatgctcagaatgattatggaaggccagtatcaattttcttctcctgagtgggacgataggtctagcacagtgaaagatctgataagtcgactgctgcaagtggatcccgaggctcggctaaccgctgaacaggcactacagcatccattcttcgagcggtgtgagggctcccaaccatggaatttgactccgcgtcagcggttccgggtcgcagtgtggacagtcctggcagccgggcgcgtggccttgtcgacacatcgggtgcgacctttaacaaagaacgcactactgcgcgacccttatgccctgagaagcgtgcggcatctcattgataactgcgcatttagactgtatgggcactgggtgaagaagggcgaacagcaaaaccgggcagcattattccagcataggccccccggcccatttccaatcatgggaccagaggaagagggcgacagcgccgcgatcactgaggatgaggctgtgctcgtgttgggctag

SEQ ID NO: 2725 - DNA, 1125 bp, synthetic construct
  misc_feature 1..1125: note = source = /note="Description of Artificial Sequence: Synthetic coding sequence"
  source 1..1125: mol_type = other DNA
atgacactggatgtgggccccgaggacgagctgcctgattgggccgcagcaaaggagttttaccagaaatatgatcctaaagacgtgatcggtcggggcgtgtcatcggtcgtaagacgttgcgtccatcgtgccaccggccacgagttcgccgtgaaaataatggaggtgacagccgagagactgtcaccggagcagctggaagaggttcgcgaggccacgcggagggaaacccatatcctcaggcaggtggcaggacacccgcacatcattaccctgattgactcttatgaatcctccagttttatgttcctggtctttgatcttatgaggaagggcgagctatttgactatctgactgagaaagtagctttgtccgaaaaggagactagaagcatcatgagatcactcctagaggcggtgtcctttctgcatgcaaataatattgttcatagggacttgaaacctgaaaatatcctactggatgacaatatgcagatcaggttatccgactttgggttctcttgtcacctggagcctggcgagaaattgcgcgaactgtgcggcactcccggttacctcgcaccggagatcctgaagtgtagcatggacgaaacgcatcctggatatggtaaagaggtggacctctgggcctgcggggtgatcttattcactctcctggcaggaagtccacctttttggcatagacggcagatcctgatgctgcggatgatcatggaaggccaataccagttttcttcgcccgaatgggacgatcggtctagcacggtcaaggacctaatcagcagacttttgcaggtggatcctgaggccagactcaccgctgagcaagcattacagcaccccttctttgagaggtgcgagggatcccagccatggaacctgaccccccggcagaggttcagagttgcagtctggaccgtgctggcagctggcagggtcgcactgtcgacccatagagtaaggccccttacaaagaatgctctcctgcgggatccctatgctctcaggagtgtgcgacaccttatcgataattgtgccttcaggctgtatggacactggatccgcaagcagtggatcgggaagttaatggcctgcgtgtag

SEQ ID NO: 2726 - DNA, 3999 bp, synthetic construct
  misc_feature 1..3999: note = source = /note="Description of Artificial Sequence: Synthetic coding sequence"
  source 1..3999: mol_type = other DNA
atgcagcaagccccacagccctacgagttcttcagcgaagaaaacagtcctaagtggagaggactgctggtttcggccctgcgaaaggtgcaggagcaggtgcatccaacgctgagcgcaaatgaggagtccctgtactacatcgaggagcttatcttccaacttctgaacaaactgtgtatggcccagccacggaccgtacaggatgtggaggaaagggtgcagaagacattcccacatcctatcgacaagtgggcgattgcagatgcccagagcgctatagaaaagcgaaaacggcgcaaccctctgttgctgcccgttgacaagattcacccgagcctcaaggaagttctgggctacaaagtcgattaccatgtcagcctctacatcgtcgccgtactcgaatatatctcagctgacattttgaaactggcgggaaattatgtgttcaatatacgccactacgaaattagtcaacaggacattaaagtgtcaatgtgtgctgacaaagtactcatggacatgttcgaccaggatgacatcggtcttgtgagtctgtgcgaggacgaaccatcttcctcaggagagctgaactactacgacctggtgcgcaccgagattgccgaggaaaggcagtatctccgcgagctcaacatgatcataaaagtgtttcgcgaagcctttctgtcggatcgcaagttgtttaagccaagtgatatcgagaaaatttttagtaacatcagtgacattcacgaactgacagtgaaactcctagggttgattgaagacactgtagagatgaccgatgaatcatcaccccatccactggctggctcatgttttgaggatctcgcggaggagcaggcattcgatccctacgagacactcagccaagacatattgtctcccgaatttcacgagcatttcaacaaactgatggctcgtcccgccgtggccctgcatttccagtcaatcgccgatggctttaaggaagcagttaggtatgtgctacctcgcctaatgctggtgcccgtgtaccactgctggcattacttcgaacttttgaaacagctaaaggcctgctcagaagaacaagaagaccgtgaatgtctgaaccaagccattaccgctctgatgaacctccaggggtctatggatcgaatttacaaacagtacagccctcggagacggcctggcgatccagtgtgtccgttctatagtcatcagttgcggtcaaagcatctcgccattaagaaaatgaacgaaatccagaaaaatattgatggctgggagggaaaagacatcggacagtgctgcaacgagttcatcatggaaggccctttgacacgaattggagccaaacatgaaagacacatttttctgttcgacggcctgatgattagctgcaagcccaaccacggacagacacgactgcctggctattcctctgccgagtatcgactgaaagagaagttcgtgatgcgcaagatccaaatctgcgataaagaggatacctgtgaacataagcacgcctttgagctggtgtccaaggatgaaaactcaatcatcttcgccgcaaaaagtgccgaggagaagaataactggatggccgctctgatcagcctccattatcggtccaccctcgacaggatgttggattctgtcctgttaaaagaagaaaatgaacaaccactgcgcttgccgagtcccgaggtgtaccgctttgtcgtgaaggactccgaggagaacatcgtttttgaggacaatctacaatccaggtctggcatcccaattatcaaggggggcacggttgtaaagctgattgaacggctgacataccatatgtacgccgatcccaattttgtccggacttttttaaccacatacagaagcttttgtaaacctcaagagctgctttctttgcttatcgaaaggttcgaaattcctgagcccgaaccaaccgacgccgataaactagctatcgagaaaggggagcagcccatcagtgctgatctgaagagattcagaaaagaatacgtgcagcctgttcaactgcgcattctgaacgtctttcgccactgggtagagcatcacttttatgacttcgagagggacctcgagctgttagaacggctcgagagctttattagtagcgtgaggggtaaggcaatgaagaagtgggtggaatccattgcaaagataattaggagaaaaaaacaggcccaggccaatggagtgagccataatattacctttgagtctcctccccccccaattgagtggcacatttcaaagccggggcagttcgaaacgttcgaccttatgaccctgcaccctattgagatcgccagacaactcactctgctggaaagtgacctgtatcgcaaggtacaacctagcgagctggtgggttctgtctggactaaggaagacaaggaaattaatagccctaatctccttaagatgattagacataccacgaacctgactctgtggttcgaaaaatgcatcgtcgaggctgagaacttcgaggagcgggtggccgtcctgtcacgaatcatcgagatcctccaggtgtttcaggacttaaacaacttcaacggcgtgttggaaattgtctccgcggtgaatagtgtgagtgtgtacaggttagatcatacctttgaagcattgcaggaacgaaagcgtaagatactcgatgaggccgtcgaactctcccaggaccattttaagaagtacctggtgaaattgaagagtatcaatcctccgtgcgtgccgttctttggcatctatctgaccaatatccttaaaaccgaggagggcaacaacgacttcttgaagaagaagggcaaagatctgattaacttctctaagagaagaaaggtggccgaaattaccggggagatccagcagtatcagaaccagccatactgtctaaggatagagcctgacatgcgcaggttttttgagaacctgaaccccatggggagcgcttcagagaaggaatttacggactacctgtttaataaatctctggagatcgaacctcgcaattgcaaacagccgccccgttttcccaggaagagcaccttctccttaaaatcccctggcatccgtccaaatacaggcagacatggtagcacctcaggtacactgaggggccacccaacgccgttggagagagagccctgtaaaataagcttttctagaatcgccgaaaccgagctggagagcaccgtcagtgcacctaccagccctaacactccttccacacctccggtgagcgcgtcgagcgacctgagcgtgttcctagatgtcgacttgaacagctcctgcggatctaacagcatttttgctccagtcttgctgcctcattcgaaatccttctttagttcatgcggcagcctgcataaactgtccgaagaacccctgatcccaccgccacttccaccccggaagaaattcgaccacgacgcctccaactccaaaggtaacatgaagtctgacgacgatcctcctgcaatcccgccgagacagcccccaccacctaaagtcaagccccgcgtaccagtgcccaccggggctttcgatggaccactccatagcccacctccgcctccccctcgggacccactccctgacacaccgcctcctgtgcccttgcgccctccagagcacttcatcaattgtccgtttaatctgcagcccccgcccttgggacacttgcaccgcgacagcgactggctccgcgatattagtacatgccccaactcgccctccacaccaccttctactccttcacccagagtgccgcgcaggtgctatgtcctctctagcagccaaaataatctggcccatccccctgcgcctcccgtgccccctaggcagaacagttcgccgcaccttccaaagctgccaccaaaaacatacaaaagagagctgagtcacccccctctgtatcgccttccactgctagagaatgctgaaacaccacaatag

SEQ ID NO: 2727 - DNA, 2442 bp, synthetic construct
  misc_feature 1..2442: note = source = /note="Description of Artificial Sequence: Synthetic coding sequence"
  source 1..2442: mol_type = other DNA
atggcaaaacccctcactgaccaggaaaagcgaagacagatctctattagaggcatcgtcggggtagaaaacgtggctgagctcaagaaatcattcaacaggcacctacacttcacgttggtgaaggaccggaacgtagccactaccagggattactacttcgccttggcccatacggtccgcgaccatttggtgggccgctggataagaacgcagcagcattactacgacaaatgcccaaaactcgggctggatatcgaggaactagaggagatagaggaggatgctggactgggcaatggcggcctaggcagacttgctgcatgctttctcgatagcatggccactcttgggctggccgcgtacgggtacgggatcagatacgaatatggcatctttaatcagaaaatccgcgatggctggcaggtggaagaggccgatgactggcttagatacggcaacccatgggagaagtcacgacccgagttcatgttgcctgtgcatttctacggcaaagtggaacatacaaacactggtacgaagtggattgatacccaggtggtcctggccctcccctatgatacgccagtccccggctatatgaacaatacagtgaatacgatgagactctggtctgctcgcgcacccaatgactttaatctgagggattttaatgttggggactacattcaagccgtacttgatagaaacttggccgaaaacattagccgtgtgttgtatcccaacgacaacttcttcgagggcaaagaactgagattgaagcaggaatattttgtcgtggctgctacattacaggacattatcagaaggtttaaggccagcaagtttggttccacgagaggcgctggtacagtgtttgatgcatttcccgatcaagtggccatccagctgaatgacactcaccctgccctcgccatccccgagctaatgagaatctttgtcgatatcgagaagctgccctggtctaaggcatgggagctcacgcagaagacgtttgcatacactaaccacactgtgctgccagaggcattagaacgctggccggtagatttggtagagaagctgttgccaaggcacttggagatcatatatgagataaatcagaaacacctggatcggattgtcgcactattccctaaggacgtggaccgtttgaggcgaatgtcattgatcgaggaggaaggctcaaagagaattaatatggcccacctctgtattgtgggtagtcacgccgtgaacggcgtcgccaaaatccactcagacatcgtaaagacaaaagtttttaaagacttcagcgagttagagcctgacaaattccagaataagactaacgggataactcctcggcgctggctgttgctgtgtaatccaggcctggcggagctcatcgccgaaaaaatcggagaggattacgtgaaagatctctcgcagctgaccaagctgcattcatttctgggtgatgacgtttttctgcgcgagttggccaaagtcaagcaggagaataaacttaagttttctcaatttttagagaccgagtacaaagtcaagataaaccccagttcgatgttcgatgttcaggtcaagagaatccacgagtacaagaggcagctgctcaattgcctgcacgtcatcacaatgtacaataggataaagaaagaccccaagaaactgttcgtccctaggacggtcattatcggcggtaaggctgctcctggctaccatatggccaagatgattatcaagcttatcacctcagtggcagatgtagtgaataacgaccctatggttggctctaaactcaaagttatcttcctggaaaactatcgggtgagcctagcagagaaggtgatcccagctaccgatctcagcgagcagatttccaccgcagggacagaggccagtgggaccgggaacatgaagtttatgcttaatggcgccctgacaattgggacaatggatggagccaatgtggaaatggcagaggaggcaggagaggagaacctgttcatttttggaatgaggattgatgacgtggcagccctggacaagaagggatatgaggcgaaggaatactatgaggcactgccagagctcaagttggttatcgaccagatcgataatggattcttttcacctaaacagccagatctttttaaggatatcatcaacatgctgttctatcatgaccgatttaaagtattcgctgattacgaagcttacgtgaagtgccaggacaaggtttcacaattatacatgaaccctaaggcgtggaataccatggtattgaagaacatagctgccagcgggaagttctctagcgaccggactatcaaggaatatgcccagaatatttggaatgtcgagccttccgatctgaagatctctctttctaacgaatcaaataaggtaaacggcaactag

SEQ ID NO: 2728 - DNA, 2433 bp, synthetic construct
  misc_feature 1..2433: note = source = /note="Description of Artificial Sequence: Synthetic coding sequence"
  source 1..2433: mol_type = other DNA
atggagcacaaagaggtcgtgttgctgcttctcctgttcttgaagagcggacagggtgagccactggacgactacgtcaacacccagggcgcaagcctgttctccgtgaccaaaaaacaactgggagcaggctctatcgaagagtgtgcagcaaagtgcgaagaggatgaagagtttacctgcagagcattccaataccattccaaagaacagcagtgtgtgattatggcagagaacaggaagagctccattattatacgaatgcgcgatgtagtgttattcgagaagaaggtatacttgtcagagtgcaaaacagggaatggtaagaattacaggggaacaatgtcgaaaacaaaaaatggaatcacctgccagaagtggtcctcgacaagtccccaccgacctagattctctcctgcgactcaccccagcgagggtctcgaggagaattactgccggaatcctgacaatgacccacaaggcccttggtgctatacaacagaccccgagaagcgctacgattattgtgatatcttagagtgtgaagaagaatgcatgcactgtagcggcgaaaattacgacgggaagatctcgaagacaatgtccgggctggagtgccaggcttgggattcccaaagcccccatgctcacggctatattcctagcaagtttcccaacaaaaatctgaaaaaaaactattgccgaaatccggatagagaactgagaccctggtgcttcacgaccgaccccaacaaacgctgggaattatgtgacatccctagatgtacaacaccacctccctcatccgggccgacctaccagtgtcttaaaggaacgggcgaaaactatagaggcaacgtggctgtgaccgtcagcggccacacctgccagcattggagtgcccagactccacacacccataataggacccccgaaaactttccttgcaaaaacttggacgagaactattgcagaaatccagacggcaaaagggccccatggtgccatacaactaactcacaggtcaggtgggagtactgcaaaattccctcctgcgacagctccccagtgtcaacagagcaacttgctcctaccgctccccctgagttgacccccgtcgtgcaagactgctatcacggcgacgggcagagctaccggggcacatccagtacaaccacaaccggtaagaaatgccagtcgtggtcatcaatgacccctcatcggcatcagaaaactcccgaaaattatccgaatgccggcctgaccatgaactattgcaggaatcctgacgcagataagggaccttggtgcttcacgacagacccttctgtgcggtgggagtattgcaacctaaaaaagtgttccggcacagaggcatctgtagtagccccccctcccgtggtcctcctgccagatgtggaaacaccctccgaggaagactgtatgttcgggaatgggaaagggtacaggggtaagagggctactaccgtgacaggaactccgtgccaggactgggctgctcaggagccccataggcattccattttcacacctgagaccaatccacgcgcaggactggagaagaattattgcaggaatcctgacggcgacgtgggtggtccttggtgttataccaccaaccctcggaaactgtatgactactgcgatgttccccagtgcgctgctccttcattcgactgtggaaagccacaagtggagcccaaaaaatgccctggacgcgtggtgggcggttgcgttgcccacccacacagctggccatggcaggtgtcccttagaacccggtttgggatgcacttttgtggaggaacgctgatcagccctgagtgggtcctgacggccgcccactgtctcgagaaaagcccgcggccgagctcctacaaggttatcctcggcgctcaccaggaagtgaatctggaaccacatgtccaggaaatcgaagtgtctagactgtttttagagcccactcgcaaagacatcgccctgctgaagctgtctagtcctgctgtgataaccgacaaagtgatccccgcctgcctcccatccccgaactacgtcgtagcagacaggactgaatgttttatcactggttggggagagacgcagggcacctttggcgccggtctgcttaaggaagcccagttaccggtcatagaaaacaaggtatgtaaccgttacgaatttctgaacgggcgggtgcagtccacagagctttgtgccggtcatctcgctggaggcacagacagttgtcagggtgactctgggggaccactcgtgtgctttgaaaaagataagtacattcttcaaggagtaacgagctggggtttgggatgcgctaggcccaataaacctggggtatatgttagggttagtcgtttcgtgacctggattgagggtgtcatgcggaataactag

SEQ ID NO: 2729 - DNA, 633 bp, synthetic construct
  misc_feature 1..633: note = source = /note="Description of Artificial Sequence: Synthetic coding sequence"
  source 1..633: mol_type = other DNA
cgctttggtatgcacttttgcgggggaaccctgatctcacccgagtgggtattaactgccgcgcactgtctcgagaaaagtccacgaccctctagctataaagtgatcctgggtgctcaccaggaagtgaacctggagccccatgttcaagagatagaggtgtcccgtctttttctggagccgacgaggaaggatattgctcttctgaaactcagttcccccgctgtaattacagacaaggtaattcccgcctgcctgcccagccccaattatgtcgtcgccgaccgcacagagtgttttatcaccggttggggtgagacgcagggcactttcggcgctggactgttgaaggaagcccagttgcccgtgatcgagaacaaggtgtgtaaccgctatgaattcctcaacggcagagtgcagagcaccgaactttgcgccggtcatctggcaggtggaactgattcttgccagggggactccgggggccctctcgtgtgctttgagaaagataagtacatcctgcagggtgtaacgagctggggactcggctgtgccaggccaaataagcctggtgtgtatgtgcgtgtcagtcggttcgttacttggatagagggggtcatgcggaataactag

SEQ ID NO: 2730 - DNA, 411 bp, synthetic construct
  misc_feature 1..411: note = source = /note="Description of Artificial Sequence: Synthetic coding sequence"
  source 1..411: mol_type = other DNA
atggaacacaaagaggttgtgctgctcctgctgctgttccttaaatccggccagggcgagccgctggacgactacgtaaacactcagggcgccagcctcttctcagttaccaaaaaacaactgggggcgggctctattgaggaatgcgccgctaaatgcgaagaggatgaggagttcacttgtcgagcgtttcagtaccattctaaagaacagcaatgtgtgattatggcggagaataggaagtctagcattattatccgaatgcgggacgtcgtcctgtttgagaagaaggtgtacttgtctgaatgtaagaccggcaacggaaaaaactatcgcgggaccatgtctaagacaaaaaatgggattacatgtcagaagtggtcctcgacatcccctcaccgcccacggtag

SEQ ID NO: 2731 - DNA, 945 bp, synthetic construct
  misc_feature 1..945: note = source = /note="Description of Artificial Sequence: Synthetic coding sequence"
  source 1..945: mol_type = other DNA
atggggattggacgctcggaaggggggcggcgaggcgctgccttgggagtactgctggcactgggcgccgcactgctggccgtgggaagtgcaagcgaatacgattatgtctcatttcagtccgacatcggaccttaccagtctggacgcttttacactaagcctccccagtgtgtcgacatccctgccgatctgcgattatgccacaacgttgggtataagaagatggttctgcctaacttgctagagcatgagacaatggctgaagtaaagcagcaggcctcctcctgggtacccctgttgaacaaaaactgtcatgctggaacgcaagttttcctgtgcagcctgttcgcccctgtatgtctggatcggcccatctacccttgtcgttggctgtgtgaggctgtacgggactcctgtgagcccgtcatgcagtttttcggattctactggcccgaaatgctgaagtgtgataagttcccggaaggggatgtgtgtattgcaatgacacctccaaatgcaacagaggcctcgaaaccacaagggacaaccgtctgccccccctgtgacaatgagcttaagagcgaggcgatcatagagcatctctgtgcgtctgaatttgcgctgagaatgaaaattaaggaggtgaagaaggaaaatggagataaaaaaatcgtgccaaaaaagaaaaagccattgaaattaggtccgatcaagaagaaggatcttaagaaattggtactatatttgaaaaatggtgctgattgtccatgtcaccaactggataacctgtcccaccacttcctcataatgggacggaaggttaagtcgcagtacttacttaccgccatccacaaatgggataagaagaataaagaatttaagaacttcatgaagaaaatgaagaatcacgaatgtccaaccttccagtctgtgttcaagtag

SEQ ID NO: 2732 - DNA, 882 bp, synthetic construct
  misc_feature 1..882: note = source = /note="Description of Artificial Sequence: Synthetic coding sequence"
  source 1..882: mol_type = other DNA
atggatgctatgaagaggggcttatgttgcgtactcctgctgtgtggggcggtttttgttagccctagccaggaaattcacgcccgctttcgccgcggggcccgatcttatcaggtaatctgccgggacgaaaagacccagatgatctaccagcagcatcaaagctggctgcggcctgtgctgaggtccaatagagtggagtattgctggtgcaactccgggagagcccaatgtcactctgttcccgtgaagagttgcagcgaacccaggtgtttcaatggcggcacatgccaacaggctctgtatttcagtgacttcgtgtgtcaatgccccgaaggattcgcgggtaaatgttgtgaaatcgataccagggctacgtgttacgaagatcagggaattagctatagaggcacttggagcactgccgagtcaggggctgagtgtacgaattggaattccagcgcgctcgctcaaaaaccttactcggggagaaggccagatgccattcgtttgggcttagggaatcacaattactgcaggaatcccgatagagatagtaagccttggtgctatgtgtttaaagcaggaaaatatagctccgagttttgctctactcccgcctgctccgaagggaacagcgattgttactttgggaatgggagcgcgtatcgcggcacccacagcctcacggaatctggagcctcatgtttgccttggaatagtatgatactgatcggtaaggtgtacaccgcacagaacccaagcgcccaagcactgggactcggaaagcataattattgtcgatgtagaaccggcagatccgtgagcagtcctgccaccgcgtctatgcgcccatgcctcctgtccatcagatctggctag

SEQ ID NO: 2733 - DNA, 1551 bp, synthetic construct
  misc_feature 1..1551: note = source = /note="Description of Artificial Sequence: Synthetic coding sequence"
  source 1..1551: mol_type = other DNA
atggacgccatgaagcggggcctgtgttgcgtattattgttatgtggtgccgtgtttgtgtctcccagtcaggagattcatgcccgctttcggcgaggagcaagatcctaccagggctgctctgagcctcgttgtttcaacggaggcacctgccagcaggccttatacttcagcgacttcgtgtgccagtgtccggagggctttgccgggaagtgttgtgagatcgacactcgcgccacgtgctacgaggaccagggaatctcatatagagggacatggagcacggcagagagcggcgccgagtgcacaaactggaactcttctgcactggcacagaagccctatagcggacgccgccccgacgccatcaggcttggccttggaaaccacaactactgccgtaatccagatagagattccaagccatggtgctatgtgttcaaagccggaaagtatagcagcgaattttgcagcacccctgcatgctcagaaggtaactctgattgttattttggaaacggctcagcctatagaggaacgcacagcttaacggagagcggggcctcatgcctgccctggaacagtatgattttgataggcaaagtgtacactgcacagaatccgtctgctcaggctctgggactgggtaagcataactattgccggaaccctgacggggacgcaaaaccatggtgtcacgtgctcaagaatcggagactcacatgggaatattgcgacgtccccagctgctctacctgcgggctccgccaatacagccagccccagtttcgcataaagggtggtctcttcgctgacattgcttctcacccctggcaagcagccatcttcgccaagcacagaagatctcctggggagagattcctttgtggcgggattctgatcagttcttgctggatcctgtctgccgcccactgcttccaggagagattccctccgcaccacttaaccgttatactaggcaggacctatcgcgtggttcccggagaggaggaacagaagttcgaagtggagaaatatatagtccataaagaattcgatgacgacacctacgacaatgatattgccctgttacagctgaagagcgactcctcccgctgcgcacaggaatcaagtgtagtaaggacagtgtgtcttccccccgcagatctacagcttccagattggactgagtgcgaactcagtggttacggcaagcacgaagccctgagtcccttctactccgagaggttgaaagaggctcatgtgcgcctgtatccctcatctaggtgcacctcgcaacatctcctaaaccgtaccgtgaccgacaacatgctgtgtgccggagatactaggtccggcggccctcaggctaacctccacgacgcatgccaaggggattccggcggcccgttggtgtgccttaatgacgggcgcatgactctggtcggcatcatatcttggggccttgggtgtggccagaaggacgtgccaggcgtctacactaaggtgaccaattacctcgattggattagggacaatatgcgaccatag

SEQ ID NO: 2734 - DNA, 1689 bp, synthetic construct
  misc_feature 1..1689: note = source = /note="Description of Artificial Sequence: Synthetic coding sequence"
  source 1..1689: mol_type = other DNA
atggacgctatgaaaagaggactgtgttgtgtgctactcctctgcggtgccgtctttgtgtcccccagtcaggaaattcacgcccggtttcggcggggggctcgaagctaccaggtcatctgcagggacgaaaagacccagatgatctatcagcagcaccagtcttggctaagacctgtgcttcgtagtaaccgagtggaatattgctggtgcaacagcggcagggcccaatgtcactcagtgcctgtgaagtcctgttcagagccccggtgtttcaacggcggtacttgccaacaagccttgtacttctctgacttcgtatgtcaatgccccgagggcttcgctgggaaatgttgcgaaatcgacactcgagccacctgctacgaggatcaagggatcagctataggggcacctggagcactgccgaatccggcgcagaatgcaccaattggaatagttccgcactggcccagaaaccttattccgggaggaggccggatgcgatcagactgggccttggcaatcataactattgccgcaaccctgaccgcgactccaaaccatggtgctatgtctttaaggcaggcaaatactccagtgaattctgttccacacccgcttgctccgaagggaactctgattgctactttggcaacggctcggcctaccgcggtacacattcactcaccgagagcggcgctagttgtttgccatggaatagtatgattcttattggtaaagtctacacagcccagaaccccagtgctcaggccctgggtctggggaaacacaactactgccggaaccccgatggagacgcaaaaccatggtgccacgtgctcaaaaaccggaggcttacgtgggaatactgcgatgtgccgagctgcagcacatgtggcctgcgccaatattctcagccccagttccgcattaagggtggactgtttgcagatattgcctctcatccctggcaagcagcgatcttcgcaaaacaccggcgatcaccaggggagcgcttcctgtgcggtggcatcttgatatcatcctgttggatcctctccgcagctcattgttttcaggagcgatttccaccccatcatcttaccgtgatcctgggacgcacgtatcgcgtcgtgcccggtgaggaggagcaaaagtttgaagtggagaaatacatcgtgcacaaggagttcgacgatgacacctacgataacgacatagccttgctgcaactgaagtccgacagctcacgctgcgctcaggagtcttccgtcgtgagaaccgtctgcctcccgcccgcggacctgcaattaccagattggactgagtgcgaattgagcgggtatgggaagcacgaggcactctcacccttttactccgagaggctaaaagaagcacacgtccggctttacccctcaagcagatgtacatcccaacacctgttaaatcgcactgtgacagacaacatgctttgtgccggcgacaccaggagcggaggaccccaggccaacctgcacgacgcttgtcagggggacagcggggggcccctggtgtgtctaaatgacggccggatgactctggttggcattatctcctggggcctcggctgcggccagaaggacgtccccggggtatacacaaaagtcacaaactaccttgactggatccgtgacaacatgagaccatag

SEQ ID NO: 2735 - DNA, 1311 bp, synthetic construct
  misc_feature 1..1311: note = source = /note="Description of Artificial Sequence: Synthetic coding sequence"
  source 1..1311: mol_type = other DNA
atggatgccatgaagaggggcctgtgttgcgtccttctcctctgcggcgccgtcttcgtgtccccatcccaagagatccacgcgagattccgtcgaggcgctcgctcgtaccaggtcatttgtcgggatgaaaaaacacagatgatctatcagcagcaccagagttggttacggcccgttctgcgctccaaccgcgtggaatactgctggtgcaatagcgggcgagctcagtgccactctgtccccgtgaaacggaatagcgactgctattttggaaacggctcagcctaccgcggaacgcatagtttaactgagtcaggtgcctcctgcctcccctggaattctatgatcctgatcggtaaggtgtacaccgctcagaatcctagcgcacaggcgcttggtctaggcaagcacaactattgtcggaaccctgatggcgacgctaagccttggtgtcatgtgttgaaaaaccgccggcttacttgggagtactgtgacgtgccatcttgcagcacgtgcggtctgcgtcagtattctcaaccacagttccgcataaaaggcggactgttcgctgacatcgccagtcacccatggcaggcagccatctttgcaaaacatagaagatctcctggagaacgattcctgtgcggcggcatcctgataagtagctgctggatccttagcgccgctcactgctttcaggagagattccccccacaccatcttacagtgattctggggcgaacataccgagtggttccaggcgaagaggagcagaagtttgaggttgaaaagtacattgtgcacaaggaatttgacgatgacacatacgacaacgatatagcgttgcttcagctcaaatctgactcaagccgatgcgcccaggaatcaagtgtggtcaggactgtctgcctcccccccgccgatctacagttacctgactggaccgagtgcgaactttccggttatggcaaacatgaggctctgtctccattctatagcgaacgcctgaaagaagcgcacgtcagactgtacccctccagtcgctgcaccagtcagcacctgctcaaccggacagtgactgataacatgctttgcgctggagatacacgcagcggaggcccccaggccaacctgcacgacgcttgtcagggagactctggggggccactcgtgtgtttgaatgacgggaggatgaccctggtgggcataatatcctggggcctggggtgtggtcagaaggacgtgcctggcgtgtataccaaagtgacgaactacctggattggatccgggataatatgcggccctag

SEQ ID NO: 2736 - DNA, 1500 bp, synthetic construct
  misc_feature 1..1500: note = source = /note="Description of Artificial Sequence: Synthetic coding sequence"
  source 1..1500: mol_type = other DNA
atggatgccatgaaaaggggactgtgttgcgttttattactgtgtggagccgtctttgtgtccccttctcaggagattcacgctcgcttccggcgcggcgcgcggtcatatcaggtgatctgtcgcgatgagaagactcagatgatttaccaacaacatcagtcatggctgaggcccgtgcttcgatcgaacagggtcgagtattgttggtgcaactctggcagggctcagtgccactccgtgcccgtgaagagttgctccgagcctaggtgctttaacggcggcacttgccagcaggccctctatttctctgattttgtctgccagtgtccagagggattcgcgggaaagtgttgcgaaatcgattccaagccatggtgttacgtgtttaaggctggtaagtactcctctgaattctgttcaacacctgcctgttctgaggggaactcagactgctatttcggtaacggcagcgcttatcggggtacacactctcttaccgagagtggcgcttcctgtctcccatggaactccatgatactgatcggcaaggtctatactgctcagaacccttccgcccaggcgttgggacttggaaagcacaactactgcagaaatcccgacggggatgccaagccttggtgtcacgtgctcaagaaccgcagacttacatgggagtactgtgatgtcccaagctgctccacttgcggattacgacagtacagccaaccgcagttcagaataaaaggtggcctgtttgccgacattgcctctcatccctggcaggcggctatcttcgctaagcaccggcgctcacccggggaaaggtttctgtgtggtgggatcctcatctcctcttgctggatcctgtccgccgcacattgtttccaagaacgcttcccaccccaccatctgaccgtaattctcggtcgaacttacagggttgtgcctggtgaggaggagcaaaaattcgaagtggaaaaatacatcgtgcataaggagtttgatgatgatacctatgataatgacattgctctgcttcagctgaagtcagatagttccagatgcgcgcaggagtcaagtgtggtgaggacggtttgtctgccacccgccgaccttcagctgcctgattggacagagtgcgagttgtctggctacggcaagcatgaagctctgtctccattctactcagagcgtttgaaagaagcgcacgtgcgcctctatccgagttcgcggtgcacctctcagcacttgctcaatcgcactgtgactgacaatatgttatgtgccggggacaccaggtccgggggtccccaagccaacctccacgatgcctgccagggcgatagcggcggtcctctggtgtgcctgaacgacggcagaatgacacttgttgggataattagctggggactgggttgtggtcagaaagatgttcccggcgtgtatactaaggtcaccaactacttggactggattcgggacaacatgagaccctag

SEQ ID NO: 2737 - DNA, 537 bp, synthetic construct
  misc_feature 1..537: note = source = /note="Description of Artificial Sequence: Synthetic coding sequence"
  source 1..537: mol_type = other DNA
atggatgcaatgaaacggggtctctgttgtgtcctgttactctgcggggcagtatttgtctcaccatcacaggaaatccacgcgcggtttaggaggggcgctaggtcctatcaggtaatctgtcgcgacgagaaaacacagatgatttaccaacagcaccagagttggttgagaccagtgctccgttcaaatcgtgtcgaatactgttggtgtaacagtggaagggcgcagtgccacagcgtgcccgtcaagtcctgctctgaaccacggtgttttaatggaggaacatgccagcaggccctttacttcagcgactttgtatgccagtgccctgagggtttcgccgggaaatgttgtgaaatcgacacaagagcaacctgttacgaggatcagggcatcagctacagaggtacatggagtactgccgaaagcggagccgaatgtaccaattggaactcctctgccctggcacagaaaccctacagcggtcggcgacctgacgcaatacggctcggcctggggaatcataactactag

SEQ ID NO: 2738 - DNA, 474 bp, synthetic construct
  misc_feature 1..474: note = source = /note="Description of Artificial Sequence: Synthetic coding sequence"
  source 1..474: mol_type = other DNA
atggatgctatgaaaagagggttgtgctgcgttcttctgctctgcggcgctgtgtttgtttccccatcccaagagattcacgcccgattcagacggggcgcccgcagttatcaggtgatatgtcgcgatgagaagacacagatgatctaccaacagcaccaaagttggctacgccctgtactcaggtccaatagggtagagtactgttggtgcaattcaggaagggcacagtgtcacagtgtccctgtcaagagttgttcggaaccacggtgttttaacggtggcacttgccagcaagctctttatttctctgattttgtctgtcagtgtccagagggtttcgcgggcaaatgttgtgaaattgacacgcgggctacatgttatgaagaccaaggcatcagttacagaggtacctggtcaacagccgagagtggcgcggaatgcaccaattggaactcctcagctcttgcgtag

SEQ ID NO: 2739 - DNA, 1422 bp, synthetic construct
  misc_feature 1..1422: note = source = /note="Description of Artificial Sequence: Synthetic coding sequence"
  source 1..1422: mol_type = other DNA
atggacgctatgaaacgcggattgtgttgtgttctcctgctgtgtggcgcagttttcgtgagccctagccaggagatccacgcacggttcaggcggggtgccaggtcataccaagtcatatgtcgcgatgaaaaaacacagatgatttatcagcagcatcagagctggttgagaccagtcctccgatccaatagggtcgaatattgttggtgcaatagcggacgggcacagtgtcatagcgtgcccgtaaagtcatgttctgagccgaggtgctttaacgggggaacatgccagcaggctctttacttcagtgacttcgtttgccagtgccccgagggctttgccgggaagtgctgcgagatcggaaactcggactgttacttcggcaatgggtctgcttatagaggcacacactctctgacagaatcaggggctagctgcttgccatggaattctatgatattgatcggtaaggtctatacggcccagaatccctctgctcaggccttgggcctgggaaagcacaactactgtcggaaccccgacggtgatgcaaaaccatggtgccacgtcttaaagaatcggcgactaacctgggaatattgtgatgtcccctcttgtagtacttgcggcctgagacaatactcacagccccagtttaggattaaaggtggactcttcgccgacattgcatcacatccgtggcaggctgccatatttgcgaagcatagaaggagcccgggggagcgattcctctgcggtgggatactgattagctcttgctggattctgtctgccgcgcactgctttcaagagagatttcctcctcaccatctaacagtcatcctgggcaggacctatagggtcgtgccgggtgaggaggaacaaaagttcgaggtggaaaagtacatcgtgcacaaggagttcgacgacgatacctacgataatgacattgctttactgcaactgaagagcgactcttctaggtgtgctcaggagagcagcgtcgtccgcaccgtgtgtcttccacccgccgaccttcaactgcccgactggactgaatgcgaattgtctgggtatggcaaacacgaggccttatcacccttttattctgaacgcctgaaggaagctcatgttagactgtaccctagctcccgatgcacaagtcagcatctcctgaatcgtacagttactgacaatatgctgtgtgccggagacactcgaagcggaggacctcaggccaacttacacgacgcgtgtcagggagatagtgggggcccattggtgtgtctgaacgacggacggatgactcttgttggaattatcagttgggggctgggttgcgggcagaaagatgtcccgggtgtatacaccaaggtgaccaattatctggattggattcgggataacatgcgcccctag

SEQ ID NO: 2740 - DNA, 1083 bp, synthetic construct
  misc_feature 1..1083: note = source = /note="Description of Artificial Sequence: Synthetic coding sequence"
  source 1..1083: mol_type = other DNA
atggctggacatttagcttctgacttcgcatttagcccaccaccaggcggcgggggcgatgggcctggtggccctgagcctggctgggtggatcctcgaacgtggctgtcattccaggggccacccgggggcccaggaatcggccccggggttggcccaggatcagaagtctggggaattccaccatgtccacctccctatgaattctgcggcggcatggcatactgtggccctcaggttggcgtaggactggtaccacaggggggactcgagaccagtcagccagagggtgaggcgggtgtaggggtggagtcaaactccgacggcgcttcacccgagccatgcaccgtgacccccggtgcagtaaagctagagaaagagaagctggaacaaaatccagaggagtcccaggacatcaaagctctccagaaggaactggagcagttcgctaagcttctcaaacagaaacggataacccttggatacacccaggccgacgtcgggctcacattaggcgtcctatttggaaaagtcttcagccagacgacaatatgccggtttgaggcgctacaattatcttttaagaacatgtgtaagcttcgacccctgctacagaaatgggtagaagaagccgataataacgaaaacctgcaagaaatttgcaaggcggaaaccctggtgcaagccagaaaacggaagcgaacctcaattgagaacagagtgcgaggtaatttagagaatctgtttctacaatgtccaaaaccgaccctgcagcaaatttcccacatcgcccagcagctcggactggagaaagatgtcgtgagagtttggttttgcaatagacgccaaaaagggaagcggagcagttccgattatgcccagagggaagacttcgaagcagccggctctcccttttcaggggggccagtatcatttcctctggcaccaggaccacacttcggcaccccaggttacggctcccctcatttcacggcactttactcaagtgttccatttcctgagggggaagcattcccaccagtgtctgttacaactctggggagtccgatgcactccaattag

SEQ ID NO: 2741 - DNA, 798 bp, synthetic construct
  misc_feature 1..798: note = source = /note="Description of Artificial Sequence: Synthetic coding sequence"
  source 1..798: mol_type = other DNA
atgcacttctaccggctgtttcttggagcaacgagacgctttctaaaccctgagtggaaaggcgagatcgataactggtgcgtctacgttctcacttctctgctgcccttcaagatccaatcgcaggatatcaaagctctgcagaaagaactggaacagttcgcaaaactccttaagcagaaacgcattaccctgggctatactcaagcagatgtgggtctcactctgggggttctgttcggcaaagttttttctcaaaccaccatatgcaggttcgaagctcttcaactctcatttaaaaacatgtgcaagctacgccctctgcttcagaagtgggtcgaggaggccgataacaacgagaacctgcaagagatatgtaaagcagaaaccctcgtgcaggccagaaagagaaagagaactagcattgagaacagggtaaggggtaatttggagaatctgttccttcagtgtcccaaacccactctgcaacagataagtcacattgcacaacagctgggcctggaaaaggacgttgtgcgagtatggttctgtaatcgacgacagaagggaaaacggtcgtcaagcgactatgcacagagggaggacttcgaggccgccggctctcctttcagtggaggaccggtctcttttcccctagctcctggcccacacttcgggactcccggctacgggtctcctcacttcacagccctctatagcagtgtgcctttcccggaaggcgaggcctttccgccagtgagcgtcaccactctgggctccccgatgcactcaaattag

SEQ ID NO: 2742 - DNA, 1083 bp, synthetic construct
  misc_feature 1..1083: note = source = /note="Description of Artificial Sequence: Synthetic coding sequence"
  source 1..1083: mol_type = other DNA
atggctggccacttagccagtgacttcgcattttctccccccccgggagggggaggtgatggacctgggggtcccgaacctggctgggttgaccctcgcacatggctgagttttcaaggcccccctggcggcccaggaattggcccgggtgtggggcctggtagcgaagtatggggtattccgccctgtccacctccttatgagttttgcgggggaatggcatattgtggaccacaagtcggtgtgggcttggtccctcagggggggctggagacttcccagcctgaaggagaagctggcgtgggcgtggagtctaattcagacggcgcctctcctgagccctgtacggtgacgccaggcgccgtgaaactcgagaaagaaaagcttgaacagaatccagaagaatcccaagacattaaagctctccagaaggagctcgagcagttcgcgaaacttctcaagcagaaacgtataactcttggctatacccaggcagatgtaggcttaactctcggagtgctgttcgggaaggtcttcagccagactaccatctgtcgatttgaagcactgcaactctcattcaagaacatgtgtaagctgcgacctctcttgcagaaatgggtagaagaagctgacaataacgagaatctacaagagatttgtaaggctgaaaccttagtgcaggctaggaagaggaaacgcaccagtatcgagaaccgcgtcaggggaaacctcgaaaacctcttcctccaatgccccaagcctacccttcagcagatatcacatatagcccagcagctcgggcttgagaaggacgttgtgcgtgtatggttttgcaaccgccgccagaaaggaaagcgcagcagcagcgattacgcacagcgtgaggactttgaagccgcggggtctccattcagcggtgggccggtgagctttccattggcacccggacctcactttggcaccccaggatacggttcaccgcatttcactgctctgtattcatcagtgccctttcctgaaggcgaggccttccctcccgtgtcagtcacgacactgggttctcctatgcattctaactag

SEQ ID NO: 2743 - DNA, 798 bp, synthetic construct
  misc_feature 1..798: note = source = /note="Description of Artificial Sequence: Synthetic coding sequence"
  source 1..798: mol_type = other DNA
atgcacttctataggctttttctcggagcaacacgacgctttctgaaccctgaatggaagggcgaaatcgacaactggtgcgtatatgtgttgacaagcctgctgcctttcaagattcagtcccaggatattaaggccctgcagaaagagcttgaacaattcgccaagctccttaaacagaagcgtattactctgggatatacacaggctgacgttggccttaccctaggcgtgctgttcggaaaagtgtttagccagaccacaatatgccggtttgaggcactgcagctctcttttaaaaatatgtgtaagttgcgacctctgctgcagaaatgggtggaagaagccgataacaacgagaacctccaggaaatctgcaaagcagagacattggttcaggcccggaagaggaagcgcacatctatcgaaaatcgagtcaggggaaacctcgaaaaccttttcttgcagtgtcctaagcccacactccaacagattagccacatagcacaacagctgggactggagaaggacgtcgtgcgagtctggttctgcaaccggcggcagaaaggcaaaaggtcttcatccgactacgcccaaagggaagacttcgaagccgcaggctctcctttttccggcgggcccgtgagtttcccgcttgccccaggcccgcatttcggaacccccggatacggatcaccgcacttcacagccctgtattcttcagttccttttccagaaggcgaggcatttccgcccgtgagtgtaacaactttggggagccctatgcactccaactag

SEQ ID NO: 2744 - DNA, 798 bp, synthetic construct
  misc_feature 1..798: note = source = /note="Description of Artificial Sequence: Synthetic coding sequence"
  source 1..798: mol_type = other DNA
atgcatttttatcggctgttcctgggggctactcgcaggttcttaaatccggagtggaaaggggagatcgataattggtgtgtatacgttctgaccagcctcctgccattcaaaatccagtcacaagacatcaaggccctccagaaagaactcgagcagttcgcaaagttgttgaagcagaagcgaattacactgggctacactcaggctgacgtcggattaacacttggagtgttgttcggcaaggtgtttagtcagaccacaatctgtagatttgaggccctgcagctgagtttcaaaaacatgtgtaagttacgaccactcctccaaaaatgggttgaagaggccgacaataatgagaacctgcaggagatctgcaaggctgagacgctggtgcaggctcggaagcgtaagcgcaccagcattgagaaccgagtgagaggtaacctggagaacctcttcctccagtgcccaaagccaaccctccagcaaatcagccacatcgctcagcagttagggttggaaaaggacgtggtcagggtatggttttgcaatagacgccagaaaggcaagaggtcttctagcgattacgcccagcgggaggacttcgaagcagccggctcaccattcagcggcggcccagtctccttcccgctcgctcctggcccacactttggcacacctggatacggctcacctcactttactgctctgtactcttcagttcccttccccgagggggaggccttcccacccgtgagcgtgaccactctaggcagtccaatgcattctaattag

SEQ ID NO: 2745 - DNA, 1083 bp, synthetic construct
  misc_feature 1..1083: note = source = /note="Description of Artificial Sequence: Synthetic coding sequence"
  source 1..1083: mol_type = other DNA
atggcagggcaccttgcgagcgattttgctttcagtccgcctcctggcggcggaggcgatggccccgggggacccgagcctggatgggtagatccgcgaacctggctctctttccagggtccccctgggggcccagggatcgggccgggagtgggtccaggttcagaggtctggggtatacccccttgcccacccccgtatgaattttgtggcggtatggcatattgtggcccgcaggtcggcgtggggctggttccccaaggtggcctggaaacttcacagcccgaaggtgaagccggcgtgggcgtcgagagcaatagtgacggcgcaagccccgagccgtgcaccgtcacacctggagcggtcaagttagagaaagagaagctcgagcagaatccggaggagagtcaagacattaaggcactgcagaaggaactggaacagtttgctaagctgttgaaacagaagcgtatcaccctgggctatacgcaagcggatgtggggctcactttgggtgtgctcttcggcaaggtgttttcacagacgactatctgtagatttgaggccctacagctctcgtttaaaaacatgtgcaaactcagacccttgctccagaagtgggtggaagaggctgataacaatgagaacctgcaggagatttgcaaggcagaaactctggtgcaggcgagaaagagaaagcgaaccagtattgaaaaccgggttcgcggaaacttagaaaacttatttctgcagtgccccaaacctactctccagcagatcagtcatattgcccagcagctcggcctcgaaaaagacgtggttagggtgtggttctgtaatcggaggcagaagggtaagcgtagctccagcgactacgcgcagcgcgaggatttcgaggcagcaggatcccccttttcaggcggtcccgtaagctttcctctcgcacccggcccacactttggcactcctgggtacgggtctccacatttcactgctctgtattcgtctgttcccttccctgagggtgaggcgtttcctccggtctctgtgacaacattgggtagtccaatgcactctaattag

SEQ ID NO: 2746 - DNA, 1083 bp, synthetic construct
  misc_feature 1..1083: note = source = /note="Description of Artificial Sequence: Synthetic coding sequence"
  source 1..1083: mol_type = other DNA
atggccggtcacctcgcctccgacttcgctttcagtcccccaccagggggtggaggagacggacccggtggacccgaaccgggatgggtcgatcccagaacttggttgtctttccaaggccccccaggaggccctggaatcgggccaggggtcggaccaggttccgaggtctggggaattcccccatgcccacctccgtacgaattctgtggcggtatggcttattgcgggccacaagttggcgttggactggtgccccaaggggggctggagacatcccaaccagagggcgaagcaggagtaggcgtggaatccaatagtgatggagccagccccgagccatgcactgtgaccccaggcgccgtcaagctggaaaaagagaagctggagcagaacccggaagagtcccaagatatcaaggccttgcagaaagagctggagcaatttgccaagcttctcaagcagaaaagaatcaccctcgggtatactcaggccgacgtaggattgaccctgggagtgctgttcggcaaagttttttctcagactactatttgtcggttcgaggctctgcagctgtcttttaaaaatatgtgtaaactcaggcccctcctccagaagtgggttgaagaggcagacaataacgagaatctgcaggaaatctgcaaggccgagactctcgtccaggctcggaagcgaaaaaggactagcatagagaaccgggtgaggggtaatctggaaaatctttttctgcagtgccccaagcccacactgcagcagatttcacacatcgcacaacagctcggcctagaaaaagacgtcgtcagggtttggttttgtaatcggagacagaaaggtaaacgaagcagcagtgattatgcgcagcgcgaggatttcgaggcagccggctcaccattttcgggggggcctgtgtcattcccactggctcccggcccccacttcggcacccctgggtacgggtcgcctcacttcacagccctttacagttccgtgccattccccgagggggaggccttcccaccagtgtcggtcaccactctgggaagccctatgcactctaactag

SEQ ID NO: 2747 - DNA, 798 bp, synthetic construct
  misc_feature 1..798: note = source = /note="Description of Artificial Sequence: Synthetic coding sequence"
  source 1..798: mol_type = other DNA
atgcacttctatcggctcttcctgggcgctaccaggaggtttctcaatccggagtggaagggcgagatagacaattggtgtgtttacgtcctgacgtcactactcccctttaagattcagagtcaagacatcaaagcgcttcagaaggagcttgagcaatttgccaagctacttaagcagaagcgcatcaccctcggttacacgcaggcagatgttggcctgacgctgggggttttgttcgggaaggtgtttagccagacaaccatttgcagattcgaggctcttcagctctctttcaagaacatgtgcaagcttcgccccctcctgcagaagtgggtggaagaggctgacaataatgagaatctccaggaaatctgcaaggcagagaccctagtgcaagcccggaaaagaaagagaacgtcaatcgagaatagggtccggggaaatctggagaatctgtttctgcagtgcccaaagcctactctgcaacaaatcagccacatcgcacagcagttgggccttgaaaaggacgtggtgcgtgtctggttttgcaatcgtcgccagaaaggtaaaagaagcagctccgactacgcacagcgcgaggattttgaggctgcaggatcccctttcagcggcggacctgtgagcttcccccttgcaccagggccacattttggaactcctggttacgggagtccccacttcactgctctgtattcttctgtgccgtttccagagggagaagcctttccgccagtgtcagtgaccaccctaggcagtcccatgcacagcaattag

SEQ ID NO: 2748 - DNA, 1083 bp, synthetic construct
  misc_feature 1..1083: note = source = /note="Description of Artificial Sequence: Synthetic coding sequence"
  source 1..1083: mol_type = other DNA
atggccggccatctcgcgtccgattttgcctttagccccccgcctggcggtggcggggatggcccaggaggccctgaaccggggtgggtggacccacgtacctggctgagctttcagggacccccagggggaccagggattggtcctggtgtaggtcctggatccgaggtctggggcattcccccttgcccccctccatacgaattttgtggtggtatggcgtactgtggacctcaggtaggagttggtctcgtcccacagggtggactggagacctcccagcctgagggagaagccggcgtgggggttgaatcaaatagcgacggagctagtcctgagccttgtactgtcacacctggcgctgtcaaactggagaaagagaaactggaacagaacccagaagaatcacaggacatcaaagcgctgcaaaaggaattggagcagttcgcaaaattgctcaaacagaaaaggatcacacttggctatacgcaggccgatgtgggcctcacccttggtgtgttgtttggtaaggtatttagccaaaccactatctgtaggtttgaggcactgcagttgtccttcaagaatatgtgcaagctacggcctctgttacagaagtgggtggaagaggcggacaataacgagaatttgcaagagatctgtaaggctgagacactggttcaggcccgcaagaggaaaagaacatcaatcgagaatagggtccggggaaatctggagaacctgtttctgcagtgtcctaaaccaaccctccagcagattagccatatcgcccagcagctcggtctggaaaaggacgtggtgcgtgtctggttttgtaacagaagacagaagggaaaacggagctcatcagactatgcccagagggaagacttcgaggctgccgggtcccctttctcaggcgggcctgtatccttcccactcgctcccggacctcactttggaacccccggctatgggagccctcactttaccgccctgtacagcagcgtcccgttcccagagggcgaggcctttccccctgtttccgtcacaacactagggagccccatgcattctaattag

SEQ ID NO: 2749 - DNA, 369 bp, synthetic construct
  misc_feature 1..369: note = source = /note="Description of Artificial Sequence: Synthetic coding sequence"
  source 1..369: mol_type = other DNA
atggcaggccacctggccagtgatttcgcatttagccctcctcctgggggcgggggcgacggcccaggtgggcccgagccaggttgggttgacccccgcacctggctgtcattccaggggccacccgggggacctgggatcggccctggggtgggacccggctccgaggtatggggtattcccccttgcccacctccgtacgagttttgcggggggatggcatactgcggaccccaagttggagttggcctggtaccacagggcgggctggagacgtcacagccagaaggggaagccggcgggggcgagcagctacggtggggtttgccaggcgctctgcaccggcatccctggtgccgggaagcctag

SEQ ID NO: 2750 - DNA, 798 bp, synthetic construct
  misc_feature 1..798: note = source = /note="Description of Artificial Sequence: Synthetic coding sequence"
  source 1..798: mol_type = other DNA
atgcatttttatcgattgttcctgggagcgactcggcgatttctcaacccagaatggaagggcgagattgacaactggtgtgtgtatgtgctgactagtttgcttccattcaagatccagtcacaggatataaaggcccttcagaaggagctggaacagttcgccaagttactcaagcagaaacgaatcactttaggttatactcaggcagatgtcgggctgacactcggcgtactctttgggaaggtgttcagccagactacaatttgtaggtttgaggccctccagctatcctttaagaacatgtgcaaactgcgccctctgttgcaaaaatgggtggaagaggccgacaacaacgagaatctccaggagatctgcaaggctgagacattagttcaggcacggaaaagaaaacggacttctatagaaaatagagtccgcggaaacctcgagaacctgttcctgcagtgccccaaacctaccctgcaacagatcagccacattgcacagcagctgggtttggaaaaggatgtcgtgcgggtgtggttttgcaacagaaggcagaaaggcaaaagatccagctccgactatgctcagagagaagatttcgaagctgctgggtcaccattctcgggggggcccgtgtcgtttcctcttgctcccgggccacactttggaacccccggatacggatccccacactttaccgctctctatagttcagtcccattccctgaaggcgaggcttttccccctgtgtcagtgaccaccctgggctctcctatgcactcaaactag

SEQ ID NO: 2751 - DNA, 1083 bp, synthetic construct
  misc_feature 1..1083: note = source = /note="Description of Artificial Sequence: Synthetic coding sequence"
  source 1..1083: mol_type = other DNA
atggcgggccacctagcctcagattttgccttttctcccccaccaggcggcgggggagatgggccgggaggaccggagccgggctgggtcgatccgagaacttggttgagcttccagggccctccagggggtcccggcattggacctggtgtgggccccgggtccgaggtatggggcatccccccttgtccccccccctacgagttctgtgggggcatggcatactgtggcccccaggtgggagtgggcttggtccctcagggcggcctggagacctcccaacccgaaggggaggctggggtgggggtagagtccaacagcgacggagcctccccagaaccatgcacagtgaccccaggcgccgtgaaactggagaaggaaaagctcgagcagaatcccgaagagtcacaggatattaaggccttgcagaaggaattggagcagtttgcaaaactcctgaaacagaagcgtataactctcggctacacacaggccgatgttgggctgactttgggcgtgctgtttggcaaggtcttctcccagactacgatctgcagatttgaggctttgcagctgtctttcaagaatatgtgtaaactgcgccctttgttgcaaaaatgggttgaggaggcagacaataatgaaaacctgcaggaaatctgtaaagcagagacccttgtgcaagcaaggaagaggaagcgcacatcaatcgaaaatagagtcaggggtaatttggaaaacctgtttctgcagtgccccaaaccgaccttacagcagatcagccacatagcccagcagctgggcctggagaaagatgtggtgcgggtttggttctgtaacagacgtcaaaaaggaaaacgttcatcttccgattacgcccagagggaggatttcgaggctgctggaagtccattttctggaggcccagtctccttcccattggctcctggcccccatttcggcacaccagggtacggcagcccccactttacggcactttatagcagtgttccatttccagaaggcgaagcctttccaccggtctctgtgactaccctgggctcacccatgcactccaattag

SEQ ID NO: 2752 - DNA, 372 bp, synthetic construct
  misc_feature 1..372: note = source = /note="Description of Artificial Sequence: Synthetic coding sequence"
  source 1..372: mol_type = other DNA
atggcgggtcatctggcctccgatttcgccttctccccgcctcctggcggaggcggagacggccccgggggaccagagcctggctgggttgaccctaggacttggttaagtttccaggggccccctggaggccccggtattggacccggggtcggtccgggctccgaggtctgggggatcccaccctgcccccctccttacgagttttgtggaggaatggcatactgtggacctcaggtgggagtgggcttggttccacaaggcgggcttgagacgtcccagccagagggtgaagcaggagtgggagtagagactcctatggggcccccgaggtctcccgccccccaccccttcccttttcctctgctttag

SEQ ID NO: 2753 - DNA, 558 bp, synthetic construct
  misc_feature 1..558: note = source = /note="Description of Artificial Sequence: Synthetic coding sequence"
  source 1..558: mol_type = other DNA
atggctggccatctggctagcgatttcgctttcagccctccccccgggggaggtggggacggaccaggcgggcccgaacccggctgggtggaccctcggacgtggttgtcattccagggacctcccggcggaccggggatcggacccggggtaggacccggaagcgaagtctgggggattcctccttgccctccaccctatgagttttgcggtggcatggcctactgtggcccacaggtgggcgtggggctcgttcctcagggagggttggaaacttcgcagccagagggggaagcaggggttggggtcgaaagcaattccgatggcgcttcccctgagccctgcaccgtcacgccgggggccgtgaaactggaaaaggaaaaattggagcaaaatcccgaagaaagccaagacattaaggccctacagaaggaacttgagcagtttgccaagctgctgaaacagaagcgcatcacccttggctatacccaggccgatgtccatcctggaggttctatatgggagggcatacagccaaacgaccacctccctctgtag

SEQ ID NO: 2754 - DNA, 372 bp, synthetic construct
  misc_feature 1..372: note = source = /note="Description of Artificial Sequence: Synthetic coding sequence"
  source 1..372: mol_type = other DNA
atggccggtcatttggctagtgatttcgcattcagtccaccccccggaggaggaggtgatgggcccggtggaccagaacccggctgggtggatccaagaacttggttgtcattccaggggccaccaggcgggccaggcattgggcctggagtgggccccgggagcgaggtgtgggggattccaccctgtccccccccttacgagttttgtgggggaatggcatactgtggtccacaggtaggagtcgggctcgtgcctcagggaggcctggaaacaagccaacccgaaggggaggcaggggttggagtggaaacaccaatgggaccaccgagatctccagcaccccacccatttcccttcccattgttgtag

SEQ ID NO: 2755 - DNA, 558 bp, synthetic construct
  misc_feature 1..558: note = source = /note="Description of Artificial Sequence: Synthetic coding sequence"
  source 1..558: mol_type = other DNA
atggccggccacctggcttcggacttcgcttttagtcctccgcccggcggcggcggagatggacccggcggacctgagcctggctgggtggaccctagaacctggttgagctttcagggtccaccaggaggtcctggcataggaccaggagttggacctggctctgaggtttgggggattccaccctgtcccccaccctacgaattttgcggagggatggcctattgcggaccccaggtgggcgttgggctagtgccccagggcggcctggagaccagccagcccgagggtgaggctggcgtgggcgttgaatccaacagtgatggtgcgtcccctgagccttgcacggtcacacccggagcggtgaaactcgagaaggaaaagctagagcagaatcccgaagagtcacaagatatcaaggccctgcagaaggagcttgaacaatttgccaaactcctgaagcagaaaagaataaccctcggatatacacaggccgatgtccatcctggaggttctatatgggaaggcatccagccgaatgaccatctcccattgtag

SEQ ID NO: 2756 - DNA, 372 bp, synthetic construct
  misc_feature 1..372: note = source = /note="Description of Artificial Sequence: Synthetic coding sequence"
  source 1..372: mol_type = other DNA
atggccggtcatctcgcatctgactttgccttttcacctcctcctggcgggggcggagatggaccaggcggccctgaacccggttgggtggaccctagaacatggctctcctttcagggccctcccggcggacccgggataggacctggtgtagggccagggagtgaggtatgggggattcccccttgcccacccccttacgaattttgtgggggaatggcctactgcggcccacaggtcggcgtgggactggtcccacaggggggcctggaaacaagtcagccggagggtgaagcaggcgtgggagtggagactcccatggggccccctcgcagcccagctccacacccattcccttttccactcctctag

SEQ ID NO: 2757 - DNA, 558 bp, synthetic construct
  misc_feature 1..558: note = source = /note="Description of Artificial Sequence: Synthetic coding sequence"
  source 1..558: mol_type = other DNA
atggctggacacctagcctcagattttgcattcagccctccacccggcgggggaggggacgggccagggggcccagaacccggttgggtagatccacgcacttggctgagctttcagggcccaccagggggacccgggataggtcccggagttggacccggaagtgaggtgtggggtattcctccctgtccaccgccgtatgaattttgcgggggcatggcttactgcgggccgcaagtcggggtcgggctggtgccccagggaggccttgagacatctcaaccggagggcgaggctggagtcggggttgagtctaatagcgacggagcgtccccagagccttgtacagttacgcctggcgctgtgaagcttgaaaaagaaaagcttgaacagaacccagaagagagccaggatattaaagctttacagaaggaattggaacaattcgcgaaactgctcaagcagaagaggataaccctgggctacacccaggcagacgttcatcctggcggcagcatctgggaggggattcaaccaaatgaccacttgcctctatag

SEQ ID NO: 2758 - DNA, 558 bp, synthetic construct
  misc_feature 1..558: note = source = /note="Description of Artificial Sequence: Synthetic coding sequence"
  source 1..558: mol_type = other DNA
atggctggacaccttgcatcagacttcgcgtttagcccacctccagggggagggggagacggccctggaggcccagagccgggctgggtggacccccgcacttggttatcatttcagggaccccctggggggccaggaatagggcccggcgtgggacccggcagcgaagtatggggcatccccccatgcccgcctccctatgagttctgtggaggaatggcgtactgtggccctcaggtcggcgtcgggctggtaccccaaggtggcttggagacgagtcagccggagggggaggccggagtgggcgtagaatctaatagcgacggcgcatcacccgaaccctgtaccgttactccgggggccgtaaagttggagaaggaaaagttggagcagaatcccgaagaatcccaagatattaaggctctccagaaggagctcgagcaattcgccaaactgttgaagcagaaacgtatcacactcggctacacgcaggcggatgttcatccaggtggcagtatatgggaaggaattcagcctaacgaccatctgcctctgtag

SEQ ID NO: 2759 - DNA, 372 bp, synthetic construct
  misc_feature 1..372: note = source = /note="Description of Artificial Sequence: Synthetic coding sequence"
  source 1..372: mol_type = other DNA
atggctgggcatctggcttctgactttgccttctcaccgcctcctggaggaggtggtgacggtccgggcggtcctgagcccgggtgggtcgatccaaggacctggctcagcttccagggaccgccaggtggcccaggtattggaccaggggtcggaccgggatccgaagtttgggggatccccccatgccccccaccctatgaattctgtgggggcatggcttactgtgggccccaggtgggagtgggactcgtgccccaaggtggtctcgaaaccagtcagccagagggtgaggcaggagttggggtggaaactccaatgggtccaccccgctctcctgcaccgcatcccttccccttccctctgctttag

SEQ ID NO: 2760 - DNA, 372 bp, synthetic construct
  misc_feature 1..372: note = source = /note="Description of Artificial Sequence: Synthetic coding sequence"
  source 1..372: mol_type = other DNA
atggctggacatctcgcgagcgatttcgcattttcgccgccacccggcggcgggggagatgggcctggaggccctgagccaggctgggtcgacccacgcacatggttgtcttttcagggaccgccaggcggcccaggcattggtcctggggtcggacctggcagtgaagtctggggaatacctccctgtcctcctccttatgagttctgtggaggcatggcatattgtgggccacaggtcggagtgggactcgtcccacaagggggcttagaaaccagtcagcccgagggcgaagccggagtcggcgtagagaccccgatgggcccacctcgctcccccgcaccccacccattcccatttcctctcctttag

SEQ ID NO: 2761 - DNA, 2079 bp, synthetic construct
  misc_feature 1..2079: note = source = /note="Description of Artificial Sequence: Synthetic coding sequence"
  source 1..2079: mol_type = other DNA
atggggacagtgtccagcaggcgcagctggtggccccttcccctccttctccttcttctgttacttctgggacccgctggtgcccgcgctcaggaggacgaggatggggattacgaggaattggtcctggctctccgtagtgaggaagacgggctggccgaggctcctgagcatgggacaaccgcgacctttcaccggtgcgctaaggatccatggcgactccctgggacatacgtggtggttctgaaggaggagacgcatctgtcacagtctgagcgcacggcccgcagacttcaggcgcaagcagccaggcggggatacctcacgaaaatactgcacgtcttccacggtctgctgcctgggttcctggtaaagatgtccggagatctgttagagctcgctctgaagctgccgcacgtcgactacattgaagaggattcctccgtgtttgcccaaagtatcccgtggaatctggagcggattacacctccaagataccgggccgatgaataccagcctcccgacgggggatccctggtggaggtctatctcctggacacttccattcagtctgaccatcgagagatcgaggggcgggtgatggttacagactttgagaacgttccagaagaagacggtaccaggttccaccggcaggcgagcaagtgcgattctcacggaacacacctggccggcgttgttagtggccgcgacgcaggggtggccaaaggcgcaagcatgagatccctgagggtccttaactgccagggtaaggggaccgtgtccggtacacttattggattggaattcatccgcaaaagtcagctggtgcagcctgtgggaccccttgtggtgctcctcccattggcagggggctacagtcgggtcctaaatgccgcatgtcagcggttggcccgggctggagttgtgctggtcactgccgcagggaacttcagggacgatgcttgcctctactcgcccgcctccgcgccagaggtgattaccgttggagctacaaatgcccaggatcagcccgtgacactcggaaccttaggcaccaattttggcagatgtgtcgacttatttgcgccaggcgaggacatcataggggcctcatctgattgttctacctgtttcgtgtcccagtccggtaccagtcaggccgctgctcacgtggccgggatcgccgctatgatgctgtctgcggagcccgaacttacacttgctgaactccgacaaagattgattcacttctcagctaaggacgtgataaacgaggcctggtttcccgaggatcaacgggtccttaccccaaacctcgtcgccgccctgcctccttcgacccatggagccggctggcagttgttctgtcggaccgtctggagcgcccattctgggcctactcgcatggccactgccgtcgctagatgtgcaccagatgaagagctcctctcttgttccagctttagcagaagcggtaagcggaggggagagagaatggaggcccagggaggaaagttggtatgtagggcccataacgcctttggaggcgaaggcgtgtatgccattgctagatgctgtttgttgccacaagcgaactgttcagtgcatacagcacctcccgcggaggcctctatggggacacgagttcattgtcaccagcagggccatgtcctgaccggctgttcttctcactgggaggttgaggatctgggaacgcataaaccgccggtcctgaggccgaggggtcagcccaatcaatgtgtgggccaccgcgaggcaagtatccatgcctcctgctgccacgccccgggtttagaatgcaaggttaaagaacacggcattcccgctccacaggaacaggtgaccgtagcatgcgaagagggttggacattgaccgggtgttccgcactgccgggaacctcccatgttctgggagcgtacgcggttgataacacatgcgtggtaagaagcagagacgtttctactaccggcagtacaagcgaaggagcagtgactgctgtagccatttgttgcagatccaggcacctcgcccaggcaagccaggaattgcaatag

SEQ ID NO: 2762 - DNA, 618 bp, synthetic construct
  misc_feature 1..618: note = source = /note="Description of Artificial Sequence: Synthetic coding sequence"
  source 1..618: mol_type = other DNA
atgggcaccgtctcttctagaaggagctggtggcctctgcccttgctgctgctcctgctcctattactcgggccagcaggcgcaagggctcaggaagatgaggacggggattatgaggagctggtgctggcccttagatcggaggaagatgggctggctgaggcgcctgagcacgggacaacagcaacatttcacaggtgcgcaaaggatccctggagactgcccgggacgtatgtggttgtgctgaaggaggagacccatctgtcccagagcgaacgtacggcgagaaggctgcaggcccaggccgccagacggggctacctgacaaagatcctgcacgtgttccatggcctgcttccaggattcttagtgaaaatgagcggggacttgctggaactagcgctgaagctcccacacgttgactacatcgaagaggactcctccgtgttcgctcagtccattccatggaacctcgagaggattacacctccacgttatcgggccgatgaatatcagccaccagcctacctggaggatcactgtgggggtcatcgcggcgcagtccagatggccctgcagaaaactcaggaaactctcggccaagaacaattcgattag

SEQ ID NO: 2763 - DNA, 801 bp, synthetic construct
  misc_feature 1..801: note = source = /note="Description of Artificial Sequence: Synthetic coding sequence"
  source 1..801: mol_type = other DNA
atggtgacggattttgagaatgtccctgaagaagatggaacccggtttcatcgacaggccagcaaatgtgatagtcacggcactcatctggcaggagttgtgagcggcagggatgccggggtggccaaaggcgcatctatgcgcagcttacgtgtgctgaactgccagggcaagggaaccgtgtcgggaaccctgatcggcctggaatttatccgcaagagccagctcgttcaaccggtaggtccactggtggtgctactgcccttggcgggcgggtactctagagtcctgaacgccgcctgccagaggctcgccagagctggcgtagtattggtgaccgcagccggcaatttcagggacgatgcctgtctatacagtcctgccagtgccccagaagtcattacagtaggagcaacaaacgcccaggatcaaccagttactttgggaactctgggaaccaatttcggtcgctgcgtggacctatttgcccccggcgaggatattattggtgcctcctctgattgttcaacatgttttgtgagtcagagcggcacttcgcaggctgccgcccacgttgctgggatcgccgccatgatgctgtctgcagagcctgaacttactctggctgagttgcggcagaggctgatccatttctctgcgaaagacgtgattaacgaagcctggttccccgaggaccagcgcgtggggtcttgcttcgcaggtctatatggccagcacacacgcgggctccatggatggcctcagccaagcccggcagccccacagatgcgcagctgctag

SEQ ID NO: 2764 - DNA, 3972 bp, synthetic construct
  misc_feature 1..3972: note = source = /note="Description of Artificial Sequence: Synthetic coding sequence"
  source 1..3972: mol_type = other DNA
atggaagacggcggtcttactgcttttgaagaggatcagagatgcctttcacagagtctgcctctccctgtatcggccgagggacctgccgctcagacaactgctgagccctccaggtcattttcatcagctcacagacacctctcccgccgcaatggccttagtcgtctgtgtcaaagccgcaccgcgctatcagaggataggtggtcatcctactgtctgagctcccttgccgcccagaacatctgcacctctaagttgcattgccccgcagcacctgagcacacagacccatctgagcctcggggatctgtcagttgctgtagtctccttagggggctgtctagtgggtggtcttccccccttctgccagccccggtgtgcaatcccaacaaagccatctttactgtcgacgccaaaaccactgaaatcctggtagctaacgataaggcttgcggcttgctgggttacagcagccaagacctcatcgggcagaagctaacccaattctttctgcgcagcgacagcgatgtcgttgaagcactctcagaagaacacatggaagctgacggccacgcggctgtggtattcggtaccgtggtggacattatcagccgttcaggagaaaagataccagtgtccgtgtggatgaagagaatgaggcaggagcgacggctgtgctgcgtggtggtccttgagccagtggaacgggtatctacctgggtcgctttccagtctgacgggactgttacttcctgtgattccctttttgctcatctccatgggtacgtgagtggtgaggatgtggccggtcagcacataacagacctgattcctagcgtgcagctaccccccagtggccagcacatccctaagaatttgaagatccagcgtagtgtcgggcgtgctcgtgatggtactacttttcccctgagccttaaattaaagagtcagcccagcagcgaggaagctaccaccggagaagccgcccctgtgagcggttatcgggcatccgtttgggtgttttgcactatcagtggcctgataacactgctcccggatgggacaatccacggaattaatcactcgtttgctcttaccctgttcggatatgggaaaaccgagctgctgggcaaaaacattacttttctgatccccgggttctatagttatatggacctggcctacaactcttctctgcaactgcccgatttagcatcttgtctcgatgttggcaatgaaagcggttgcggcgagcggactctggacccctggcagggacaagacccagccgagggtgggcaggacccacggatcaatgtcgtactagctggcggacatgtggtccctagggacgaaatcagaaaactcatggagtcacaagatattttcacaggaacacagacagagctcatagcaggtggtcaactactgagctgcttatcaccacaacccgctccaggcgtggataacgtcccagagggctctttaccagtgcacggtgagcaagctcttcccaaggatcagcaaatcacagcgcttgggcgagaagagcccgtggccatcgaatcaccggggcaggatctgcttggagagagtcggtctgaacccgttgacgttaaaccattcgctagctgcgaggactcagaggctcctgtgcccgctgaagacggcggctctgatgccggcatgtgtggcttgtgtcagaaagcccagcttgaaaggatgggtgtaagcggaccctctggctccgacctgtgggccggagcagcagtggcgaagccgcaggctaagggtcagctggcaggtggcagtctattgatgcactgcccatgttatggctcagaatggggtctgtggtggcgtagccaagatctggccccctctccctctggaatggctggtctgagtttcgggacccccaccctggacgaaccctggcttggcgtggaaaacgatagagaggagcttcagacttgcctcatcaaggagcagttgtcccagctgtctctcgccggcgccctggacgtgcctcacgcagaactcgttcctaccgagtgtcaggccgtgactgctcctgtgtccagctgcgacctgggaggacgtgatctatgtggtgggtgcaccggctcctcctccgcctgctacgcactagccacagatttgcctggcggactggaggctgtagaggctcaagaggtagatgtcaattccttcagctggaatctgaaggagctcttcttttccgaccagaccgatcagactagtagcaattgctcatgcgccacatctgaactgagagagaccccatcctccttggccgttggatctgacccagacgtcgggtccttgcaggagcaagggtcttgcgtgctggacgatagggaattgttactcctgacgggtacctgcgtagacctgggtcagggcagacgtttccgagagtcctgcgttggtcatgaccccaccgaacctttggaagtgtgcctagtgtcttccgaacattacgcggcctctgacagggaatcccccggccacgtgccttccactctcgatgctgggcctgaagatacctgtccttcagcggaggaacctcgcttgaatgtgcaggtcacttctacaccagttattgtaatgaggggagcagcgggtctccagcgtgagattcaggagggcgcatactccggctcctgctaccatcgggacgggctgaggcttagcattcagttcgaagtgcgccgggtagaacttcaaggccccacccccctgttctgctgttggcttgtgaaggacttgctccactcccagagagacagtgcagcccgcacccgtctgtttctcgccagcctgcccggcagcacccactccaccgctgccgagctcacgggacctagtctagtcgaagtgctccgagcacggccctggtttgaggagcctcccaaagcagtagaattggagggtctcgctgcctgcgagggcgagtactcccaaaagtactccaccatgtctccactcggcagcggggcattcggcttcgtgtggaccgcggtggacaaggagaagaacaaggaggtcgtcgtcaaattcataaaaaaggagaaagtactggaagattgttggatcgaggatcccaagttaggcaaggtgacgttagaaatagcaattctctccagggtagaacacgccaacatcatcaaagtcctggacatctttgaaaaccaagggttcttccaactcgtgatggaaaaacatgggagcggcttagatctttttgccttcattgatcggcacccccgactggacgaaccacttgcttcctatattttccgacagctggtgtctgcagtcggatatctgcgtctgaaagacataatacacagggacattaaggacgaaaacatcgtgattgcagaagactttacaattaagctgattgatttcgggtccgcagcatacttggagcgtgggaagctgttttacacattctgtgggaccattgagtactgcgcccctgaggtgctgatgggaaacccatacagaggtcctgagctagaaatgtggagcctgggagtcaccctatacactctggtttttgaggagaacccattttgcgagctcgaagagacagtcgaggccgctatacatccaccttacctagtatctaaggaacttatgtctcttgtcagcggcttactgcagcctgttccagaaagacgaaccaccctagagaagcttgtgaccgatccctgggttactcagccagttaatctcgccgactacacctgggaggaagtcttcagggtgaacaaacccgaatccggcgtcttgagcgctgcaagcttagaaatggggaaccggagtctttcagacgtggcacaggcccaagagctatgtggaggccccgttcctggcgaggcacctaatggccaagggtgcctccacccgggcgatcctcgactcttaaccagctag

SEQ ID NO: 2765 - DNA, 1488 bp, synthetic construct
  misc_feature 1..1488: note = source = /note="Description of Artificial Sequence: Synthetic coding sequence"
  source 1..1488: mol_type = other DNA
atgtggcaattaacctcactgctcctcttcgtggccacatgggggatttccggtacgcccgctcctctcgatagcgtcttttcttctagtgaacgggcacatcaagtcctccgaatcagaaagcgcgccaactcttttctggaggagctccgccatagcagtctcgagcgcgagtgtatcgaggaaatctgcgacttcgaggaagcaaaggaaatcttccagaacgtggatgatacccttgcgttttggtccaaacatgtcgacggtgatcaatgcctcgtgctacccctcgaacacccctgtgcctcattgtgctgtggacacggcacatgtatagacggcatcggctctttcagctgtgactgtagaagcgggtgggagggaaggttttgtcagcgcggcgagggagagcggtggatgctagccggaggtggcgctggactagggccaggctggggaagaggtacgtcgacttcatgcccaagaccgcctctgccagccgaggtaagcttcttgaactgcagtctggataacgggggatgcactcactactgtctcgaagaggtcgggtggcgcagatgcagctgtgcaccgggatacaagttgggggacgatttgctccaatgccacccagcggtcaagttcccctgcggcagaccatggaagcggatggaaaagaagcggagtcacctgaagcgtgatactgaggatcaggaagatcaagtcgaccctcggctgattgacgggaagatgaccagacgcggagactcgccatggcaggtggtgctcctggacagcaagaaaaagcttgcctgcggggctgtcctgattcacccttcctgggtgctgactgccgcgcactgcatggacgaaagcaagaaactgctggttaggcttggcgaatatgacctgagacggtgggaaaagtgggagctggatctcgacatcaaagaggtgttcgtccatccaaactattccaagtctacgacggacaatgacatagccctcttacacctggctcagcctgctacattgagtcaaacaatagtgcctatctgcctacccgacagcggactggccgaaagagagttgaaccaggcaggccaggaaacactagtaacgggctggggataccatagttcgcgcgagaaagaggcaaagcgtaatcgtactttcgtgctgaatttcataaaaatcccagtagtgcctcacaacgagtgctcagaggtgatgtccaacatggtgagcgaaaacatgttatgtgccgggattctgggagaccgtcaggatgcctgtgagggtgacagtggcgggccgatggtggcaagctttcacgggacgtggttcctcgtgggactggtgagctggggggagggttgtggattgctgcacaactatggagtctacaccaaagtttcccgataccttgactggatacatgggcacatccgtgataaagaggcccctcaaaagtcttgggctccttag

SEQ ID NO: 2766 - DNA, 1386 bp, synthetic construct
  misc_feature 1..1386: note = source = /note="Description of Artificial Sequence: Synthetic coding sequence"
  source 1..1386: mol_type = other DNA
atgtggcagttaacgtcacttctcctgttcgtggctacttggggtatctccgggacccctgcacctctagactcagtctttagttcatctgagcgggcacaccaggtgctgcgaatccgaaaacgagcgaactcttttctggaggagttacggcatagctcgctggagagagaatgtattgaagagatttgtgatttcgaagaagcgaaggaaatttttcaaaacgtcgatgatactctagccttttggtcaaagcacgtggatggggaccaatgtctcgttttaccactggaacatccatgcgccagtctctgttgcgggcacgggacctgcatcgacggtattggctcattttcatgcgactgccggagcggctgggaaggccggttctgtcagcgcgaggtgtcttttctgaattgctcgctggataatggaggttgcacacactactgcctggaggaagtgggctggcggcgatgtagttgcgccccaggttataagctgggggatgacctgttacagtgccaccccgcggtcaaattcccttgtggaaggccatggaagcgaatggagaagaaacgtagccacctcaaacgcgatacggaggaccaggaggaccaggtggaccctagactgatcgacggaaagatgactagacgcggcgatagcccatggcaggtcgttctcctcgatagcaaaaagaagttggcctgtggcgcggtactcatccacccctcatgggtcttaactgctgcgcactgtatggacgaatcaaagaagttgctggtgcgactgggggagtatgacctgagacgctgggaaaaatgggaactagatctagatattaaagaggtctttgttcaccccaattatagtaagtccactaccgacaacgatattgccctcctgcacctggcgcagccagcaaccctctcacagaccatcgtcccgatctgcctgcccgactcgggcctggcggagcgggagttaaaccaggcgggccaggagacactggttaccgggtggggttaccacagctctcgggaaaaagaggctaaaagaaaccgcactttcgtgttaaatttcattaagatcccagtggtgcctcacaacgagtgttcggaggtcatgtccaacatggtttcagagaacatgctctgcgccggcatcctgggggatagacaagacgcgtgtgaaggtgacagcgggggacctatggttgccagctttcatggcacttggtttttggttgggctggtgagctggggggagggttgcggactacttcacaactacggcgtctacaccaaggtctctcgatatctggattggatacacggacatattcgagataaagaggcaccccagaagtcctgggcgccatag

SEQ ID NO: 2767 - DNA, 351 bp, synthetic construct
  misc_feature 1..351: note = source = /note="Description of Artificial Sequence: Synthetic coding sequence"
  source 1..351: mol_type = other DNA
atgtggcagcttacctcgctgctcctcttcgttgcgacatggggtatcagcgggaccccagcccccttagactcagtattcagttcaagtgaacgagcccatcaggttttgcgaattcggaaacgggcaaattccttcctggaggaattgagacactcatctctggagcgcgaatgcatagaagaaatttgcgattttgaagaggccaaggaaatattccagaacgtcgacgacaccctagcgttctggtcaaagcatgtcgacggcgatcagtgcttagtgctgccccttgagcacccatgtgccagtctttgctgtggccatggtacgtgtattgatggaattgggtag

SEQ ID NO: 2768 - DNA, 381 bp, synthetic construct
  misc_feature 1..381: note = source = /note="Description of Artificial Sequence: Synthetic coding sequence"
  source 1..381: mol_type = other DNA
atgtggcaacttacttcgctcctgttatttgtggcaacctggggcatcagcgggaccccggctccgctggactcggtatttagctcctccgagagggcccaccaggtgctgaggattaggaaaagggctaattcgttcttagaagaactgcgacactcgtctctggagagagagtgtatagaggagatttgtgatttcgaagaggcaaaggagatttttcaaaacgtagatgataccctggctttctggtcaaaacacgtggatggggatcagtgcctggtgctgccgcttgaacacccttgcgcgagtctttgttgtggtcacggaacctgtatcgacgggatcggttcatttagttgtgactgccggtccggatggtag

SEQ ID NO: 2769 - DNA, 1551 bp, synthetic construct
  misc_feature 1..1551: note = source = /note="Description of Artificial Sequence: Synthetic coding sequence"
  source 1..1551: mol_type = other DNA
atggccgcgggacgtcgtacatgttccatttcaacaacacgaccttgtgcgtccgccagccggatgtggcagctgacctctctacttctttttgtggcgacttggggaatttccggaacccctgcaccactggattctgttttcagcagcagcgaacgggcgcaccaggtgctgcgcattagaaagcgcgcaaattccttccttgaggagttacgccactcctcgctggaaagggaatgcatcgaggaaatctgtgattttgaggaagccaaggaaattttccagaacgttgatgataccctggccttctggtccaagcacgtagacggcgatcagtgcctggtgcttccgctggagcacccctgtgcctcactttgctgtggacacggtacctgtatcgacggtatcggtagctttagttgtgactgccgctctggctgggaagggagattctgccagcgaggtgagggggagcgctggatgctagctggtggtggggcaggactcgggccagggtggggaagaggaacctcaacgtcatgtcccagaccaccactgcctgctgaggtgtcttttcttaattgttccctcgataacggagggtgtacccactactgcctggaagaagtcggatggcgacgctgctcatgcgcccctgggtacaagctcggggatgatttgctgcagtgccacccagcagtcaaatttccatgtggacggccatggaagaggatggagaagaagcgatctcatttgaagagggatacggaagatcaggaggatcaggtcgacccaagactaatcgacggcaagatgacaaggcggggtgacagcccatggcaagttgtactgctggactcaaaaaagaaactggcatgtggcgccgtcttgattcacccctcatgggtgctgaccgccgcccactgcatggacgagtccaaaaagttgttggtgcggcttggcgaatacgatcttcgacggtgggaaaaatgggagctggacttggatatcaaagaggtgttcgtacatcccaattattcgaaatctaccactgataatgacatcgctctgctacacttggcacaaccagccactctgtcgcagaccattgtaccaatctgcttgcctgacagcgggctcgctgagagggagctgaaccaggccggacaggagaccctggtgacggggtggggatatcactcctcaagagagaaggaggccaagcggaataggaccttcgtgctcaactttatcaagatacctgttgttccacataacgagtgctcggaggttatgtcaaacatggtctccgagaacatgctctgtgccgggatactgggggatcgccaggacgcctgtgaaggcgattccggtggcccaatggttgcatcattccatggtacctggttcctagttggactggtgtcctggggcgaaggatgcggcctcctgcataattatggagtgtacaccaaggtgtcaagatacctggactggattcatggtcacatccgcgataaggaggccccccaaaagtcctgggccccctag

SEQ ID NO: 2770 - DNA, 1263 bp, synthetic construct
  misc_feature 1..1263: note = source = /note="Description of Artificial Sequence: Synthetic coding sequence"
  source 1..1263: mol_type = other DNA
atgtggatgacccactggccatctggaccgtcaaccagtactgtgacctctgcttggagttgcccgtggtcgaccagagcaccggcatgcgccgctggcaccgcacgagcttctaccgcttccgctgctagcgccgctacagcggctgccgctggccgggcagccagtgcaagtgcagtgcggggccgaggagggtgctggaggggcggcgccggcctgggtccaggatggggacgcggaacctctactagttgccccagacccccactgcccgcagaagtgtctttcctcaattgctcattagacaacgggggctgcacccactactgtttggaagaggtcgggtggaggcggtgttcctgcgcccctggatataagcttggagacgacctgcttcagtgccaccccgctgtgaaatttccttgtggacggccctggaagcgtatggagaaaaagcgctctcacctgaagagggacaccgaggatcaggaggatcaagttgaccctcgcctgatcgacggtaaaatgactagacggggcgactctccctggcaagttgtactgcttgatagcaagaagaaactggcttgtggagcagtgctgattcacccctcatgggtgctgactgccgcccattgcatggatgagagcaagaagcttctcgttcgtctgggcgaatacgacctgagaaggtgggagaagtgggagttagacctcgatatcaaggaggtttttgtgcatccaaactatagcaaaagtacgaccgataacgacatcgccttgttgcatttggcccagccagcaacacttagccagacaattgtccctatatgtttgcctgattcaggacttgccgagagggaactgaaccaggctggtcaagaaacactggttaccggctgggggtatcacagcagtcgtgagaaagaggcaaaacgaaaccggacatttgtgctgaactttatcaagatcccggtcgtgccacacaacgagtgtagcgaagtcatgagcaacatggtcagcgaaaatatgctgtgcgccggtatacttggcgaccgacaggatgcatgtgagggcgactccggaggtccaatggttgccagtttccatggcacatggttcctcgtggggcttgtcagctggggagagggctgcggactgcttcacaactacggtgtctatacaaaggttagccgctacctcgattggattcacggccacatcagggataaagaggcaccacagaagtcctgggctccttag

SEQ ID NO: 2771 - DNA, 354 bp, synthetic construct
  misc_feature 1..354: note = source = /note="Description of Artificial Sequence: Synthetic coding sequence"
  source 1..354: mol_type = other DNA
atgcctcggctttttttcttccatctcttgggggtctgtctgctgcttaaccaattttcgcgagcagtcgcagacagctggatggaagaggtcattaaactgtgcggccgggaactggttcgcgcgcagattgccatctgcggtatgagtacctggtccaagagaagtctatcccaagaagacgcaccccagaccccccgccctgttgcaggagactttattcaaaccgttagcttaggcatatctccagacggaggtaaagccctacgcactggatcctgctttacacgggaattcctcggcgccttgtccaaactctgtcatccatcaagtacaaagattcaaaagccatag

SEQ ID NO: 2772 - DNA, 558 bp, synthetic construct
  misc_feature 1..558: note = source = /note="Description of Artificial Sequence: Synthetic coding sequence"
  source 1..558: mol_type = other DNA
atgcccagactgtttttctttcacttactgggagtgtgcctgctccttaatcagttttctagagctgtggctgattcatggatggaagaagtaattaagctgtgtggaagggagcttgtccgagcccagatagctatatgtgggatgtcaacatggtctaaacgatctttatcacaggaggacgccccacaaaccccccgacccgtcgcggaaattgtgcccagctttataaacaaagacactgagactataaatatgatgagtgaattcgtcgcaaatttgccccaagagctgaagcttacccttagcgagatgcagccagcgctgccccagctgcagcaacatgtccctgtactgaaagattccagccttctgtttgaggagttcaagaagctgattagaaatcgtcagtctgaagcagccgactccagccccagcgaactaaagtacttagggttagatacccacagccggaaaaaaaggcagttgtattctgctctggctaataaatgttgccacgtgggatgcactaagcgcagtttggccaggttctgttag

SEQ ID NO: 2773 - DNA, 1047 bp, synthetic construct
  misc_feature 1..1047: note = source = /note="Description of Artificial Sequence: Synthetic coding sequence"
  source 1..1047: mol_type = other DNA
atgaatggaactgaaggcccaaacttttacgttccattcagcaacgctacaggggtggtgcgaagtccattcgagtatccacaatactatcttgctgagccatggcaatttagtatgctcgcagcatacatgttcctcctgattgttctcgggttcccaatcaatttcctgactctctacgtgaccgttcagcacaagaagctgcgaaccccacttaactacattctgttaaatcttgcagtcgctgatctctttatggtgttaggagggtttacttctactctgtacaccagtcttcacgggtattttgtgttcggccctactggctgtaatctggaagggttttttgccaccttgggcggggagattgccttatggtctcttgtcgtcctcgccattgagcgatatgtcgtggtgtgcaagcctatgagtaatttcaggttcggcgagaaccatgctataatgggagtggcattcacctgggttatggcccttgcctgcgcagcgccacccctcgcgggctggtccaggtacatcccagaaggccttcagtgcagttgcggaatcgactactatactttgaagccagaagtcaacaatgagagcttcgtcatctatatgtttgttgttcattttactatacctatgatcattatctttttttgctatgggcagcttgtgttcacagtcaaggaggcagcggcccagcagcaagagagcgcaaccactcagaaggccgagaaggaggtcactcgaatggttataataatggtgatcgccttcttgatatgttgggttccatacgccagtgtggcattctatatctttacacatcaagggtccaactttggccctattttcatgacaatcccagcgttttttgcgaaaagcgccgctatctacaacccagtaatatatatcatgatgaacaaacagttcagaaactgcatgctgacgacaatctgttgcgggaaaaaccctctgggcgatgatgaggcgagcgcgacggtgtccaaaaccgagactagccaggttgcaccggcctag

SEQ ID NO: 2774 - DNA, 1257 bp, synthetic construct
  misc_feature 1..1257: note = source = /note="Description of Artificial Sequence: Synthetic coding sequence"
  source 1..1257: mol_type = other DNA
atgccaagctctgtgtcttggggaatcctgctgctggctggactgtgctgtcttgtgccagtcagtcttgctgaagatcctcagggagatgctgctcagaagactgataccagtcaccacgatcaggatcatccaacttttaacaagataacccccaatttggccgaatttgctttttctctgtacagacagcttgcgcaccagtcaaatagtacaaacattttctttagcccggtatccatcgctaccgccttcgctatgctttctcttggaacgaaggcagacacgcatgatgagatcctggaggggttaaactttaacctgacggaaattcctgaagcacagatacacgaggggttccaggaactgctgcgtaccctgaatcagcctgacagccagctgcagctcacaacagggaatggcctgttcctttccgaaggactgaagctggttgataagtttctggaagatgtcaaaaaactttaccattcagaggcgtttactgtgaattttggggacactgaggaggcgaaaaagcagatcaatgattacgtcgaaaaaggtacacagggcaagatcgtagacctggtcaaggagttggatcgagacactgtgtttgcccttgttaactacatattttttaaaggcaagtgggaacgcccctttgaagttaaggatacggaggaagaagattttcatgtggatcaggtgactactgtgaaagtcccaatgatgaaacgtctggggatgtttaacattcagcattgtaaaaaactctcaagctgggtgctgctgatgaagtacttggggaatgccacagccatctttttcctgcccgacgagggcaaacttcagcacctcgagaacgaattgactcacgatatcataactaaatttctcgagaatgaagaccgccggagcgctagcctccacctgcccaaattgtccattaccgggacctacgatcttaaaagcgtgttaggccaattaggaattacaaaagtgttctctaatggtgccgacctgagtggcgtgactgaggaagccccgcttaagttgtccaaggcagtgcacaaggccgtgttaaccattgacgaaaagggtactgaagctgcaggtgctatgtttcttgaggccatccctatgagcataccccccgaagtgaaatttaacaaaccgttcgtttttttgatgatcgaacagaacaccaagtctccgttgtttatgggaaaagttgtgaacccaacgcaaaagtag

SEQ ID NO: 2775 - DNA, 1257 bp, synthetic construct
  misc_feature 1..1257: note = source = /note="Description of Artificial Sequence: Synthetic coding sequence"
  source 1..1257: mol_type = other DNA
atgccttcgtctgtgtcttggggcattctccttctggccggcctctgttgcctcgtgccagtgtcacttgccgaagatccgcagggcgatgcagctcaaaaaacagacacctcccatcatgaccaggatcacccgacgtttaacaaaataaccccgaatctagcagaatttgcattctccctgtataggcagctggcacaccagtctaactctacaaacatctttttttcgcctgtgtcgattgcaactgcctttgcgatgctaagcttgggaaccaaggctgatactcacgatgaaattctggaggggctgaatttcaacttgactgagataccggaggcccagattcatgaagggttccaagaactgcttcggactcttaaccagccagattcacaacttcaactgaccacaggaaacggcctgtttctgtcagaggggctgaagcttgtggacaaatttcttgaagatgtgaaaaagctgtaccattcagaagcattcacagtgaatttcggcgatactgaagaagcaaagaagcaaatcaatgactacgtcgagaaaggcactcagggtaaaatcgtggacctagtgaaggaattggatcgcgatacggtgtttgctctcgtgaattacatttttttcaaaggaaagtgggagcgcccctttgaagtcaaagataccgaggaggaagactttcatgtggatcaggtgacaactgtaaaggtgcccatgatgaaaaggctcggcatgttcaacatacagcactgcaagaaactgtccagctgggtgcttcttatgaagtatctcggcaacgctactgccatttttttcttgcccgatgagggcaaacttcagcatctcgaaaatgagttgactcacgatatcattaccaaatttctcgagaatgaggatcgccgcagtgcaagtctccatctccccaagctgagcattactggaacctatgatttaaagagcgtgttgggccagctggggatcacaaaagttttctcgaatggcgctgaccttagtggcgtgaccgaggaggccccactcaaacttagtaaggcggtccacaaagcagtattaactatcgacgagaaggggacagaagcggcaggcgctatgtttctggaggccataccgatgagcatcccccccgaggtgaaatttaacaaaccatttgtgttcttaatgattgagcaaaataccaagtcccccctttttatgggcaaggtggtgaatcctacccagaagtag

SEQ ID NO: 2776 - DNA, 1257 bp, synthetic construct
  misc_feature 1..1257: note = source = /note="Description of Artificial Sequence: Synthetic coding sequence"
  source 1..1257: mol_type = other DNA
atgccaagtagtgtgtcttggggtatcctgctcttagccggcctctgctgcctcgtccctgtcagcctcgcagaggacccacaaggtgacgctgcccagaagactgacaccagtcaccacgaccaggaccacccaacattcaataagatcacaccgaatttagccgaatttgctttctccctgtatcgacagttggcccaccagtctaattccaccaacatcttctttagccccgttagtatcgccacagcatttgccatgctctcattggggacaaaagccgatacacacgacgaaatcttagagggcctcaattttaatttgaccgaaattccggaagcccagatccacgaaggcttccaagagctactgcgaacacttaatcaaccagattcccaactgcaactaacaacaggcaatgggcttttcttaagcgaaggccttaagctcgtcgataagtttctggaagacgtcaaaaagctctaccatagcgaagccttcacggttaattttggggatacagaggaagcaaagaagcagatcaatgactacgtagaaaaaggcacccaagggaagatcgtagatttggttaaggaactggaccgcgacacagtcttcgcccttgtcaactacatcttcttcaaggggaagtgggaaaggccattcgaggtgaaagacacagaagaggaggactttcacgtggaccaggtcacaaccgtgaaagtgccgatgatgaaaagattggggatgtttaatattcagcattgcaagaagctaagctcttgggtgctgcttatgaagtacctcggcaacgcaacggccatattcttcttaccagatgagggaaagctccaacatttggaaaacgaacttacccatgatataattactaagttcttggagaatgaggatagaagatctgcgtccctgcacctacctaaactctcaatcactggcacttatgatctgaaatcggtcttgggacagcttggtattacaaaggtcttctctaatggagccgatctcagtggggtaacggaggaggcaccattgaagttgagcaaggcagtgcacaaagcagtgctgactatcgatgaaaaaggcactgaagcagccggtgcaatgttcttagaggctatccccatgtctatccccccggaggtgaagtttaataagccctttgtctttctcatgatcgagcaaaatacaaaatcacccctcttcatgggcaaggtcgtcaacccgacccaaaagtag

SEQ ID NO: 2777 - DNA, 1080 bp, synthetic construct
  misc_feature 1..1080: note = source = /note="Description of Artificial Sequence: Synthetic coding sequence"
  source 1..1080: mol_type = other DNA
atgccatcgagtgtgtcttgggggatacttctgttagcgggactttgctgcctggtgcctgtctccctggccgaagacccgcagggcgacgccgctcaaaagactgacacatcacatcacgatcaggaccaccccacattcaataaaatcactccaaatttagccgagtttgcattcagcctttataggcagttagcacaccagtcgaattccactaacatctttttcagcccggtctcaatagccacagcttttgccatgctttccctgggcactaaggctgacacccacgatgagatacttgaaggacttaacttcaatctgacagagatccctgaggctcagatccacgagggcttccaggagctgctgagaaccttgaatcagccggattcacaactgcagcttaccacaggaaatggactgtttctgagcgaggggctgaagcttgtggacaagttcctcgaggatgtgaagaagttataccacagtgaagctttcacagtgaacttcggcgacaccgaagaggcaaagaaacagattaacgattacgtagaaaagggaactcagggtaagatcgtggatctcgtgaaggagttagatcgggatacagtctttgcactcgtcaattacatattcttcaaaggcaaatgggagcggcccttcgaggtgaaggacactgaggaagaggactttcacgtcgatcaagtaaccacagtgaaagtaccaatgatgaagaggctggggatgttcaacattcagcattgcaaaaagttgagctcttgggtactcctaatgaagtatcttggaaatgcaactgcgatctttttcctaccagacgaaggcaagttacaacatctggaaaacgagttaacgcatgacatcattacaaaatttctggagaacgaggaccgaaggagcgcctcgctgcatctcccgaaattgagcataaccggaacctacgatctaaaaagcgttctagggcaactgggcattacaaaggtcttttcaaacggcgctgacctgtccggagtgacagaagaggctcctttgaagttgtccaaggtaagatccccttag

SEQ ID NO: 2778 - DNA, 1257 bp, synthetic construct
  misc_feature 1..1257: note = source = /note="Description of Artificial Sequence: Synthetic coding sequence"
  source 1..1257: mol_type = other DNA
atgccttcatcagtgagctggggcattctgctcctagccggcctctgctgcctggttcctgtgtctctggccgaggatccccagggagatgcagcccagaaaaccgatacatcacaccatgaccaggatcaccccactttcaacaagatcacacccaacctggcagagtttgcattctcgttgtaccggcagttagcgcatcaaagcaattccaccaacatcttcttcagccccgtgtccatagccacggcatttgcaatgttgagcctgggtacgaaagcggacactcatgacgagattctggaagggctgaactttaatctgacggagattcccgaggcacagattcacgagggctttcaagaactgctgcggactctaaatcagcccgatagccagctgcagctgacaaccggtaacgggcttttcctgagcgaaggcctgaagctcgtagacaagttcttggaagatgttaagaagctgtatcatagcgaggccttcactgtcaactttggggacacagaggaggctaagaagcagataaatgattacgttgaaaaaggcacccaggggaagattgttgatttggtcaaagagctagacagggacaccgtcttcgccctagtcaactatatcttctttaagggcaaatgggagcgtccattcgaggtcaaagataccgaggaggaagatttccatgtggatcaagttactaccgtcaaggttccaatgatgaaaagactaggcatgttcaacatccagcattgcaagaaactcagctcctgggtgctcctcatgaagtatctagggaatgctactgcaatattcttcctgccagatgagggaaagctgcagcacttggaaaacgagctcacacacgacattatcactaagttccttgaaaacgaggacaggcggagcgcctccctccatctgcccaagctgagcattacaggaacctatgacctgaagagcgtgttggggcagctaggtatcaccaaagtcttttctaatggcgcggatctatccggcgtcaccgaagaggcccccttgaaactgagcaaggccgtgcacaaagcagtactgacaatcgatgaaaaaggaaccgaagcagccggagctatgttcttagaagccatcccaatgagcatccctcccgaggtcaaattcaacaaaccctttgtcttcctcatgatcgagcagaatacaaaatcgcctctgtttatggggaaggttgtgaatccaactcagaagtag

SEQ ID NO: 2779 - DNA, 1257 bp, synthetic construct
  misc_feature 1..1257: note = source = /note="Description of Artificial Sequence: Synthetic coding sequence"
  source 1..1257: mol_type = other DNA
atgccaagtagcgtttcttgggggatactccttctcgccgggctgtgctgccttgtgccggtcagcctcgccgaagatcctcaaggcgatgcggcgcagaaaaccgatactagtcatcatgatcaagatcatcctactttcaataaaatcaccccaaatctggccgaattcgccttctccctgtaccggcagctggcacatcagtctaattccactaatatcttcttttccccagtttctatcgccaccgccttcgccatgctatcattgggcaccaaggccgatacgcatgatgaaatactggaaggactgaactttaaccttacggaaattcctgaagctcagatacatgagggctttcaggagctcctcagaactttaaaccagcctgactctcagctgcagctgactactggcaatggactgttcctcagtgaaggcctgaaattagtggataagttcttggaggacgtgaaaaagctttaccacagcgaggccttcacagtgaattttggcgacactgaagaagctaaaaagcagattaatgattacgtcgagaagggaacccaggggaagattgttgaccttgtcaaggagctagacagggataccgtcttcgcattggtgaattatattttctttaaggggaagtgggagcgcccatttgaagtgaaagacactgaggaagaagattttcatgtcgaccaggtgaccaccgtgaaagtccccatgatgaaaagactggggatgttcaacattcagcactgtaaaaagctgtctagttgggttctgctcatgaaatacttaggcaacgccaccgccatttttttcttacctgacgaaggtaagctgcagcacctggaaaatgaactgactcatgatattataacgaagttcttggagaacgaggaccgacggtccgcgtcactgcatctgcccaagttgtccataacaggcacatacgacctgaagagcgtcttaggtcaactgggtattacgaaagtgttttccaacggagctgatctgtcgggtgtgaccgaggaggctccccttaagctgtctaaagcggtgcataaagccgtgctaacgattgacgagaagggaacggaagctgccggggctatgtttcttgaggccattcccatgagcatcccacccgaagttaagttcaacaaaccattcgtttttttaatgattgagcagaacactaaatcacccctctttatgggtaaggtggtcaatcccacccaaaagtag

SEQ ID NO: 2780 - DNA, 1257 bp, synthetic construct
  misc_feature 1..1257: note = source = /note="Description of Artificial Sequence: Synthetic coding sequence"
  source 1..1257: mol_type = other DNA
atgcctagcagcgtgtcctgggggatccttctactcgccgggctttgttgtctggtcccggtgagtcttgccgaggatccccagggcgatgctgcccaaaaaactgatacctcccaccacgatcaagaccaccccacatttaataagatcacacctaatttggcagagtttgcattctcgctttatcggcagctggcccatcagtctaacagcactaacatattcttctcacctgtctcaatagccacggcctttgctatgctgtcactcggtacaaaggcggacacacacgatgaaatcctcgagggcctcaatttcaatcttaccgaaatcccggaagcccagattcatgaaggtttccaagaactgctcaggaccctcaatcagccagattcacaactgcaattgacaacaggaaatggactattcctgagtgaaggccttaaactggtcgacaagttccttgaagatgtcaaaaaactctaccatagcgaggccttcaccgtgaactttggtgacactgaggaggctaagaagcagatcaacgattatgttgagaagggaacacaggggaagattgtggatctagtgaaggagcttgaccgggacactgtcttcgcgctggtaaactacattttctttaagggcaaatgggagagaccgtttgaggtgaaagatacggaggaggaagacttccacgtggaccaggttaccactgtgaaggtgccgatgatgaagaggctggggatgttcaacatccagcactgcaagaaactatcctcttgggtccttctgatgaagtacctaggaaacgctacagcgatattttttttgcccgacgaaggtaaactgcagcatttggaaaacgagcttactcatgatatcattacaaagttcctcgagaatgaagataggcgatccgctagtctgcaccttccaaaactcagcattaccgggacctatgatctaaagtcagtcctggggcagctagggatcactaaggtcttctccaacggagcagatctgtccggcgtcaccgaggaagcgccccttaagttgagtaaggccgtgcacaaggcagttctcacgatagacgagaaagggacagaggccgcaggcgccatgttcctagaagccattcccatgtctataccccccgaggtcaaatttaacaaacccttcgtttttctgatgatcgaacaaaatacaaaaagtccgttgtttatgggcaaggtcgtgaaccccactcagaagtag

SEQ ID NO: 2781 - DNA, 1257 bp, synthetic construct
  misc_feature 1..1257: note = source = /note="Description of Artificial Sequence: Synthetic coding sequence"
  source 1..1257: mol_type = other DNA
atgcccagttctgtgtcctggggcatcctgctgctcgctggtctgtgttgtctggtgccagtttctctggccgaagacccccagggcgacgccgcccagaagacagatacgtctcaccacgaccaggatcatcccactttcaacaaaatcactcctaacctggctgaatttgccttcagtctctatcgacaactggcgcatcaatctaactcaaccaatatctttttctcgcctgtatccatagccaccgcttttgccatgttgagtctggggaccaaagccgacactcacgacgagatactggagggcctgaatttcaacctcaccgagattcccgaggctcagatccatgaaggtttccaagagctcttaaggaccctgaatcagccagactcccagctgcagctgacaaccggaaacggattattcctgagcgagggactgaagttagtagataaattccttgaggatgtcaagaaactgtaccactccgaagcgttcaccgtcaattttggagacacagaggaggccaagaagcagatcaacgactacgtggaaaaggggacccagggcaaaatcgtcgatttggtgaaggaactcgacagggacaccgtttttgccctggtgaattatattttctttaagggaaagtgggagcggcctttcgaggtgaaggacacggaggaagaggattttcacgtggatcaggtcacaaccgtgaaggtgccaatgatgaaacgcctcggaatgttcaacatccagcattgtaaaaagctctctagctgggtgctccttatgaaatatctggggaacgctaccgcaatcttctttctgcccgacgaggggaaacttcagcacctcgagaacgagctgacgcacgacatcattactaagtttctggagaacgaagacagaagaagcgcctccctgcatttacccaagctatcgattacagggacctacgacttaaaaagcgtcctgggccagttgggaatcacgaaagttttcagcaacggtgccgacctctcaggggtgactgaagaagccccgctgaagctttccaaggcggtacacaaagcggtgctgaccattgatgaaaaaggcacggaagctgctggcgctatgttccttgaggcgattcccatgagcatcccacctgaagtcaaatttaataagcccttcgtgttcttgatgatcgaacagaacaccaagtcaccactgtttatgggaaaggtggtgaaccccactcagaaatag

SEQ ID NO: 2782 - DNA, 1257 bp, synthetic construct
  misc_feature 1..1257: note = source = /note="Description of Artificial Sequence: Synthetic coding sequence"
  source 1..1257: mol_type = other DNA
atgccgtccagcgtctcctgggggattttattattggccggcctctgttgtctggtcccagtaagcctggcggaagacccacaaggcgacgctgctcagaagaccgatacatcacatcatgatcaggatcatccaacctttaataagatcaccccaaatctcgccgagtttgcctttagcctgtataggcagttggcacaccagtctaactccactaacatttttttttcgcccgtgtcaatcgcaaccgccttcgcgatgctcagcttaggtacaaaagcggacacgcatgatgagatccttgagggccttaacttcaatctgacggagattcctgaggcccagattcacgaagggttccaggaactacttaggacgctaaaccagcccgattcccagttacaactgacaaccggcaacggtctctttttgagtgaaggcttgaagctcgtcgataaatttttggaggacgtgaaaaagctataccattccgaggcttttactgtcaactttggcgatacagaggaggccaaaaagcagatcaatgattacgtagagaaaggcacacagggcaaaatagttgatctcgttaaagaactggaccgagatacagtgtttgcgctggtcaactacatcttcttcaaagggaagtgggaacgccctttcgaggtcaaggacaccgaagaggaggatttccatgtagatcaggtcactaccgtcaaggtgcccatgatgaagaggctcgggatgtttaacatccagcactgtaagaagctctcttcttgggtgcttctcatgaagtacctgggaaacgcaaccgctatttttttcctgcccgacgagggcaagctgcagcacttggagaatgagctgacacacgatatcattaccaagtttttggaaaatgaagaccggaggtccgcgagcctgcatctgcctaaactgtcaataacaggcacgtacgacctaaagtccgtgttgggacagctagggataacgaaggtattttccaacggggccgaccttagcggagtgaccgaagaggcccccctcaagctgtccaaggcagtgcataaggccgtactgacgatcgacgagaagggcacggaggcggcgggcgcaatgttcttggaggcaatccctatgtcaatacctcccgaggtgaagttcaacaagcccttcgtgttcctgatgatcgagcaaaacaccaaatctccactttttatgggcaaggtggtcaaccccacgcagaagtag

SEQ ID NO: 2783 - DNA, 279 bp, synthetic construct
  misc_feature 1..279: note = source = /note="Description of Artificial Sequence: Synthetic coding sequence"
  source 1..279: mol_type = other DNA
atgccatctagtgtgtcttgggggatcctgctccttgccggactctgctgtctggtcccggtttccctcgccgaagacccacagggagatgcggcccagaaaacggacacgtctcaccatgaccaggatcacccaactttcaataaaataacacccaacttggctgagtttgcattttcgttgtataggcagttggcccatcagtccaacagcactaatatctttttttccccagtttctatagccacagcttttgctatgctgtccctaggtacatag

SEQ ID NO: 2784 - DNA, 471 bp, synthetic construct
  misc_feature 1..471: note = source = /note="Description of Artificial Sequence: Synthetic coding sequence"
  source 1..471: mol_type = other DNA
atgccgtctagcgtctcgtgggggattcttttactggccgggttgtgctgtctggttccagtctccctggccgaagatcctcagggagacgccgcacagaaaacagacacctcccatcatgaccaagatcacccaacatttaacaagattactcccaatctcgcagaatttgcgttttccctgtataggcagctggcccatcagagtaattcaaccaatatctttttcagtccggtgagcattgctaccgccttcgcaatgttgtccctcggcaccaaggccgatacccacgacgagattcttgagggtttgaatttcaatttaaccgagattcccgaagcacagatccacgaaggctttcaagaactgctcagaaccctcaatcagcctgattctcaactccaactgactaccgggaacgggcttttcctttctgagggcctgaaactggtggacaaattcctggagtag

SEQ ID NO: 2785 - DNA, 354 bp, synthetic construct
  misc_feature 1..354: note = source = /note="Description of Artificial Sequence: Synthetic coding sequence"
  source 1..354: mol_type = other DNA
atgcccagctctgtgtcttggggcatcctcttgctggccggcctgtgttgtctcgtaccagtctcgctggctgaggatcctcagggggacgccgctcagaaaacagacacaagtcaccatgatcaggatcatcccacttttaataagatcactcctaacctcgccgagttcgcattctctctctaccgccaactggcacaccagtccaacagtacgaacatctttttcagcccagtgtccatcgccaccgcttttgctatgctgtccttgggcacgaaggcggatacccacgatgagatacttgaaggcctaaacttcaatctgacagaaattcctgaggcccagatccactag

SEQ ID NO: 2786 - DNA, 69 bp, synthetic construct
  misc_feature 1..69: note = source = /note="Description of Artificial Sequence: Synthetic coding sequence"
  source 1..69: mol_type = other DNA
atgccaagtagtgtgtcctggggaatcctgctgcttgctggcttgtgctgcctggtacctgtgtcttag

SEQ ID NO: 2787 - DNA, 435 bp, synthetic construct
  misc_feature 1..435: note = source = /note="Description of Artificial Sequence: Synthetic coding sequence"
  source 1..435: mol_type = other DNA
atgccgagcagcgtgagctgggggatattactgctggcgggactgtgctgcctggtgcctgtatctctcgcagaggacccacagggagacgcggctcaaaagacggacacctctcaccatgaccaggaccaccccacattcaacaagatcacccctaacctggcagaatttgcttttagtttatatcgccagctcgcacatcaatctaactctaccaacatcttcttttccccagtttctattgccaccgcttttgccatgctgagcttgggaactaaagctgatacgcacgatgaaatcttggaagggcttaattttaatctgaccgagatccccgaagcacagattcatgaagggtttcaggaactgctacggacgttgaaccaaccagactcacaactgcagctgaccaccgggaacggtctgtttctctag

SEQ ID NO: 2788 - DNA, 780 bp, synthetic construct
  misc_feature 1..780: note = source = /note="Description of Artificial Sequence: Synthetic coding sequence"
  source 1..780: mol_type = other DNA
atgtacagcaacgtcattgggactgtgacctccggaaaaaggaaggtatacctgctgtcgctgctcttgattgggttttgggattgtgttacatgccacggcagtccagtcgacatatgcactgctaaaccacgcgacatacccatgaacccgatgtgcatatacagaagtcctgagaagaaggcgacggaggacgagggaagtgagcagaaaatccctgaggcaacaaatcgccgcgtgtgggaactgagcaaagcaaatagcaggtttgcaactacattttaccagcacctggccgacagtaagaacgataacgataacatcttcctgtcccccttgtccataagcacagctttcgcaatgacaaagttaggcgcttgcaacgacactctgcagcaattgatggaggtctttaagtttgacacgatctctgagaagacctccgaccagatccactttttcttcgctaagttaaattgtagactatataggaaggcaaacaagtccagtaaactggtaagcgctaatagattgttcggtgacaagagccttacgtttaatgatttgtatgtcagcgatgcattccacaaggcctttctcgaagtgaacgaggaggggtccgaagccgccgcctccactgccgtcgtaatcgccggtcgcagcctgaaccccaatcgagtgaccttcaaagctaatcgtccctttctcgtcttcatcagggaagttccactcaataccatcatcttcatgggaagagttgctaacccatgcgtaaaatag

SEQ ID NO: 2789 - DNA, 1395 bp, synthetic construct
  misc_feature 1..1395: note = source = /note="Description of Artificial Sequence: Synthetic coding sequence"
  source 1..1395: mol_type = other DNA
atgtactctaacgtcatcggtacagttacgtctggtaaacggaaagtttatctactgtctctcctcctcattggcttctgggattgtgtgacctgccatggaagccctgtggatatctgtaccgctaaacccagagacattcccatgaaccccatgtgcatttaccggagccctgaaaaaaaggctacggaagatgaaggtagtgagcaaaaaattccagaggcaacaaatcgccgcgtatgggaactctctaaagcaaattctcgcttcgccaccactttttatcagcacctggcagattcaaaaaatgacaatgacaatattttcttgtccccgttgagcatttcaaccgcctttgccatgaccaagctgggcgcctgtaatgacactctgcaacagctcatggaggtatttaagttcgacaccattagcgaaaaaacgagcgatcaaattcacttcttctttgcaaaactgaactgtcgcttgtataggaaagcaaacaagtccagcaagctggtcagtgctaacaggctctttggagacaagagcctgacctttaatgaaacttaccaggacatatccgagttggtgtatggggcgaaattgcaacccctcgacttcaaggagaatgccgagcagagcagggccgctatcaacaagtgggtttccaataagacagaggggagaattactgatgtgataccttccgaggcgatcaatgaattaactgtgctggtcctcgtcaataccatatattttaagggactgtggaaaagcaagttttctcccgagaacacacgcaaggagttattctacaaggctgacggtgaatcttgctccgcgtcaatgatgtatcaggagggcaaatttcgatataggcgggttgctgaggggactcaggtactcgagctgcctttcaagggcgatgatattacgatggttctgatccttccaaagcccgagaagtccctggccaaggttgagaaagagctgactcccgaagtacttcaggaatggctcgatgagctggaagagatgatgctagttgtgcacatgccccggtttagaatcgaagacggcttctccctcaaagagcagctccaggatatggggctggttgatctcttcagcccagagaagtctaagctgccgggaatcgtggctgagggccgcgatgacctctatgtatcagacgctttccacaaggccttcctagaggtcaatgaagagggctcagaggctgctgcctctaccgctgtggtaattgctggaaggagcttgaaccccaaccgtgtgacgtttaaggccaaccgtccctttctcgtattcatccgcgaagtaccactcaacaccattattttcatggggcgtgtggccaatccctgtgtcaaatag

SEQ ID NO: 2790 - DNA, 1476 bp, synthetic construct
  misc_feature 1..1476: note = source = /note="Description of Artificial Sequence: Synthetic coding sequence"
  source 1..1476: mol_type = other DNA
atggccctcctgtggggattgctcgtgctctcttggtcttgcctgcaggggccctgttctgtgttctctcccgtgagtgctatggagcctctggggaggcagctaacctcaggccccaaccaagagcaggtttctcccctgaccctactgaaactcggaaatcaggagcccggcggacagacagctctgaagtcccctcccggagtttgctcacgggaccccacacccgagcagacccataggctggcccgggcaatgatggcgttcacagccgacttattctcattggttgcccaaacgagcacttgcccgaacctcattctctctccgttgtctgtagcactggctctatctcaccttgcactcggcgcccaaaaccacacccttcagcgacttcagcaggtgctgcatgcggggtctggtccatgcctgccccacctgttgtctcgcctgtgtcaggacctgggtccaggggcgtttagactggcagctagaatgtacctccagaagggcttcccgatcaaagaagattttctggagcagagcgagcagctgttcggtgctaaacctgtgagtttgaccggcaaacaggaagatgaccttgctaatataaaccagtgggtgaaagaggctacagaaggaaagatccaggagttcctgagcggtctgcccgaggacactgtcctgctcctcctcaacgctattcatttccagggattttggcgtaacaaattcgacccgtcacttactcagagagactcattccacctggacgaacagtttacagtacctgttgaaatgatgcaggcacgaacctatccactgcgatggttccttctggagcagcccgagatccaggtagcccatttcccattcaagaataacatgtcctttgtcgtattagtgcccacccattttgagtggaatgtatctcaagtcctggcgaatttgagctgggacacccttcatccgccgctcgtctgggaacgtcctaccaaggtgcgactgcccaagctctatcttaaacatcaaatggatctggtggccaccttgtcacaactggggcttcaagaactttttcaggctcctgaccttcgaggaatcagcgaacagtccttggttgtgtcgggagtgcagcaccagagcaccctggagctttcagaagtcggagtcgaggccgccgcagcaacctccatcgcgatgagccgaatgtccctgtcctctttcagcgtgaatcgcccatttctgttcttcatctttgaagacacgactggcctccccctctttgtaggatctgtgaggaatcctaatcctagtgctcctagagagctgaaggagcagcaggactcccccgggaataaggatttcctgcagtccctgaaggggttcccccggggcgataagctgtttggccctgacctgaagctggtgccacctatggaagaagattatcctcagttcgggagcccaaagtag

SEQ ID NO: 2791 - DNA, 1476 bp, synthetic construct
  misc_feature 1..1476: note = source = /note="Description of Artificial Sequence: Synthetic coding sequence"
  source 1..1476: mol_type = other DNA
atggctttactctggggcctccttgtgctaagctggtcctgcctacaggggccctgctctgtgttttccccagtgagtgccatggagccactgggaagacagctgactagcggcccgaatcaggagcaggtgtccccgcttaccctgttaaaactagggaaccaggagccaggcgggcaaaccgcgctgaagagtccaccaggagtatgttcgcgggatccaacccccgaacaaactcaccgcctggctagagcaatgatggcattcaccgcagatctattctcactggttgcacagacaagtacatgccccaatctgattttaagtcctctgagcgtcgcccttgccttgtcacatctcgccctgggagcacaaaatcatactctgcagagattacagcaagtcctgcatgcgggttcagggccatgtctgccacatctgctgagccgcttgtgccaagacttggggcccggagcatttaggttggccgccaggatgtatctgcaaaagggcttcccaatcaaggaggattttcttgaacagtcagaacagctgttcggggcaaaaccagtgtcgttgactggaaaacaggaagatgacttagctaacattaatcagtgggtcaaggaagccacggaggggaagatacaggagtttctctccggtcttcctgaggataccgtgcttctcttattgaacgcaattcacttccaggggttctggcgaaacaagtttgatccttccttaacacagagagatagttttcaccttgatgagcagtttaccgtgccagtagagatgatgcaggccaggacctaccccctgaggtggttcttgctcgagcaacctgagatccaggttgcccacttccctttcaagaataatatgtccttcgtggtgctggttcctactcatttcgagtggaatgttagccaggtgttagccaacttatcatgggacaccctgcacccccccctggtttgggaacgtcctaccaaggtccggctgcccaaattgtacttgaagcatcaaatggatctggtggccacacttagtcagctaggactgcaggaactctttcaggctccagacctgagaggcattagcgaacagagcctggtagtcagcggagtccagcaccagtcgacattagagctctctgaagtcggggtggaggccgccgctgccaccagcatcgcaatgtctcggatgagtctttcttcatttagcgttaataggccattcttgttcttcatcttcgaggacacaaccggactccccttgtttgtgggatccgttcggaatcctaatccgtctgcgccacgcgaactcaaagagcagcaggacagcccaggaaataaggattttctgcaatcccttaaaggtttccctagaggggataagctcttcgggccggacttgaaactcgtccctccaatggaggaggattatccccagtttggctctcctaaatag

SEQ ID NO: 2792 - DNA, 1284 bp, synthetic construct
  misc_feature 1..1284: note = source = /note="Description of Artificial Sequence: Synthetic coding sequence"
  source 1..1284: mol_type = other DNA
atggcgctgctgtggggcctcctcgtcctgagttggtcctgcctacagggtccatgttcagtgttttcccccgtttcagccatggagcctttgggtcgacagctgacctcgggccctaatcaggaacaggtgtcgcctcttaccctcctcaagctagggaatcaggtgcagccaggcgctcagaaccacacactgcaacgcctgcagcaggtgcttcacgctggttctggaccgtgtctgcctcacctgctgtcacgcctctgtcaggacctgggcccaggcgcctttaggttggccgcgcggatgtacctgcagaaagggttcccaatcaaagaggatttcttggaacagtcagagcagctgtttggagccaagccggtatccttgaccggtaaacaggaggacgatttggcaaacatcaatcaatgggtgaaggaggctacagaaggcaaaatccaggagttcctgagtgggttgccggaggataccgtcctgctcctgttgaacgctattcacttccagggcttttggcgaaacaaattcgacccctctttgacccagcgcgatagctttcacctcgatgaacaatttacagtgccagtggaaatgatgcaggcgcgtacctacccccttcggtggtttttgctagaacaacccgaaatacaggtggcacattttcctttcaagaataatatgtcatttgtggttttagtgcctacgcattttgagtggaatgtgagccaggtgctggctaatttgtcttgggataccctacacccccctctggtgtgggaaagacctacaaaggtgagactgcctaagctgtatctcaaacaccagatggatctcgtcgccactctctcgcaacttggtctccaggagttatttcaggcacccgacctaagaggaatttctgagcagtcgttagtggtttctggcgtgcagcatcagagtaccctcgagctctcggaggtgggcgtagaggctgccgctgccactagtatcgcgatgagcagaatgtccttaagttcgttcagcgtgaacaggccgtttcttttcttcatttttgaggacacaacggggttaccgctgtttgtcggttcagtcaggaaccccaatccgtctgccccccgcgagctgaaagaacagcaggactcgccagggaataaggatttcctccagagtctgaagggatttccccggggggacaagctgttcggcccagacctgaaacttgtcccaccaatggaggaggattacccacagtttgggagccctaaatag

SEQ ID NO: 2793 - DNA, 768 bp, synthetic construct
  misc_feature 1..768: note = source = /note="Description of Artificial Sequence: Synthetic coding sequence"
  source 1..768: mol_type = other DNA
atggcattgttatggggactgttggtcctgtcctggtcttgcctccaggggccgtgcagtgtattctcccccgtaagcgccatggagcccctgggtaggcagttgacttctggccctaaccaggagcaggtgtcccccctgaccttgctgaagctcggcaatcaggagcctgggggccagactgctttaaagtcccccccgggcgtgtgcagcagagatcccacaccagagcagacacatagattggcccgcgccatgatggcatttaccgctgatctcttctcacttgtcgcacagacatctacctgccctaacctgattttgtcccccttgtccgtggctctcgctctgtctcatttagcacttggcgcccagaaccatacactgcaacggctgcagcaggtactgcacgcagggagcgggccttgcctgcctcacttgctgagcaggctgtgccaggacctcggccccggcgcctttaggctggctgcgcgcatgtatctccagaagggattccccattaaagaagacttcttggagcaaagcgagcagttattcggagccaagcctgtgtctctgactgggaagcaggaagatgacctggcgaatatcaatcaatgggtcaaggaagccaccgagggcaagatccaggagttcttgagcggattaccagaggacacagttctactccttctcaacgcgatccatttccagggattctggagaaacaagtttgatccctctctcacacagagagactcattttag

SEQ ID NO: 2794 - DNA, 1503 bp, synthetic construct
  misc_feature 1..1503: note = source = /note="Description of Artificial Sequence: Synthetic coding sequence"
  source 1..1503: mol_type = other DNA
atggcatctcgcttgactctgttgactttgctgctgctcctgcttgctggcgaccgtgcaagcagtaatccaaacgctacctcctcctcttcacaggaccccgaaagcctgcaagaccgcggcgaggggaaagtggctacaaccgtcatcagcaagatgctgtttgtggaacccatcttagaggtgagtagcctccccacaaccaactccacaaccaattcagcgacgaagataacagcaaataccactgatgagcctaccacgcaacctaccactgagcccacaacccagccaacgatacagcccacccagcccaccacacagctccctacagattcccccacgcaaccaaccaccggctccttttgtccaggccccgtaactttgtgctccgacctggagagccacagcaccgaagcagttctgggcgacgcgctggtggattttagcctgaaactgtaccacgccttctctgcaatgaagaaggttgagacgaatatggcattttcacccttctcgattgcctctcttctcacgcaggtgcttctgggcgccggtgaaaacactaagacaaacctagaatctatcctcagctacccaaaggatttcacgtgcgttcaccaagccttgaagggatttaccacaaaaggcgttactagcgtcagccagatcttccacagccccgatttggccattagagacacgtttgttaatgcttctcgtacgctctattccagttctccacgcgtcctctccaacaattctgatgcgaatttggagctgattaatacttgggttgccaagaacaccaataacaagatttcaagactgttggattccttgccatccgatacacggctggtcctcttgaacgcaatttacttgagtgccaaatggaaaactacatttgaccctaaaaaaacgcggatggaaccatttcactttaagaacagcgtgatcaaggtgcccatgatgaacagcaaaaagtaccccgtcgcccacttcatagaccagaccctgaaggccaaagtcggacagctccaactgtctcacaacctgtcactggtcatcttggttccccagaatctcaagcaccggctggaggacatggaacaggctttgagccctagtgtctttaaagccatcatggagaaactggagatgtccaagtttcaaccaacactcctcacacttcctagaatcaaagtcactacatcgcaggatatgctatccatcatggaaaaactggaatttttcgatttcagctacgaccttaacttatgcgggctcacagaggatcccgaccttcaagtgagcgcaatgcagcaccagaccgtactggagctcaccgaaaccggcgtggaagctgccgccgcttcagccatctccgtggcgcgcacccttcttgtgttcgaagtacagcagccattcttgttcgttctatgggaccagcagcacaagttccctgtgtttatggggcgagtgtacgaccccagagcctag

SEQ ID NO: 2795 - DNA, 1518 bp, synthetic construct
  misc_feature 1..1518: note = source = /note="Description of Artificial Sequence: Synthetic coding sequence"
  source 1..1518: mol_type = other DNA
atggcctcaaggttaacattgttgaccctgctgcttctgctgctggcaggcttcttggaacctcaagatcgggcttccagtaatccaaacgctacctccagttcctcacaagatcccgagagcctccaggacaggggagagggaaaagtggccaccactgtgatcagtaagatgctgttcgtggagcctatactggaggtctcttctcttcccacaactaactccacaactaatagtgcaactaaaatcactgccaacactacagatgaacctacaacccagcctaccactgaacctaccacccagccaaccattcagcccacccagccaaccactcagttgccaacagactcccccacccaacctaccaccggctccttttgtcctgggccagtaactctttgttctgatctggagtcacatagcactgaggccgtgttaggcgatgcattagtggatttcagtcttaagctgtatcatgctttttctgctatgaagaaagtagaaactaacatggccttctcccctttctctatcgcttccctgctgacccaagtccttctgggagctggcgagaacactaaaaccaatctggaaagcatcctctcatacccgaaggattttacttgcgtacatcaggctttgaaaggctttactacgaagggtgtaacttccgtctcccagatatttcactcacccgatcttgctattcgggatacattcgtgaacgcatcccgcactctatacagttccagtccacgcgtgctgtcgaacaactctgatgctaatctggagctgatcaacacttgggttgcaaaaaataccaacaacaagatcagtcgtctacttgactcgcttcctagtgatacgcgcctggtcctcctcaatgcaatttacctgtccgcgaagtggaaaaccacattcgacccgaagaaaactaggatggaaccttttcatttcaagaactcggttatcaaggtcccaatgatgaattcaaaaaagtacccagtggcgcattttattgaccagaccttgaaagctaaggtgggtcagcttcaactgtcccataacctctcgctggtcatcctggtgcctcagaaccttaagcacagactggaagatatggaacaggcgctgagcccatcagtgtttaaggccattatggagaaactggagatgtccaagtttcagccgactctgctgacactgcccagaattaaggtgacgacctcgcaggacatgctaagtatcatggagaagctcgaattctttgactttagctatgatctaaatttgtgcggactgaccgaggaccctgacctccaggtctcggcaatgcagcatcagacggtactggagctaactgagaccggtgtagaagctgccgctgcaagtgccatcagtgtcgccaggaccctgctcgtgttcgaggttcaacagccctttttgttcgtgttgtgggatcaacagcataaattccctgtctttatgggaagggtttatgatccccgcgcgtag

SEQ ID NO: 2796 - DNA, 1347 bp, synthetic construct
  misc_feature 1..1347: note = source = /note="Description of Artificial Sequence: Synthetic coding sequence"
  source 1..1347: mol_type = other DNA
atgttatttgtggagcccatcctggaggtgagttcactccctacaactaattctactacaaattcagccaccaagataactgccaataccactgacgaacctactacgcagcccaccacagaacctacaacacagcccactatacagccgactcaaccgacgacccagcttcctacagactcacccacacagcccacaaccggatccttctgtccagggccagttaccctgtgttctgacttagaaagtcactccaccgaagcagtgttaggcgatgcccttgtggacttctctctcaaactctaccatgcgttctctgcaatgaagaaagttgaaactaatatggctttctcaccctttagcatagccagcctgctgacacaggtgctgcttggggctggcgaaaatacaaagaccaacctagagtccattttgtcctacccgaaggattttacgtgcgtgcaccaggccttgaagggcttcaccacaaagggagtgacaagcgtgtcccaaatatttcactctcctgaccttgccattcgggacactttcgtaaatgcctccaggacgctgtacagttcgagtcccagggttttgtcaaataactctgatgctaacctggagttgataaatacctgggtcgctaaaaatacgaacaacaagatctcaaggctgctggacagcttgcctagtgacaccaggctggtccttctcaacgcaatctacctgagtgcgaagtggaaaacaacgtttgatcctaagaaaactcgcatggagcccttccacttcaaaaactcagtgatcaaggtgcctatgatgaacagtaaaaagtatcccgtggctcacttcatagaccaaactctgaaggccaaagttgggcagctgcagttatcccataatttgagcctggttatcctcgtgccacagaatcttaaacatagacttgaagatatggagcaggctttatcacccagtgttttcaaggctatcatggaaaagctggagatgtcaaagtttcagccaactttactgacactgcctcgtatcaaagttaccacgtcccaggacatgctctctatcatggagaagctagagttctttgacttcagttacgatctgaacttatgtgggctgaccgaggatcccgatctgcaagttagcgcaatgcagcaccaaacagttctggagctgaccgaaacgggcgtggaggcagcagcagcaagcgcaatatcagtggccagaaccctgctggtttttgaggtccagcagcccttcctttttgtcttgtgggaccaacagcacaagtttccagtgtttatggggcgcgtttacgaccctcgagcttag

SEQ ID NO: 2797 - DNA, 483 bp, synthetic construct
  misc_feature 1..483: note = source = /note="Description of Artificial Sequence: Synthetic coding sequence"
  source 1..483: mol_type = other DNA
atggcctccaggttgacgctgctcacacttttactgctgctgcttgctggtgatagggctagcagtaatcctaatgccacaagctcaagctctcaggatccggagtcccttcaggaccgcggcgaaggcaaagttgcaacaaccgtgatctccaaaatgctgtttgtggaacctatactggaggtgagcagtctgcctacaaccaacagtactacgaatagcgccacaaaaattacagctaacaccacagacgaaccaaccacacagcccacaaccgaaccaactacacaaccaaccattcagcccacccagccgaccacccagttacctactgattccccgactcagcctacaacagggtctttctgccccggcccagtcacactatgctccgacctggagtcccactccactgaagccgtgcttggagatgcacttgtggacttttctctgaaactctatcatgctttcagcgcgatgtag

SEQ ID NO: 2798 - DNA, 402 bp, synthetic construct
  misc_feature 1..402: note = source = /note="Description of Artificial Sequence: Synthetic coding sequence"
  source 1..402: mol_type = other DNA
atggcctcacgcttgaccctgctgacccttcttcttctgctgctcgctggggacagggcttcaagtaacccaaacgcgaccagtagtagttcccaggaccccgagagcctgcaggacagaggtgaagggaaagtggctactaccgtcatttctaagatgctcttcgtggagccaatcttagaggtgtcaagcctccccacaaccaacagcacgaccaattcagccacaaaaatcaccgctaacaccaccgacgaacccaccacccaaccaactactgaacccactacccagccaaccattcaaccaactcagccaactacacaactgcccaccgacagcccaacccagcctggatacgccctcaatcacggagagatcggcatcctgaggttctttctatag

SEQ ID NO: 2799 - DNA, 3405 bp, synthetic construct
  misc_feature 1..3405: note = source = /note="Description of Artificial Sequence: Synthetic coding sequence"
  source 1..3405: mol_type = other DNA
atgccagtgtttcacacacggaccatcgaatccatcctggaacccgtggcacagcagattagccacctcgtcatcatgcatgaggaaggagaggttgacggaaaggccatccctgatctgactgcgcctgtggccgccgtgcaggccgcggtctctaatctcgttcgggttggcaaggaaaccgtgcagacaactgaggaccaaattctaaaacgggatatgccccctgctttcatcaaagtcgagaatgcctgtacaaagctggtgcaggccgctcagatgttgcagagcgacccgtactccgtgccggcaagggactatcttatcgacggctcccgcgggatcctgagcggcacctctgacctgctcctcactttcgacgaggccgaggtcaggaagattatcagagtgtgcaaaggaattttggaatacctcacagtggctgaagtggtggaaaccatggaggatctggtgacctacaccaaaaatctagggcccggcatgacaaagatggctaaaatgatcgacgagcgacagcaggagcttactcatcaggagcacagggtgatgctcgtcaatagcatgaacaccgtgaaagagctgttgcccgtcctgatttccgctatgaaaatttttgtgactaccaaaaactctaaaaatcagggcattgaagaagcactgaagaatcgaaattttaccgttgaaaagatgagcgcggaaatcaatgagataatcagggttctccaattgacaagctgggatgaagacgcatgggctagtaaagatacggaagccatgaagcgcgctcttgcctctattgatagtaaattaaatcaagctaagggttggctgagggacccatccgcgtcgccaggcgacgcaggggagcaggccatccgtcagattctggatgaagcgggaaaggttggggagctatgcgctggcaaggagcgccgcgagatcctgggcacttgcaagatgctgggtcaaatgaccgatcaagttgccgatttacgagccaggggccagggctcctctcccgtggccatgcagaaggcccaacaagtgtcacaagggctggacgttctcactgctaaggtcgaaaatgccgcccggaagttggaagccatgaccaatagtaagcaatcaattgctaagaaaattgacgcggcccaaaattggttagcggacccaaacgggggccccgaaggggaagaacagatcaggggagccttagctgaagcacgcaagatcgccgagctttgcgacgaccccaaagaacgggatgacatcttacgctcacttggagagatctccgcgctcacaagcaagctggccgatctgagaaggcagggtaaaggagattcccccgaggcccgagcattagcgaagcaggtcgcgactgccctccaaaacttgcagacaaagactaatagggccgtggcaaattccagaccagcgaaggccgcagtgcacctggaggggaaaatcgagcaagcacagaggtggatcgacaatcccacggtggatgaccgtggggtgggccaggcagccatccgcggtctggtagcagaaggtcaccggttagcaaatgtgatgatggggccataccgtcaggatctgttggctaagtgcgatagagtggaccaactgacagcacaacttgccgacctcgccgcccgtggagagggggagtccccacaggcccgcgctctggcaagccagctgcaggacagtctgaaagacctcaaggcccggatgcaagaggcgatgacacaagaagtaagcgatgtatttagtgatactaccacgccaatcaaactactcgcagtggcagcaacagcgccgcctgatgcccccaatcgggaagaagtctttgatgaacgggcggcaaactttgagaaccacagcggaaagctcggtgctaccgcagaaaaggccgctgctgtgggtaccgccaataagtcaactgtcgaagggatacaagcatcagtcaaaacagcccgagaattgaccccacaagtggtgtccgctgctcggattctgctcagaaaccctggtaaccaggcggcctacgagcatttcgaaactatgaagaaccaatggatcgataatgtggagaaaatgaccgggttggtggacgaagctatcgacacaaagagcttgctagacgcttctgaagaagcaatcaaaaaggatctggataaatgcaaagtcgctatggctaacattcagcctcaaatgctggtagctggggcgacttctatcgcaaggcgcgccaaccgcatcctacttgtcgccaaaagagaagtagaaaacagtgaagaccctaagtttcgcgaggctgtcaaagccgccagcgacgagctgtcgaaaaccatctcacctatggtgatggatgccaaagctgttgcgggaaacattagtgatcctggactccagaagtcttttctggattcgggataccgcatcctcggggctgtggcgaaggttcgcgaagcgtttcaacctcaggaacctgatttcccacccccaccgccggatctagagcagttgcgacttaccgacgagctggccccccctaaacctccccttcctgaaggggaagtgcctccaccaagaccgccgcctcccgaagagaaggacgaggagttcccagagcagaaagcaggtgaggttatcaatcagcccatgatgatggctgccagacagctacacgatgaagcacggaagtggagctcaaaacccggcatcccagcagcggaggtgggcattggagtagtggcggaggcagatgcggctgacgccgcaggatttcccgttcccccagacatggaagatgactacgagcctgagctgctgctcatgccatcaaatcagcccgtcaaccagccaatcctggccgctgcacagagccttcatcgggaggctacgaaatggtccagcaagggtaatgatataattgccgccgccaagcgcatggccttactgatggcagagatgtcacgactggtgagaggggggagcggcactaaacgagctttaatacagtgtgctaaggatattgctaaggcgtcggatgaagtgacaaggctcgccaaggaagtagccaagcagtgcaccgataagcgaatccgcacaaacctcctgcaggtgtgcgagcgaatcccaacaatatcaacgcagctgaaaattttgtctacagtgaaggcaacgatgttaggcaggacaaatatctccgacgaagagtctgaacaggcaacagaaatgctggttcacaatgcccagaatcttatgcagagtgtgaaagaaactgtcagggaggccgaggctgcctcgatcaagattcggaccgacgctggctttacgctccggtgggtccggaaaactccttggtatcagtag

SEQ ID NO: 2800 - DNA, 1335 bp, synthetic construct
  misc_feature 1..1335: note = source = /note="Description of Artificial Sequence: Synthetic coding sequence"
  source 1..1335: mol_type = other DNA
atgtgtctgtgctctggccgcaagaccattctggaaatttaccccggacagtttcagccgtccctgtgtcacaaatttatcgccctgtccgacaaggagggtaaactgctgaggaattatacgcagaacatcgatacactcgagcaggtcgcgggcatccaacgcataatccagtgccacggaagcttcgcaaccgccagctgtctcatatgcaaatacaaggtcgattgcgaagctgttagaggtgatatattcaatcaggtggtgccacggtgccccagatgcccagcagacgagccactagctattatgaaaccggagattgtcttttttggcgagaatttgccagaacagttccaccgagccatgaaatatgacaaagatgaagtcgatctgctgatcgttattggcagtagtctcaaagttagacctgtggcattgataccatctagtattccacacgaggtgccccaaatactcattaacagagaaccccttccccatctccacttcgacgttgagttgcttggggactgcgacgtaatcattaatgagctgtgtcacagactggggggggagtatgcaaagctgtgttgcaatcctgtgaagctgagcgaaattaccgaaaagcccccccgcacccagaaagagcttgcatacctcagcgagctccctcctacacccctccacgtttccgaggacagctccagccccgagaggaccagcccacctgattcttcagtgattgtcacgcttttggatcaggctgctaagtcaaacgatgacctggatgtgtctgagtccaaaggttgcatggaggagaagcctcaagaggtgcagacgagcaggaacgtggaatccattgcagagcagatggagaaccctgatcttaaaaacgtgggtagttccacgggggagaagaacgagagaacttccgttgccggcaccgtgcgtaagtgctggccgaatcgcgttgcaaaagagcagatttctcgcagactcgatggaaaccagtacctgttcctgcccccaaatcgctacattttccacggggccgaagtgtattctgacagcgaagacgacgtactttcatcaagttcctgtggcagcaatagcgactccggaacctgccagagcccaagcctggaggagccaatggaggatgaatccgagattgaggagttttataatgggctggaggacgagcccgatgtgcccgaacgagccggaggagccggtttcgggaccgatggggacgaccaggaagccatcaacgaggcaatctccgttaagcaggaagtcaccgacatgaattacccctccaacaagtcctag

SEQ ID NO: 2801 - DNA, 1335 bp, synthetic construct
  misc_feature 1..1335: note = source = /note="Description of Artificial Sequence: Synthetic coding sequence"
  source 1..1335: mol_type = other DNA
atgtgcctctgctcaggcaggaagacaattctcgaaatctaccctggacagttccaaccttcgctctgccataagtttattgctttgtctgacaaggaggggaaactcctcagaaattacacacagaacatagataccctggagcaggtcgctggcatccagcggataattcagtgccatggatcattcgcaactgcaagttgcctgatctgcaaatacaaagtggattgcgaggcagtgcgcggggacattttcaaccaagtcgtgccgagatgtcctcgctgtcctgcagatgagccactggctattatgaagcctgagattgtcttttttggcgagaatcttcccgagcagtttcaccgagccatgaaatacgataaagatgaagtcgacctactgatagtgatcgggtcctctcttaaggttaggccagtggcattgatcccttctagtatcccacacgaggtcccacaaatcttaatcaatcgggagcccctcccccatttgcactttgatgtggagctactgggggattgcgatgtcattattaacgagctgtgccatagactgggtggtgaatacgctaagttgtgttgcaatcctgtgaaactcagtgagatcacggagaaaccccctaggacacagaaagagctggcgtatttgagcgaactgccacctactcccctccatgtaagtgaggattcgtccagccccgagcgtacgagcccccccgattcctctgtcatcgtcacactgcttgaccaggctgctaaaagcaacgatgacctggatgtctccgaatctaagggctgcatggaagaaaagccccaagaagttcaaacctcccgtaatgtggagtccattgccgaacagatggagaaccccgatctcaaaaatgttggatcatccacgggggaaaaaaacgagagaacatctgtggccgggacagtacgaaaatgctggcctaaccgagtggcaaaggaacaaattagcagaagattggacgggaaccaatacctcttcttgcctccaaacagatacatctttcacggcgccgaggtttactctgactcggaggacgacgtcctgagctcctcaagttgcgggtccaattctgattctggcacatgtcaatctccttcgcttgaggagcctatggaggatgagtctgaaattgaggaattttacaatggcttagaggatgaaccggacgtgcccgagcgagctggcggagccggattcggtacagacggagatgaccaggaagcgataaacgaggccatttccgttaagcaggaggttactgacatgaattacccttcgaacaagtcatag

SEQ ID NO: 2802 - DNA, 1359 bp, synthetic construct
  misc_feature 1..1359: note = source = /note="Description of Artificial Sequence: Synthetic coding sequence"
  source 1..1359: mol_type = other DNA
atgtttgatatagagtatttcagaaaagatccaagacctttcttcaagttcgcaaaagagatctaccctgggcagtttcagccctctctctgccacaaattcatcgcactctctgacaaggaaggcaaactcctgagaaactacactcagaatattgacacactggaacaagtggcaggtatccagagaattatccaatgtcacggtagtttcgcaacagctagttgtctaatctgcaagtacaaggtggactgtgaagccgtaaggggagacatctttaatcaggtcgtccctaggtgcccgaggtgccccgcagatgagccgctggccataatgaaaccggaaattgtgttttttggcgagaaccttcctgaacagtttcaccgtgccatgaagtacgacaaggacgaggtggatttgctgattgttatcggctccagccttaaagtacgtccagtggctctgatcccatcctctatccctcatgaagtgccccagatactcattaacagggagcccctccctcatctccattttgacgtggaactcctcggtgactgtgatgtcattataaacgaactgtgtcacagactgggaggtgagtacgcgaagctgtgctgtaacccagtcaaattgtccgaaatcaccgagaagccaccgagaactcagaaggaattagcatatctgtccgagctccccccgacacccttgcacgtttccgaggactcatcaagccccgaacgaactagtccgcctgactcgagtgtgatagtcactctactggatcaggccgctaaatcgaatgacgacctcgatgtgagcgagtcgaaaggttgtatggaggagaagccacaggaagtacagacatcacggaatgttgagagcattgcagagcagatggagaatccggaccttaaaaatgtgggatcctcaacaggcgagaaaaacgagcggacctccgtggctggaactgttcggaagtgttggcctaatcgcgttgctaaggagcagatatcccgtaggctggatgggaaccagtatctgtttctgccaccgaaccgatacatcttccatggggccgaagtttactctgactctgaagacgatgtcctcagtagttcctcctgtggaagcaattcagattcggggacatgccagagtccctcgctggaggagcccatggaggacgagagcgagattgaggaattctacaatggtctggaggatgagccagacgtccccgagcgggccgggggcgcaggtttcgggaccgatggcgacgatcaggaggccatcaacgaggctatctccgtgaagcaggaagtgaccgacatgaactatccaagcaataagagttag

SEQ ID NO: 2803 - DNA, 987 bp, synthetic construct
  misc_feature 1..987: note = source = /note="Description of Artificial Sequence: Synthetic coding sequence"
  source 1..987: mol_type = other DNA
atgtcagtgaactatgctgcaggactgagcccttatgcagataagggtaaatgcgggttacctgaaatttttgatccacccgaagaactggaacggaaggtgtgggagcttgcgaggttagtgtggcagtcttcttctgtggtctttcacaccggggctggaatctctactgcctccggaatacctgactttagaggcccccatggcgtctggacaatggaggaaaggggtctggcgcccaagttcgatactactttcgaaagcgctcggcccacgcagacacacatggccctggtgcaattggagcgggttggactgcttagatttctggtttcccaaaatgtggatggtttgcacgtgaggtctggtttccccagggataaactggccgagcttcatggtaatatgtttgtggaggagtgcgccaaatgtaagactcagtacgtgcgagatacagtggtgggcactatgggcctgaaagcaactggacgcttgtgtactgtcgccaaagcccggggccttagggcctgccgcaacgcagaccttagcataacgctggggacatctctgcagataagaccctctggcaacttaccgcttgccacaaaaagaagaggaggaagacttgtgattgttaatctccagcctacaaagcacgaccggcacgccgatctccgcattcatggatacgtcgacgaggtgatgacgagactcatgaagcacctggggttggaaatacccgcctgggatggtccaagggttctcgaaagggccctaccgccattaccacgcccgcccacgccaaagctcgagcccaaagaggagtctcccacgcggattaatggctctattcctgccggacctaagcaggaaccttgtgcacagcacaatggtagcgaacccgcttccccaaagcgcgagagacctacttcccccgccccacatcgcccacccaaaagggttaaggctaaagccgttcccagctag

SEQ ID NO: 2804 - DNA, 1068 bp, synthetic construct
  misc_feature 1..1068: note = source = /note="Description of Artificial Sequence: Synthetic coding sequence"
  source 1..1068: mol_type = other DNA
atgtctgtcaactacgcggctggtctgtcaccatacgctgataagggaaagtgcggactgccagaaattttcgacccacccgaggagctcgaacgcaaggtatgggaattggctagacttgtgtggcaaagcagcagcgtggtctttcacactggggctgggatcagcacagcgtcaggaatccctgatttccgaggacctcatggcgtatggactatggaggagcgcggactagctcccaagttcgacacgacttttgagagtgcaagaccaacccagacacacatggcattggtacagttagagcgagtgggactacttcggttccttgtttctcagaacgtcgacggactccacgtacgaagcgggttcccccgagacaagctggccgaactccacggaaacatgttcgtcgaagaatgcgccaaatgtaagacccaatacgtccgggatacggttgtgggtacaatgggattaaaagccaccggtagactgtgtaccgtggcgaaagcccgggggctcagggcatgtaggggggaacttcgggataccattctagattgggaagactctctgcctgacagggacctcgccctggctgacgaagcaagcagaaatgcagacctgagtattacactcgggacttcactgcaaattaggccgtccggcaatcttcctctagccacaaaacgaagaggcggtaggcttgtgattgtgaatctccaacccacaaagcacgaccggcacgcagacctgcggatacacggctacgtggacgaagttatgacacggctgatgaagcacctaggactcgagattccggcttgggacggccccagggtgctagaaagagcccttccccccctaccgcggccccccacaccgaagctagaacccaaagaggagagccccacccgaattaacggatctatccccgcaggtccaaaacaggagccatgtgcacagcacaatgggtctgagccagcctcaccaaagcgggagcggccgacctcacccgctccccaccggcctccaaaacgcgtaaaggcgaaggctgtacccagctag

SEQ ID NO: 2805 - DNA, 852 bp, synthetic construct
  misc_feature 1..852: note = source = /note="Description of Artificial Sequence: Synthetic coding sequence"
  source 1..852: mol_type = other DNA
atggaagaaagaggcctggcccctaagttcgacaccacattcgaaagcgcccgcccaacacaaacccatatggcactcgtccagctcgaaagggtagggctcttgcgattcctcgtctctcagaacgtagacgggctacatgtgcgaagtggattccctagagataagctggccgaactccacggaaatatgttcgtcgaagagtgtgccaaatgcaagacgcagtacgtcagggacacagtagtgggaacgatggggctgaaggccactggaaggctctgtaccgttgcgaaggccaggggcctgagagcatgtcgaggagagctgagggatactattctggattgggaggacagcttgcctgaccgcgatctcgccctggcagacgaagcaagccgtaatgccgacctgtccatcacactggggacctctctgcaaatcagacccagcgggaatctccccctggccaccaagcgacgcggggggagactggtcattgtgaatcttcagcctactaaacatgatagacacgccgatctgcgcattcatggatatgtggatgaagtgatgactcgcctgatgaagcatctaggcctcgagattcccgcgtgggacggtccccgggtcttggaaagagcactgccccctctgcctcggccacctacccctaagctggagccaaaagaagaatctcccactagaatcaacgggagcatccctgccggacctaaacaagagccatgcgcacagcacaatggctctgagcccgcttccccaaaaagggagaggcccacttcacccgctccacaccgtcctccaaagagggtgaaagctaaggcggtgcctagctag

SEQ ID NO: 2806 - DNA, 1575 bp, synthetic construct
  misc_feature 1..1575: note = source = /note="Description of Artificial Sequence: Synthetic coding sequence"
  source 1..1575: mol_type = other DNA
atgactgaggataaggtcactggaacactggtgttcaccgtgatcacagctgtgctgggaagtttccagttcggctacgacattggtgtcattaacgcccctcagcaggtgatcatttcccactaccgccatgtgctcggagtaccactggacgaccggaaagcaatcaacaactatgtcattaactctaccgacgagctaccgaccatctcttattctatgaatcccaaaccaacaccttgggctgaggaagagactgtggccgccgcacagttgattacaatgctctggagtttaagtgtgagcagcttcgctgtgggcggaatgacggcctcctttttcggcgggtggctgggcgatacacttggtcggattaaagccatgctggtcgccaacattttaagcctagtgggagctctgcttatggggttttctaagctgggaccctcccatatcctgatcattgcaggaaggtctatatccgggttgtattgcggcctgatttccggcctggttccaatgtacattggtgaaatagccccaactgctctgcgtggcgccttgggaaccttccaccagctggccattgtcaccggaatactcatttcccagattatcggtctggaattcatcctggggaattatgatctttggcacatcctactcggcttatccggagtcagagccattctgcagtccctgcttttgttcttctgtccagagtcccctcgctacttgtatatcaagcttgatgaggaggtcaaggccaaacaatctctaaagaggctgcgcggatatgatgatgtgacaaaagatatcaatgagatgcgaaaagagcgtgaggaagcctctagcgagcaaaaagtcagtattattcagctctttacgaactcctcataccgtcaacccattttagtcgccctaatgttacatgtcgcccagcagttttcaggcattaacgggattttttactattcaacgtccatcttccagactgcggggatctccaagcctgtttacgctaccatcggggtgggagcggtaaacatggtttttactgcggtctcagtgtttctcgtagaaaaggccggtcggcgttctctgttcctcattggaatgtccggcatgttcgtgtgtgctatcttcatgtcggtgggtctggttctgctgaataagtttagctggatgagctacgtctcaatgatagccatctttctgtttgtaagcttctttgagattggccccggtcctataccatggtttatggtggccgagttttttagccagggcccacggcctgcagccctggctattgccgccttctccaactggacatgcaacttcatagtggcattgtgttttcagtacatcgccgatttctgcggaccgtacgtcttcttcctgtttgctggcgtgctcttggccttcaccctgttcacgttcttcaaagtgcccgaaactaaaggtaagagcttcgaggagatcgctgctgagttccagaagaaatccggttcagctcataggccaaaggcagccgtggagatgaagtttctgggagctacagagactgtgtag

SEQ ID NO: 2807 - DNA, 1218 bp, synthetic construct
  misc_feature 1..1218: note = source = /note="Description of Artificial Sequence: Synthetic coding sequence"
  source 1..1218: mol_type = other DNA
atgcacctcaatcggatcaaggccatgctcgtcgccaatattctgagcctcgtgggtgccctactcatggggttttccaaactggggcctagccacatcctcattattgcaggccgctcaatttccggactctattgcggattgatttctggacttgtcccgatgtatatcggtgaaatcgctcccacagcattacgaggtgctctcggtaccttccatcagctggccatcgtaaccggaatcttgatcagccaaattatcggtttagagttcatcctgggaaactatgacctttggcacattctgctggggttgagtggggttagagctatcctgcaaagtttactgctcttcttttgtcccgaatcccccaggtatctgtacataaagctggacgaagaggtgaaggctaaacagtcactgaagcggctcaggggctatgatgacgttaccaaggatatcaatgagatgcggaaggagagagaagaagcatcatctgagcagaaggtgagcatcatccagttattcactaactcaagttaccgacaaccaatcctggtggcactgatgctccacgtcgcgcaacagttctcagggattaacggtattttctattacagtaccagcatattccagactgccggtatctccaaaccagtgtacgccaccattggtgtcggcgcagtgaatatggtgtttacggccgtgagcgttttcttggtggaaaaggccgggcgtcgatccctcttcttaatcggaatgtccggtatgttcgtttgcgccatattcatgtctgtgggactggtcctgctgaataagtttagttggatgtcatacgtatctatgattgctatctttttatttgtgtcgtttttcgaaatcggccccggacctataccctggtttatggtcgccgaattcttcagccaaggacctagacccgcggcgctcgcaatagccgccttcagtaactggacgtgcaacttcattgtggctctgtgctttcagtacatcgctgatttctgtggaccttacgtgttcttcctgttcgccggcgtgctgctcgctttcacacttttcacatttttcaaagtgcccgagactaaagggaaatcattcgaggagatcgccgccgagtttcagaagaaatccggttctgcacatcggcctaaggctgccgtcgaaatgaaattcctcggcgctacggaaacagtgtag

SEQ ID NO: 2808 - DNA, 1290 bp, synthetic construct
  misc_feature 1..1290: note = source = /note="Description of Artificial Sequence: Synthetic coding sequence"
  source 1..1290: mol_type = other DNA
atggcggcccaaggctacggttactacagaactgtaatattctctgccatgttcggcggctacagcctgtattacttcaacaggaaaaccttttcatttgtcatgccttcgctggtggaggagatccccctagacaaagatgatctcggctttattacatccagccaatcagcagcatacgcgattagcaaattcgtcagcggagtattgtcagatcagatgagtgccaggtggctgttctcctctggactgctgttggtgggcctagtgaacatctttttcgcttggtcatccaccgttccagtcttcgcagctctttggtttttaaatggactggcccaaggactgggttggccaccctgtgggaaggtactgcggaaatggttcgaaccatctcagttcgggacctggtgggccatcctctctacgagtatgaacctggccgggggcctaggacctatactggccactattttggcccagagctactcctggcggtccacgttggctttgtcaggggcgttatgcgtggtcgtgtctttcctgtgcctgctgttgatccacaacgagccagcggacgttggccttagaaacctggatccgatgccatccgagggcaaaaaggggtccctgaaggaggagagcacacttcaagagctgctgctgtctccatatttgtgggtgctctcaacaggttacctggtcgtgtttggagtgaagacgtgctgcacagactgggggcagttcttcctgatccaggagaaagggcagtctgcactagtgggatctagttacatgagcgctctggaagtgggcggcctggtggggtccatcgccgcaggatacctgtccgaccgcgccatggccaaggccggtctctccaactatggaaatcccaggcacggcctgctcctgtttatgatggccgggatgaccgtgagcatgtatctgtttcgtgtgaccgtcacatcagactcaccgaagctgtggatattggtcttgggagcggtattcggcttctctagctacggacccatcgctttattcggcgtgatagctaacgagagcgcccctcccaatctctgcggaacgtcacatgccatcgtagggctgatggccaatgtggggggattcctggctgggttgccgttttccacaatcgcaaagcactattcttggagtactgcgttctgggtagcagaagttatttgcgcagcgtcgactgccgcttttttcttgctgaggaacataagaaccaagatgggcagggtctctaaaaaggctgagtag

SEQ ID NO: 2809 - DNA, 1356 bp, synthetic construct
  misc_feature 1..1356: note = source = /note="Description of Artificial Sequence: Synthetic coding sequence"
  source 1..1356: mol_type = other DNA
atggccgctcagggttacggctattaccgcaccgtgatcttttctgccatgtttggcgggtattctctgtactatttcaaccgtaagacattcagtttcgtgatgcccagtcttgtggaggagatcccactggacaaggacgatctgggattcatcaccagttctcagagcgctgcttacgccatttccaaattcgtgtctggtgtcttgagcgatcaaatgtccgccagatggctgttctcatcaggcctgctcctggttgggctggtgaatatcttttttgcctggagctctaccgtcccagtgtttgctgcgctgtggttcctcaacggactcgcgcagggcctgggctggcccccgtgtggcaaagtcctgcgtaaatggttcgaacctagccagtttggcacatggtgggccatcctctctacatctatgaatctcgccggcggcctgggccctattttggccacaatcctggcccaaagctattcctggcgctccactttggccctttccggggcactctgcgtggttgtgtccttcctgtgcctgctcttgattcacaacgaaccagccgacgttggtttgcgaaatctggatcccatgcccagtgaaggtaaaaagggatccctaaaagaggagtcaaccttgcaggaattactactgagcccctacctatgggtactgtcaacaggatatctggtcgtgtttggggtcaagacctgttgtactgattggggacagttctttctgattcaggagaagggtcagtccgctctggtgggttctagttacatgtccgcattggaagttggtggactggtcggaagcatagccgctggatatctcagcgaccgggccatggctaaagccggtctgagcaactatggcaatccccgccatggcctgttgctatttatgatggcaggcatgaccgtgagcatgtacctgttccgcgtgaccgtcaccagcgactctcctaaggatgtagcgttctggacccttgcgcttcacccactggccgaactgacagggtttactgaacatgaactctggattctggtccttggcgcagtctttgggttcagtagctatgggccaatcgctctgttcggagtcatcgccaacgaaagcgctcctccaaacctctgcgggaccagccatgccatcgtgggattgatggccaacgttgggggctttctagctggattgcctttttccaccatcgcaaagcattactcctggagcactgctttctgggtggcagaggtgatatgtgctgctagtacagctgctttttttctgctccggaacatcagaacaaagatggggagagtctctaaaaaggccgagtag

SEQ ID NO: 2810 - DNA, 1716 bp, synthetic construct
  misc_feature 1..1716: note = source = /note="Description of Artificial Sequence: Synthetic coding sequence"
  source 1..1716: mol_type = other DNA
atgacccgggccggggaccacaaccgacaacgtggttgctgcggcagtcttgcagattatctcacttctgctaagttcctcctgtatctaggtcactccctctccacttggggcgaccgcatgtggcatttcgccgtctccgtgttcctggtcgaactctacggcaacagcctgcttctgaccgcagtatacggcctcgtagtggccggtagcgtgctggtcctcggcgcaatcatcggggactgggtggacaagaatgcaagactgaaagtggcacagacaagccttgtggtccagaacgtctctgtcatcctatgtggtatcattctaatgatggtgttcttgcataagcatgaactgttaaccatgtatcatgggtgggttctgacatcttgttacattctgataataacgattgccaatatcgccaatttggcttccaccgcgacagccatcaccattcagcgcgactggattgtggtcgtcgcaggcgaggacaggagcaagctggcaaatatgaatgccaccatccgaagaatcgaccaattaaccaatatactggcacccatggccgtagggcagatcatgaccttcggctcaccggtgatcggttgcggtttcattagcggctggaatctggtgagtatgtgtgttgaatacgtcctgctgtggaaggtgtaccagaaaacgcctgccctggctgtcaaagcagggcttaaggaggaagaaacagaacttaaacagctgaatttacataaagataccgaaccgaaacccctggagggaacgcatctcatgggcgttaaagattcaaatatccacgagctcgagcatgagcaagagccgacatgtgctagccaaatggccgagccattccgcaccttccgggatggctgggttagttattacaatcaaccagtttttctggctgggatgggcctcgcatttctgtatatgaccgtactgggcttcgattgcatcaccactggctatgcctacactcagggcctgagcggctcaattctttctatcctaatgggggcttccgcaattaccggcatcatgggtacggtcgcatttacttggctgcgtcgcaagtgcggtctggtgaggactggcctcatctccggcctagctcagctctcctgtctcatcctctgtgtaatcagcgtttttatgccgggttcccctctggatctgagcgtcagccctttcgaggacatcagaagtcgattcattcaaggggaatccatcacacccaccaaaattccagaaatcacaaccgagatttacatgtctaatgggagtaatagcgcaaatatagttccagaaacctcacctgaaagcgtccccatcatttctgttagcctgctgtttgctggtgtaatcgctgcacgcatcggcctgtggtcattcgacttaaccgtcacacagttgttgcaggagaacgtcatagagtccgagcgaggtattataaacggcgtacagaacagcatgaactacctactggatctccttcacttcattatggttatcttagctcctaacccagaggccttcgggctgcttgtccttatatctgtgtcctttgtagccatgggccacatcatgtacttccgatttgctcaaaacactttgggcaacaagctgttcgcctgtgggccagatgcaaaggaagtgcgaaaggagaatcaagccaacacatctgtcgtatag

SEQ ID NO: 2811 - DNA, 603 bp, synthetic construct
  misc_feature 1..603: note = source = /note="Description of Artificial Sequence: Synthetic coding sequence"
  source 1..603: mol_type = other DNA
atgaccagagccggggaccacaatcgtcagagggggtgttgtgggtcactcgcggactacttaacaagcgccaaattcttattgtatttagggcattcgctttctacatggggcgacagaatgtggcactttgcagtctctgtctttctggttgagctgtatggcaacagtctccttctcaccgcggtgtatggtctggtggtcgccgggtctgtgctagtcctcggagcaattattggcgactgggttgacaagaacgccaggctgaaagttgcccagacgagcctggtagtacaaaacgtcagcgtaatactctgtggtatcatcctgatgatggtgttcctccacaagcacgaactgctgaccatgtatcacggatgggtgctgacctcctgttacatccttataatcaccattgctaacatcgccaacctcgcaagtactgccaccgcgattacaattcagcgagattggatcgtcgtggtggcgggggaggaccgaagcaaactcgccaatatgaacgccacgatccgacgaatcgaccagttgacaaacatcctcgcccctatggctgttggccaaatcatgactttcgggtcttag

SEQ ID NO: 2812 - DNA, 78 bp, synthetic construct
  misc_feature 1..78: note = source = /note="Description of Artificial Sequence: Synthetic coding sequence"
  source 1..78: mol_type = other DNA
atgaccagggccggcgaccacaaccgccagcgcggctgctgcggcagtctcgctgactaccttacttcagccaaatag

SEQ ID NO: 2813 - DNA, 78 bp, synthetic construct
  misc_feature 1..78: note = source = /note="Description of Artificial Sequence: Synthetic coding sequence"
  source 1..78: mol_type = other DNA
atgaccagagctggggaccataatcgccagcgggggtgctgcggaagtctggccgactatttgacctccgctaagtag

SEQ ID NO: 2814 - DNA, 168 bp, synthetic construct
  misc_feature 1..168: note = source = /note="Description of Artificial Sequence: Synthetic coding sequence"
  source 1..168: mol_type = other DNA
atgacccgggcaggagatcacaacagacaacggggttgttgcggaagcttggcagattacctaacatccgccaagtttctgctgtacctgggacactcactgtcaacctggggcgacaggatgtggcactttgccgtgagcgtattcctggtggagctgtacggatag

SEQ ID NO: 2815 - DNA, 300 bp, synthetic construct
  misc_feature 1..300: note = source = /note="Description of Artificial Sequence: Synthetic coding sequence"
  source 1..300: mol_type = other DNA
atgcgagcctcgattcacaaaaaacttagaaaatctagcggaatcgttacgatcttgtatagcgcttttgtcctcgtcagcacatccgatatggctgaggaaacagaggacgcctggcctcgctgctatttgcagtttctggccttgctgttgacaagcacctccgctagggccgcggcagcgatcgcggccgctgaggaacctgccggttctccttcggtaatgacccgcgctggcgatcacaaccggcagcgcggctgttgcggatctctcgccgattacctgacctctgctaagtag

SEQ ID NO: 2816 - DNA, 504 bp, synthetic construct
  misc_feature 1..504: note = source = /note="Description of Artificial Sequence: Synthetic coding sequence"
  source 1..504: mol_type = other DNA
atgggcgtgaaggattcaaatatccacgagcttgaacatgagcaggaacccacatgcgctagccagatggccgagccttttagaaccttcagagatggctgggtgagctattacaaccagccagttttccttgctggtatggggctcgcattcctttacatgacggtgctggggttcgattgtataacaacaggatacgcttatacacaaggcctgtcaggttcaatactctcaattctgatgggcgccagtgccattaccggtattatgggcacagtggcttttacatggcttcgacgcaagtgtgggctggtgagaaccggattaatctccggtttagctcaactgagctgtttgattttgtgtgttatatccgtgtttatgcccggctcccccttagacctgtctgtgtcaccatttgaggatattcgctcacggtttatacagggcgaatcaattacccccactaagattccggagatcaccaccgaaatccacgtgtag

SEQ ID NO: 2817 - DNA, 2496 bp, synthetic construct
  misc_feature 1..2496: note = source = /note="Description of Artificial Sequence: Synthetic coding sequence"
  source 1..2496: mol_type = other DNA
atggagagaccctggggtgccgcggacggtctgtctaggtggcctcacgggctgggtctactcctactcctacagctgctcccaccgtctacactcagccaggatcgccttgatgcccccccaccaccagccgcacccttacccagatggagcgggcctattggggtctcatgggggctaagagctgcagctgcgggaggggccttccctcgcggcggccggtggaggcgaagcgcccctggggaagatgaggagtgtgggagggtcagagacttcgtcgccaaactggctaacaacacacaccagcacgtgtttgacgatcttagaggttccgtaagcttgagctgggttggtgattctactggcgtgattctggtgctcactacctttcacgtgccactggttattatgactttcggccagtcaaagctgtacagatccgaagattatggcaaaaacttcaaagacattacagacctgatcaacaatacctttatcagaactgagttcgggatggctatagggcctgaaaattctggcaaagtggttctgaccgccgaagtctctggcgggagcagggggggcagaatcttcagaagctcagattttgccaagaatttcgtacagaccgatctgccttttcaccctctcactcagatgatgtactcaccccagaacagcgactacctgctggccttatcaaccgagaatgggctctgggttagcaagaattttggcggaaaatgggaagaaattcacaaggcagtatgcctggcgaagtggggttccgacaatactatcttctttacgacctacgccaacgggtcctgcaaggcagacttgggagcactcgagctttggaggacttcagacttaggtaaaagcttcaaaactatcggggtgaagatttactcctttggcctgggtggcagattccttttcgcctccgttatggctgacaaggacacaacacggcggattcacgtctccaccgatcagggggatacttggtctatggcccagctgccctccgtgggacaagaacagttctacagtattctagccgccaacgacgatatggtgttcatgcatgtggatgagcctggggacactggtttcggcaccatttttacgagcgacgacagggggattgtttattccaagagtctggataggcacctttacaccactacgggaggagaaacagacttcacgaatgtcacttcacttaggggagtttacataactagcgtcttaagcgaagacaactccatacagaccatgattaccttcgaccaggggggccgttggacacacctgcgtaaacccgagaacagtgaatgtgacgctaccgcgaaaaacaaaaatgaatgcagtcttcacattcatgcaagttattcaatatcccagaagcttaatgtccctatggctcctctgagtgagcctaacgcagttggaatcgtgatcgcccacggctcagttggggacgctatcagcgttatggtccctgacgtctatatctccgacgatggcggatatagctggacaaagatgctggaggggcctcattattacacgattctggacagtggtggcatcattgtggccatcgagcacagctcccgtcccatcaatgtaattaaattcagtacagatgagggacagtgttggcagacatacaccttcactcgcgatccgatctattttacaggcctagccagcgagcccggggccaggagcatgaatatttccatatggggcttcactgaaagcttcctcacaagccaatgggtgagctatacaatcgactttaaagacatcttggagcggaattgtgaagagaaagattacacaatatggctggcccactcgaccgatcccgaggattatgaggacggttgtatactgggttataaggaacagtttctcagactgaggaagtccagcgtttgtcagaatggacgggactacgtggtcaccaaacagccaagtatctgcctatgctctctcgaagactttctttgcgacttcggctattataggccagagaatgattccaaatgcgtggaacagccggagctcaaaggccacgaccttgaattctgcctgtacggccgcgaagaacatctcaccactaatggataccggaaaattcctggagacaagtgtcagggtggcgtgaaccctgtccgggaggtcaaagatctgaagaaaaaatgtacctctaactttctgtcccctgaaaagcaaaatagtaagtccaacagcgttcccattattttagcgattgtggggctgatgctcgtgacggttgtcgcgggggtattaattgtgaaaaagtacgtgtgcggtgggcggttcctggtgcataggtacagtgttttgcagcagcacgctgaggccaatggggtggatggagtggacgcactcgatactgcatcccatacaaacaagagcgggtatcacgacgattctgatgaggacctgttggaatag

SEQ ID NO: 2818 - DNA, 2085 bp, synthetic construct
  misc_feature 1..2085: note = source = /note="Description of Artificial Sequence: Synthetic coding sequence"
  source 1..2085: mol_type = other DNA
atgacatttggtcagagcaagctctataggagtgaagactacggcaagaacttcaaagacatcacagacctcattaataatacattcattaggaccgaatttggaatggcaatcggccctgagaactccggcaaggtcgtcctcaccgcagaggtttctggcggctctagaggaggtaggatattccgcagctctgactttgctaagaacttcgtgcagactgatctgccctttcacccactaacacaaatgatgtacagtccgcaaaatagcgattatctgctggcattgtccaccgagaacgggctctgggtatctaagaattttggcggaaagtgggaggaaatccacaaagccgtgtgtctcgccaagtggggaagcgacaacacgattttttttacaacatatgctaacggcagctgcaccgatctgggagctttggaactatggcgtacaagcgacctcggtaaaagtttcaagactatcggagtaaaaatttactcctttggtctgggaggacggtttctcttcgcctcagtgatggcagataaagatacaacccgtagaatccatgttagtaccgaccagggagatacatggtccatggctcagctgcccagcgtaggacaggaacagttctacagtatcctggcagccaatgacgacatggtcttcatgcacgtggatgaacctggtgataccggcttcgggacaattttcaccagcgacgaccggggtatcgtctactctaaatccttggatcgtcatctctacacaaccaccggcggggagacggattttactaacgtgacaagcctacggggtgtatatataacctcagtgttatcggaggataactctatccagactatgatcacgtttgaccagggaggccgctggactcatcttcgaaagcccgaaaactcggagtgtgatgccacagcaaagaacaaaaatgaatgttcgctccacattcacgcttcgtattccatctcccagaaactaaacgttcccatggctcctttgtcagagccgaacgcggtgggaatcgtcatcgcacatggttctgtgggcgacgcaatttccgtgatggttcctgatgtttacattagcgacgacggtggctacagctggacgaaaatgctggaggggccccactattatacaattctggattctgggggtattatcgtcgccattgagcattcgtcacgaccaataaacgtcataaagttctccactgacgaaggccaatgctggcaaacctatacctttactcgagacccaatttattttactggcttagcgtcagagcctggtgcacggtctatgaatatttccatctggggattcaccgagtctttcctcaccagtcagtgggtgagctacaccatagactttaaggacattctggaacgaaattgcgaggagaaagactataccatctggttagcccattcaaccgaccccgaagactacgaagacggttgcatcctcggatataaggagcagtttctaaggctgcgtaaaagcagcgtgtgtcagaacggacgcgattacgtggtgacgaaacaacctagcatatgcttgtgttcactggaagatttcctctgtgatttcggatactacagacccgagaatgactctaagtgtgttgagcagcctgaacttaagggccatgacctggagttttgcctctatggaagagaggagcatctcaccactaatggctatcggaagattccgggggataaatgtcagggcggggtgaacccggtgcgcgaggttaaggatctgaaaaaaaaatgcaccagtaacttccttagccccgaaaagcagaattctaagtccaatagtgtgcccatcatactggcaattgtcggcctgatgctggtgacagtggtcgctggggtactgatagtcaaaaaatacgtttgcgggggccgattcctggtccaccggtactctgtcttgcagcaacacgccgaagcgaacggcgtcgatggtgttgacgccctcgacacagcaagtcacactaataagtctgggtaccacgatgactctgacgaagatctactcgagtag

SEQ ID NO: 2819 - DNA, 1446 bp, synthetic construct
  misc_feature 1..1446: note = source = /note="Description of Artificial Sequence: Synthetic coding sequence"
  source 1..1446: mol_type = other DNA
atgaaagtgctgtctgaggggcagctgaaactatgtgtggtgcagcctgtgcacctgacatcgtggttgctcatttttttcattcttaagtccatatcttgtctgaagccagcgcggttgcctatttatcagcggaaacccttcattgccgcttggaacgccccaacagatcagtgcctgatcaaatataacttgcggctcaatctgaaaatgttccccgtgattgggtcccccctggccaaggcaagggggcagaacgtaacaattttctatgtgaacagactcggctattatccctggtacacatcgcagggtgtccctattaacggtggattgccgcagaacatttccttacaggtgcatttggagaaggcagatcaagatataaactactatataccagcagaagatttcagtggcttggcggtgatagactgggaatactggcgcccccaatgggctaggaattggaatagtaaggacgtgtatcggcagaaaagtaggaagctcatcagcgatatgggaaagaatgtctcagccaccgacatagagtatttggccaaggtgacttttgaagaatcggccaaggccttcatgaaagagacaattaaactcggcattaaatccagaccaaaaggactgtggggatactatttgtacccggactgtcacaattacaatgtgtacgcccccaactatagtggatcttgtccagaagacgaagtcctacgcaacaatgagttatcctggctgtggaactccagcgccgccctttacccgagtatcggggtatggaaaagcctcggggatagcgaaaatattctgcggttttcaaagttccgggttcatgaatccatgcgcatctctactatgacaagccacgattatgcgctgcctgtcttcgtgtatactagattaggctatagagacgaacccttgttcttcttgtccaaacaggatctggtgtccaccattggcgagtccgccgcactgggggcagcaggaattgtcatctggggcgacatgaatctgaccgcctccaaggccaactgtaccaaggtgaagcaatttgttagctccgatttgggctcctatatcgcgaacgtgactcgagccgcagaggtttgttcgttacacttgtgtcgcaataacggacgctgcatccgcaagatgtggaatgccccctcatatctgcacctgaaccctgcgtcttaccacatcgaggcgtccgaggacggggagttcaccgtgaagggcaaagcatccgacacagatctcgctgttatggctgacacattttcatgtcactgttatcagggctatgagggagccgactgccgtgaaataaagacagccgatggttgctccggcgtgagccctagcccaggcagcctgatgacgctgtgtctgctgctgctagcttcctacaggtccattcagctctag

SEQ ID NO: 2820 - DNA, 1536 bp, synthetic construct
  misc_feature 1..1536: note = source = /note="Description of Artificial Sequence: Synthetic coding sequence"
  source 1..1536: mol_type = other DNA
atgggcgtgttaaagtttaaacacatcttcttccgatccttcgtaaaaagctcaggagtcagccagattgtcttcacctttttgctaatcccttgttgcctgacgcttaacttcagggccccccctgtgatccctaatgtgccattcctttgggcgtggaacgcccccagcgagttttgcctgggcaagttcgatgagccgctggatatgtccctgttctcttttatcggttctccaagaatcaacgccactggccagggcgtcacaattttctacgtggatagactggggtactacccttacatcgactcaattactggagtcactgttaatggagggatccctcaaaagatcagtttgcaggatcatcttgacaaggctaagaaagacatcaccttttatatgcccgtggataacctaggtatggctgtgatcgattgggaggaatggcggcccacctgggcgcgaaattggaaacccaaagatgtttataagaaccgcagcatcgagctggttcagcagcagaatgtgcagctatcattgactgaggccactgagaaagccaaacaggaattcgaaaaggccggtaaggactttctcgtggaaactattaaactcgggaagctactgagaccaaatcatttgtggggatattacctgtttcccgactgctataaccatcattataaaaaacccgggtataacggcagctgtttcaatgtagagatcaaaaggaacgacgatcttagttggctatggaatgagtcaactgccctgtatccatccatatatctcaatactcagcagagtcccgtagcagctaccctgtacgtacgaaaccgcgtgagagaagccattcgggtaagcaagatccctgacgctaagagcccactccctgtgtttgcatacactcgtatcgtgtttactgaccaagtgcttaagtttctgagtcaggacgaactggtgtataccttcggagaaactgtagcgttgggcgctagcggtatagtcatttggggaacgctgagtattatgcgctcaatgaagtcctgcttgttactggacaattatatggagaccattttgaatccctatattataaatgtgacgctcgcagcgaaaatgtgctcccaggtgttatgtcaggagcaaggggtttgcatcaggaagaactggaattcctcagattatttgcaccttaacccagataacttcgccatccagttagagaagggagggaagttcacagtccgcggaaagcctactcttgaagacctggagcagttttcagagaaattctattgcagctgctatagcacactgtcgtgtaaggaaaaggctgatgtgaaagataccgatgctgtggatgtgtgtattgctgatggcgtttgtatcgatgcattccttaagccccccatggaaaccgaagagcctcaaatcttctacaacgcctccccctctaccctgtctgcaactatgtttatttggcgacttgaggtatgggatcaagggatctctcgcattggcttcttttag

SEQ ID NO: 2821 - DNA, 1530 bp, synthetic construct
  misc_feature 1..1530: note = source = /note="Description of Artificial Sequence: Synthetic coding sequence"
  source 1..1530: mol_type = other DNA
atgggtgtgctgaaattcaagcacatcttcttccggtcgtttgtcaagagtagtggggtatcccagattgtgttcacattcctgcttatcccatgttgtcttacgttgaactttcgcgccccgcccgttatacccaacgtgccttttttgtgggcttggaacgccccgtcggagttctgcctgggaaagttcgacgagccactcgacatgagcctgttttcttttatcggctcacccagaatcaacgccacgggccagggggtcacaattttctacgtggatcggcttgggtattacccgtacatcgacagtattacaggagttactgtgaacggggggatcccccagaagatttctcttcaagaccacttagacaaggctaagaaagacattaccttttacatgccagtcgataacctgggtatggccgtgatcgactgggaagagtggagacccacctgggcaagaaactggaagcctaaggacgtttacaaaaaccgttctattgaacttgtgcaacagcaaaacgtccagctatccctgacagaagctacagaaaaagctaaacaggaatttgaaaaagctggcaaagacttccttgtggaaacaattaaattgggcaagctgctgaggccgaatcacttatggggctattacctatttcctgactgctataatcatcattacaagaaaccggggtataatggatcatgttttaacgtggaaattaaaagaaatgacgatttgagctggctttggaatgagtctacagcgctctaccccagcatctatcttaacacccaacagagtcctgtcgccgccaccctctatgttaggaatcgggtgagggaggccataagagtctccaagattcccgatgccaagagccccctcccagtattcgcttacacacggattgtgtttactgatcaagtgctgaaatttctcagccaggatgaacttgtctacacattcggagaaacggttgcactgggggccagtgggattgttatctggggaaccctctccattatgagaagcatgaagtcttgcctccttctggataattatatggaaacgatcctgaacccctacattatcaacgtgacgctggctgctaagatgtgctcgcaggtgttgtgtcaggagcagggcgtgtgcatcaggaaaaactggaactccagcgactacctccacctgaatccagacaacttcgctattcagctagagaaaggagggaaatttactgtccgtggaaagccaacgctggaagacctcgagcagttcagtgagaaattctactgcagttgttactcaacgctttcttgtaaggaaaaagccgacgtcaaggataccgacgccgtcgacgtgtgtatcgctgatggagtctgcattgacgcctttctcaagccacccatggagactgaagagccgcaaatattttacaatgcttcacccagtacactgtcagctaccatgttcatagttagcatcctgttcctgattatttctagcgtggcctcgctgtag

SEQ ID NO: 2822 - DNA, 243 bp, synthetic construct
  misc_feature 1..243: note = source = /note="Description of Artificial Sequence: Synthetic coding sequence"
  source 1..243: mol_type = other DNA
atgggagtactaaaatttaagcacatctttttccggagcttcgtcaagtcctcaggggtctcacagatcgtcttcactttcttgctgattccctgctgtttgacacttaacttccgcgcccccccggttatccctaatgttccattcttgtgggcatggaatgctccgtcagaattctgtctcggcaaatttgatgaaccgctggacatgagcctcttttcattcatcggcagcccccgatag

SEQ ID NO: 2823 - DNA, 1530 bp, synthetic construct
  misc_feature 1..1530: note = source = /note="Description of Artificial Sequence: Synthetic coding sequence"
  source 1..1530: mol_type = other DNA
atgggcgtgctcaagttcaaacacattttttttcgctcatttgttaagtcatcaggagtaagtcagatagtcttcacgttcctcctaattccttgttgcctcactctaaacttcagggccccacctgtgatccctaatgtgccgttcttgtgggcctggaacgcacccagtgaattctgtttaggaaagtttgacgagcccctggatatgagtttgttcagtttcatcggctctcccagaattaatgcgacaggtcagggggttacaattttttatgtggatcgattaggatattatccgtatattgattccattactggcgttacggtcaatggaggcattccccagaaaatatctttacaggatcacttggacaaggccaaaaaggatatcactttctacatgccagtggacaacctcggcatggctgtgatcgactgggaggagtggcgcccgacctgggcaagaaactggaagcctaaagatgtgtacaagaaccggtccatagaactggtgcagcaacagaacgttcagctgtctttgactgaagcaacagagaaggccaaacaggagttcgagaaagccgggaaagatttcctggtggagaccatcaaattgggaaagctgctgaggcccaatcacctgtggggctactacctgttccccgactgttacaaccatcactacaaaaagcccggctataacgggtcatgttttaacgtggaaattaagcgaaacgatgacctttcctggctttggaatgaatccacagctttgtacccctctatttatctgaacacccagcagtcaccagtagctgcaaccctgtatgtgagaaaccgggtgagggaagccatccgcgtgagtaagatcccagacgccaagtccccattacctgtatttgcttatacaagaatcgtcttcactgaccaggtgctgaaattcctaagccaggacgagctggtatacaccttcggagagacagtcgctctgggggcttccggaattgtgatctggggaaccctaagcatcatgaggagcatgaagagctgtcttctgttggataactacatggagaccatactgaacccgtatattattaacgtgaccctggcggctaaaatgtgctcacaggtgctgtgccaagaacaaggcgtgtgtatcagaaaaaactggaactcaagtgattatctgcacctcaaccccgacaacttcgccatccagttggaaaagggcggaaagtttaccgtgcgggggaagccaaccctagaggacctagagcagttttccgaaaaattttattgtagttgctattccacgctttcctgtaaagagaaggctgacgtgaaagatacagacgcggtggatgtgtgtatcgctgatggcgtttgcatcgacgcctttctgaaaccacctatggagactgaagagcctcagatcttctacaatgccagtccttcaacattatccgcaaccatgttcatcgtgagtattctgtttctcatcatctcctcagtggcatccttatag

SEQ ID NO: 2824 - DNA, 1530 bp, synthetic construct
  misc_feature 1..1530: note = source = /note="Description of Artificial Sequence: Synthetic coding sequence"
  source 1..1530: mol_type = other DNA
atgggcgtgctgaagttcaagcacatattttttcggtcatttgtaaaaagctctggggtgtctcaaattgtgttcacatttctgctgatcccgtgttgtctgaccctgaatttccgagccccaccagtgataccaaacgtgccattcttgtgggcctggaacgcaccatccgagttctgtctgggcaagttcgacgaacctctggatatgtctctcttttctttcatcggatcccccagaattaacgcaaccggacaaggcgtgaccatcttctatgttgatcgcctaggttactacccttacattgatagtatcaccggagttaccgtgaacggtggaatcccccagaagatttctctgcaagaccatctggacaaagctaagaaggatattacattctacatgccagttgataatctcggcatggctgtgatcgattgggaagagtggcggccaacgtgggctaggaactggaaaccaaaagatgtgtataaaaaccggagcatagaactggttcaacagcagaatgtgcaactgagtctgactgaggccacagaaaaagccaagcaagagttcgagaaagccggtaaagattttctcgtggagactattaaactggggaaactccttcggcccaaccatctgtggggctattacctgtttcccgattgctataaccaccactacaaaaagccggggtacaacgggtcctgttttaatgtggaaataaaaaggaacgacgacttgagctggctgtggaatgaatctaccgccctgtacccatctatttatcttaacacccagcagtctcctgtcgccgcaaccctctatgtccgcaatagagtgcgagaggccatccgcgtgtccaagatcccagatgcaaagagccctctgccggttttcgcctacacacggatagtgttcaccgaccaagttttaaagttccttagccaggatgagcttgtctatacctttggggagaccgttgcactgggagcatccggaattgtgatctggggaactctcagtattatgcgaagcatgaaatcatgcttgctgctggataactacatggagacaattctcaatccctatatcatcaacgtgacccttgccgcgaaaatgtgctcacaggtgttatgtcaggagcagggcgtgtgtattcggaaaaactggaattcttctgattacctgcacctgaatcccgataattttgctattcagcttgaaaaaggtgggaaatttacggtacgcgggaagccaacactggaagacctggagcagtttagcgaaaagttttactgctcctgctattcgacacttagctgtaaagagaaggcggatgtcaaggacactgacgccgtggacgtctgcatcgccgatggggtgtgtatcgatgcctttcttaaaccccccatggagactgaagagcctcaaattttttataatgcttcacctagcactctgtctgcgacgatgttcatcgtttcgattctgtttctgattatctcctcggtcgcctctttatag

SEQ ID NO: 2825 - DNA, 1764 bp, synthetic construct
  misc_feature 1..1764: note = source = /note="Description of Artificial Sequence: Synthetic coding sequence"
  source 1..1764: mol_type = other DNA
atgcctagatatggtgcaagtttgaggcaaagctgtcccaggtcaggcagggagcaaggccaggatggcacagcaggcgccccaggtctcctatggatgggcctggtgctggcgctggccctggcactggcgctagccctggcactatccgactcgcgagtgttgtgggccccagccgaagcccaccctttaagtccacagggacaccccgcacgtctgcatcggatagtccctcgcctgcgcgatgtgttcggttgggggaacctcacctgcccaatttgcaagggcctgtttaccgcaatcaaccttggtctcaaaaaagagcctaacgtggccagggtaggctcggttgccatcaaactgtgcaaccttctgaagatagctcccccagcagtgtgccagtccatcgtccatttgttcgaggacgacatggtggaggtgtggcgtagatccgtgctctctcccagcgaggcttgcgggctgcttctcggcagtacttgcggccactgggatatattctcgtcgtggaacatctctctccccaccgtgcccaagcctccgccaaagcccccaagcccacctgcgcctggagcccccgtgagtagaattttattcctgactgatctgcattgggatcacgattacctcgaggggaccgaccccgactgtgctgaccccctgtgttgtaggcggggatccggactgccccccgcatctaggccaggcgctggctactggggagaatacagtaagtgcgacttgccacttcgcaccttggaatcactgctctctggacttggccccgccggaccgttcgatatggtttactggactggagatatcccggctcatgacgtctggcatcagactaggcaggatcagctgcgtgccctgaccaccgtgactgctctggttaggaaattccttggacccgtgcccgtgtaccctgccgtcgggaatcacgagtcaactcccgtcaattccttcccgccgcccttcatagaggggaaccatagcagtcgctggctctacgaggcaatggcaaaagcttgggagccttggctcccagctgaagcactcaggacacttcgatatctttccagtgtggagacacaggaggggaaaaggaaggtccacattatcggtcacatcccaccgggccactgcctcaagtcctggtcctggaactactataggatcgtggcgaggtatgaaaataccctcgcagcccagttcttcggacacacacacgtggatgagtttgaggtgttttatgacgaagagacattgagccgcccactcgcggtggctttccttgccccatcagccacgacgtacatcgggctaaatcctggctaccgtgtttatcaaatcgatggcaactactccggatcttcacatgtggtgcttgatcacgagacttatattttgaacttgacccaggcaaatatcccaggcgcaattccgcattggcagttactgtatcgggctcgggagacgtacggacttccaaatacgctgcctaccgcttggcataacctcgtgtataggatgcgtggcgatatgcagctgttccagacattttggtttctgtatcacaaaggtcatcccccgagtgagccctgcggcaccccttgtcgccttgcgacactgtgcgcccaattgagcgcacgagcagattctccagctctgtgtcgccatttgatgccggatggatccctcccggaggcacagtctctgtggcctcgccccctgttctgctag

SEQ ID NO: 2826 - DNA, 1896 bp, synthetic construct
  misc_feature 1..1896: note = source = /note="Description of Artificial Sequence: Synthetic coding sequence"
  source 1..1896: mol_type = other DNA
atgcccaggtacggcgcctccctaagacagtcatgcccccgttcaggacgagagcaggggcaggacgggacagccggcgcccccggcctgctgtggatgggtttagtgctggccctcgccttggctctggcccttgctttggctctttccgacagccgggttctgtgggctccagctgaagcccaccccttgagtcctcaggggcatcccgcgagactgcatcgtattgtgcctcgcttgcgagatgtatttggctggggaaacctgacatgtccgatttgcaagggtctgttcacagcaatcaacttgggcctaaagaaggaaccgaacgtcgcgcgggtgggtagcgtcgccattaagctgtgcaacctgctcaaaatcgcgccccctgcggtctgccagtcgatcgtgcatctgtttgaagatgacatggtggaagtctggagaagatcggtcctttcaccctcagaagcctgcggtctgctcctcggatcaacatgcgggcattgggacatttttagcagctggaatatttctctacccaccgttccgaaaccaccccctaagccaccatcaccacccgcccccggggctcctgtttccagaatcctcttcctgacggatctccattgggatcatgactacctggaaggtacggaccctgactgtgccgatcccctgtgctgtcgcagaggcagcggcttgccgcccgcctctcgtccaggcgccggctattggggggagtactccaagtgcgatctaccgctgcggaccctggagtctcttctcagtgggctcggtcctgccgggccgttcgacatggtgtactggaccggtgacattcccgcccatgacgtctggcatcagacaagacaggatcagctgcgggccttaaccacagtgacggctctcgtccgtaagtttttaggacctgtaccagtctatccagccgtaggtaatcatgagtctacccccgtcaatagtttcccgcccccctttatagaggggaaccattcctccagatggctttatgaagccatggccaaggcatgggaaccgtggctgcctgccgaggccttacgtaccctccgtattggtggattctatgcgctgtccccctaccccgggctgaggctcatatcactgaatatgaatttttgctctagagaaaacttctggctcctgattaactccaccgaccccgctggtcagctgcagtggctggtgggagagcttcaggccgctgaagataggggagacaaagttcacattataggccatatcccccctgggcactgcttaaaaagctggtcctggaattactacagaattgtggcacggtatgagaacacgctggctgcccagtttttcggccacacccacgttgatgagttcgaggtgttttatgatgaggaaacactcagccggccacttgctgtggcattcctggcccccagcgcaacgacctacattggcctcaatcccgggtaccgtgtttatcaaattgatgggaactactccggaagctctcacgtcgtgctggatcacgaaacctatatcctgaacttaacacaggcaaacatccccggcgccattcctcattggcagctcctctatcgagctagagagacctacggcctgcctaacaccctgccaacggcatggcacaatcttgtgtataggatgcggggtgatatgcagctcttccagacattctggtttctgtaccacaaaggccacccaccttccgaaccgtgcggaaccccatgtagacttgctaccctctgcgcacagctgtctgctcgagccgacagtcccgcattgtgcagacacctcatgcctgacgggagcctccctgaggcccagtccctgtggccaaggccgttattctgttag

SEQ ID NO: 2827 - DNA, 1728 bp, synthetic construct
  misc_feature 1..1728: note = source = /note="Description of Artificial Sequence: Synthetic coding sequence"
  source 1..1728: mol_type = other DNA
atgccaagatacggcgcatccttgcgccagtcctgtcctcgttcgggcagagaacagggccaggacggaacagccggggcgcctggcttattatggatgggccttgtgttagcactagctttggctctcgcgctcgcccttgcactttctgacagtcgcgtcctgtgggcacccgctgaggcacaccccctctctccacagggacaccctgcacgcctgcatcggattgtgccaaggctgcgggatgtcttcggctgggggaacttaacgtgcccgatctgtaaaggcctgttcaccgccattaatcttggcctgaaaaaggaacctaatgtggcacgtgtgggcagcgtagccattaagctttgtaatctactcaaaatcgctccgcctgccgtttgccagagcatcgttcatttatttgaggatgacatggtcgaagtctggcgaagaagcgtgctgtctccgagtgaggcttgtgggctgctcctggggagtacatgcggtcattgggacatcttttccagctggaatatctccctgccgacggttccgaagcctccgcccaagcccccgtccccaccggcccccggggcgcctgtctcacgcatcttatttctgacagacctccactgggatcatgattacctcgaagggaccgacccagattgcgcggacccactgtgttgtcggcgaggctcaggtttacctcctgcatctcgtcccggtgcaggttactggggtgagtacagtaaatgtgacctgcctttgcgcacgctggagtccctcttgagtggcctgggcccagccggcccttttgatatggtgtattggactggggacattcccgctcacgacgtgtggcaccagacgcggcaggatcaactcagagctcttactactgtcacagcgctagttcgtaaattcctgggacccgtcccagtctaccccgcggtgggtaatcatgaatcaaccccggtgaattcattcccccctcctttcatcgaaggcaatcattcgagtcgctggctgtatgaagcaatggccaaggcatgggagccctggcttcccgcagaagcactgcgcacactgagaaaggtgcatatcatcggccatatccctccgggacattgtctgaagtcatggagttggaattactatagaatcgtggctagatacgaaaacacactggccgcccagtttttcggtcacacacatgttgatgagtttgaagtcttttacgatgaagagaccctgagccggcccctggccgtggccttccttgctccttctgccacgacctatatcggcttgaatcctggatacagagtttaccagatcgatggtaactactctggctcctcccacgtggtactcgaccacgagacatacatcctcaacttaacacaggccaacattcccggagccattccacactggcaattactctaccgagcacgggaaacttacgggctccctaataccctcccaaccgcctggcacaacctcgtctatagaatgagaggcgatatgcagttatttcagacgttttggtttctgtaccacaaaggtcatcctcctagtgagccctgtgggacaccatgcagactcgcaaccttatgcgcacagcttagcgcccgcgcagactcgccggccctgtgccgacacctcatgccagacgggtccctgcctgaagcacagagtctttggccccgtcccctgttttgttag

SEQ ID NO: 2828 - DNA, 1893 bp, synthetic construct
  misc_feature 1..1893: note = source = /note="Description of Artificial Sequence: Synthetic coding sequence"
  source 1..1893: mol_type = other DNA
atgccccgctacggcgcgtctctgcggcaatcttgcccgagatccggtagggagcaaggacaggatggtacggcaggcgcccccggccttttgtggatgggactggtgctggcattggctctggcattggcgttagctcttgccctgagcgatagtcgagtgctgtgggcccctgccgaggctcatcccctttctccacagggccatcctgctcggctgcaccgaatcgtgccacgcctgagggacgttttcggttggggaaaccttacctgtcccatatgcaaaggacttttcaccgcgatcaatctgggtctcaaggaacccaacgttgcccgggttggctctgtcgctatcaaactgtgcaatcttctgaaaatagctccccccgcagtgtgtcaaagcatcgtgcatctttttgaggacgatatggtcgaggtttggcgccgttccgtcctgagcccatccgaggcatgcggcctactgttgggctccacgtgcggacactgggatattttctcaagctggaacatctcactgcctactgtccctaagccccctcccaaaccaccgtcccctcctgcccctggtgcccctgtgagtcgaatcctctttttgacggatctgcactgggaccacgactacctggaaggaactgacccagactgcgccgacccactctgttgtcgcaggggatccggtttacctcctgcatcccggccaggcgcagggtactggggggaatattcaaagtgcgacctgcccctacgcacgctcgaaagtttgttgtccgggcttggccctgccggcccctttgatatggtctactggacaggcgacatccctgcgcatgacgtgtggcatcagacccggcaagaccaactccgggccctcactactgtaaccgcgcttgttcgcaaatttctggggccggttcctgtgtacccagccgtgggaaatcacgagagcaccccggtcaattcatttccacccccatttatcgaggggaatcactccagtagatggctctatgaagccatggccaaagcttgggagccttggctgccagcagaggcattacggacactcagaattggagggttctacgctctgtccccataccccggtctgcgcctgatatctctcaatatgaatttctgttccagagagaatttctggcttctaattaactcaacagacccagctggacagctgcagtggctagtgggcgagttgcaggccgcggaggaccgaggcgataaggtgcacatcattggacacattccccctgggcactgcctcaagagttggagctggaactactataggattgtcgctagatatgaaaacaccctcgccgctcagttcttcggtcatacacatgtggacgagtttgaagtcttttacgacgaggagacgctctcacggccactggccgtcgcattcctggcaccgtcagccaccacatatattggacttaatccagggtatagagtctatcagatcgacggcaattactctggatctagtcacgtggtgcttgaccatgaaacatacatactgaacctgacccaggccaatatacctggggctatacctcattggcagttgctgtaccgggctcgcgaaacttacggcctccccaacacattacccactgcttggcataacctggtttatcgtatgagaggagacatgcaactctttcaaactttctggtttctttatcacaaaggccacccgccaagtgagccttgtggaactccttgcagactggccaccctctgcgcgcagttgtcagcgagagcagatagtcccgccctttgccgacaccttatgcctgacggaagtctaccagaagcccaatctttatggccacgccccctcttctgctag

SEQ ID NO: 2829 - DNA, 1101 bp, synthetic construct
  misc_feature 1..1101: note = source = /note="Description of Artificial Sequence: Synthetic coding sequence"
  source 1..1101: mol_type = other DNA
atgcccaggtacggcgcctctcttaggcagagttgcccacggtcgggccgcgagcaggggcaggacggaactgcaggggcacccggtctcctctggatgggtctggtgctcgccctcgcactagctctggctttagctttagctttgagcgatagccgcgttctgtgggctcccgctgaggcccaccccctgtctccacagggccatcctgctcgactgcacagaattgtccctaggctgagggatgtgttcggttggggcaacctgacatgcccgatctgcaaaggtttatttaccgctatcaatttaggcctgaagaaagagcccaatgttgctagggtgggatccgtagctataaagctctgtaaccttttaaagattgcgccccctgccgtgtgccaaagcatagttcacctgtttgaggacgacatggtggaagtctggcgccgctccgtcctctccccctccgaagcctgtggcctgctccttggctccacttgcgggcattgggacattttctcatcgtggaatatcagtctccccactgtcccaaaaccaccacccaagcctccctcgccacctgcacccggagcccctgtgtcccgcatcctgtttctaacagacctgcattgggaccacgactatctggagggtactgatccagactgtgccgaccctctgtgctgtaggcggggttccggtctgcccccggccagccggcccggtgccggttattggggtgagtactcaaagtgcgatctgccgttgagaacattagaaagtttgttaagcgggctgggtcctgcggggccgttcgatatggtgtattggaccggggacatcccagctcacgacgtgtggcaccagacaaggcaagaccaactgcgcgccctgaccacagtgaccgcattggtccgaaagttcctggggcctgtacccgtttatccagccgtgggtaatcacgaatcaacccctgtcaatagcttcccacccccatttatagagggcaatcatagttccagatggctctatgaggccatggcgaaagcctgggaaccctggctgcccgccgaggctctacggactctgaggtgcatttag

SEQ ID NO: 2830 - DNA, 1209 bp, synthetic construct
  misc_feature 1..1209: note = source = /note="Description of Artificial Sequence: Synthetic coding sequence"
  source 1..1209: mol_type = other DNA
atgccaagatatggggcttcactgcgacagtcgtgcccccggagtggcagagaacaaggtcaggatggcaccgccggagctccaggacttctttggatgggattggtgctggctctagctctcgctctagcccttgcccttgcactaagcgattctcgtgttttgtgggctcctgctgaggcccatccactctcaccccaggggcacccagcacgtctccatagaatcgtaccccgcctgagggatgtgttcggctggggcaatttgacctgtcctatttgcaagggcctttttaccgccattaacctaggccttaagaaggagccaaatgtcgcgcgcgtcggatccgtcgcaataaagttatgtaaccttttgaagatcgctccaccagccgtctgccagtccatcgttcatctattcgaggacgatatggtagaagtttggaggagatctgtcctgtcacctagcgaagcatgtggcctcctgctgggctcaacatgtggtcattgggatatttttagctcttggaacataagtttgccaacggtccctaaaccccctccgaagccccccagcccccctgcccctggggcacccgtttctcgcatactgtttttgacagacttgcactgggaccacgattacctggaaggcactgaccctgactgcgccgatcccttatgttgccgtagaggctcaggcctgcctcccgctagccgacccggcgctggatattggggcgaatatagcaagtgcgacctgcccctgcgtacgttggaaagcctcctgagcgggctcgggcctgcaggacccttcgacatggtgtattggaccggcgatattccagctcacgatgtttggcaccagacgcggcaggaccagctgagagccttgacaacggttaccgctctggtaaggaaattcttgggccccgtaccagtgtaccccgctgtgggaaaccatgaaagcactcctgtcaattccttccctcccccctttattgagggcaatcactcatcccgatggctctacgaagccatggcgaaggcgtgggagccttggcttcccgcagaggcgctgcgcacattaagatacctgtccagtgtcgagactcaggagggcaagcggaaaaactggggcgtcctgtgttccttccccatcccacgctccccacctcacctgtcccagtatgaattcctcttcccctag

SEQ ID NO: 2831 - DNA, 954 bp, synthetic construct
  misc_feature 1..954: note = source = /note="Description of Artificial Sequence: Synthetic coding sequence"
  source 1..954: mol_type = other DNA
atgtataatatgatggaaacagagctgaagccacccggacctcagcaaacttccgggggcgggggcggcaattccaccgccgccgctgctggtgggaaccaaaagaattcaccagatcgggttaagcggccaatgaatgcattcatggtgtggtcaagaggacagagaaggaaaatggcgcaagaaaacccaaaaatgcataattctgagatctccaagaggctgggagctgagtggaaactactgagtgaaaccgagaagcgtcctttcattgacgaagccaaaaggctgagagccctgcatatgaaggagcatccggactacaaatatcggcctcgtcggaagaccaagactctgatgaaaaaagataagtatacactgccaggaggtcttctagctccaggaggtaatagcatggcatctggggttggcgtaggagctgggctgggagcgggagtgaatcagcggatggactcatatgcacacatgaacggatggtctaatggcagctactccatgatgcaggaccaactcggttatccacaacatcctggactcaatgcccacggggcagcccagatgcagcccatgcataggtacgacgtgtcagctttacagtataactcaatgacctcctctcagacatatatgaacggatcacccacatattccatgtcctacagccagcagggaacgcctggaatggcactgggatctatgggctctgtggtgaagtcagaagcctcctcatccccaccagtggtcaccagttcaagtcatagcagagcgccctgtcaggcgggggatctccgggatatgatcagcatgtacttgccaggcgctgaggtgccagaaccagctgcaccgtctcgactgcacatgagccagcattaccaaagtggtcccgtgcccggcacggccatcaatggtactttgccactgtcacatatgtag

SEQ ID NO: 2832 - DNA, 954 bp, synthetic construct
  misc_feature 1..954: note = source = /note="Description of Artificial Sequence: Synthetic coding sequence"
  source 1..954: mol_type = other DNA
atgtacaacatgatggaaacagagcttaagccaccagggccccagcagacctccggagggggaggagggaatagtaccgccgccgcagcaggcgggaaccaaaagaactctcccgatagggtgaagagaccaatgaatgcatttatggtatggagtagggggcagaggcgaaagatggcccaagaaaatcccaagatgcataattcagagatcagtaagaggctgggagcagaatggaagctgctgagcgagaccgagaagagacctttcattgacgaagctaagagactgagggcgcttcatatgaaagagcacccggattataagtaccggccaaggcggaaaaccaagactttgatgaaaaaggacaagtataccctccctgggggactgctagcgcctggaggaaatagcatggccagtggggttggagtcggggctggcttgggggcaggagtgaatcagcgcatggactcctacgcccacatgaacggatggtcaaatggctcatacagcatgatgcaggatcagctcggatatcctcagcatcccgggctaaatgcccatggcgctgctcagatgcagccgatgcaccggtatgatgtttccgctctacagtataacagtatgaccagctctcagacctacatgaacggaagtcctacgtacagtatgtcttactcccagcagggtacgcccgggatggccctgggctcaatgggaagcgtggtgaaaagcgaggcatcctctagcccaccggtggtaacatctagctcacacagtagagccccgtgtcaggccggggacctgagggatatgatttctatgtatctgccgggagcagaagtgcctgaaccagcagccccatcgcggctccacatgtcccagcactatcaatcagggcccgtgcctgggaccgccattaatggcaccctgccactgtcccatatgtag

SEQ ID NO: 2833 - DNA, 1182 bp, synthetic construct
  misc_feature 1..1182: note = source = /note="Description of Artificial Sequence: Synthetic coding sequence"
  source 1..1182: mol_type = other DNA
atgcatcaggccgggtatcccggctgcaggggagcaatggctgagtctcacttgctgcaatggctgcttctgcttctgccaactttatgtggccctggcacagctgcttggacgactagttccctggcctgcgcccagggtcctgaattctggtgtcagtctctagagcaggcgcttcagtgcagggcattaggccattgcttgcaagaggtgtggggacatgtgggcgccgatgacctctgccaagaatgcgaggacatcgtgcacattctgaacaagatggctaaggaggcgatttttcaggatacgatgaggaaatttctcgagcaagaatgcaacgttctgccattgaagctgctcatgcctcagtgcaatcaggtgcttgatgactacttcccactcgtgattgattattttcagaaccagactgatagcaatggcatatgcatgcatctcgggctgtgtaagtcccggcagccagaaccagagcaggagccgggcatgtcagacccgctccccaagccactcagggatcctctccctgacccattactcgacaagcttgtgctcccagtgttacctggagctctgcaggccagaccagggccacacactcaggacttatccgagcaacagtttcccattccactcccatattgctggctctgccgggcattgattaaaagaattcaggccatgatcccgaagggggctctcgctgttgccgttgctcaagtttgccgtgtggtgcccttggtggctggcggcatttgtcagtgcctggcggagcgttattccgtcatcctgctggacacactcctgggtcggatgctcccacagcttgtttgtcggttagtgctaaggtgcagtatggacgattctgccggaccacgaagtcctaccggagaatggcttccccgcgactctgagtgccacctttgcatgagcgtaaccacccaggctggtaattccagcgagcaagccatcccccaggccatgctgcaagcttgcgttggatcatggctagacagagagaaatgtaaacagttcgtggaacagcatacccctcagctgctgaccttagttccgagaggatgggacgcccacacaacatgtcaggccctgggagtctgtggcacaatgtcatcccccttgcaatgtatacactcacccgatctctag

SEQ ID NO: 2834 - DNA, 1182 bp, synthetic construct
  misc_feature 1..1182: note = source = /note="Description of Artificial Sequence: Synthetic coding sequence"
  source 1..1182: mol_type = other DNA
atgcatcaagctggatacccgggttgtcgtggtgccatggcggaatctcacttgctgcagtggcttctgctgctgcttcctactctctgtggccccggaacagctgcctggacaacttctagtctggcatgcgcccagggaccagaattttggtgccaatcactggaacaggcgctccagtgcagggctcttggccattgcctacaggaagtctggggacatgttggagctgatgatttgtgtcaggagtgcgaggatatagtacatattctgaacaagatggccaaggaggcaatattccaagataccatgcggaagttcctggaacaggaatgtaatgttctgcccctcaaattgctgatgccccaatgtaaccaggtgctggatgattattttccactcgttattgactatttccaaaaccaaaccgattccaacggaatttgcatgcatttgggattatgcaagagcagacaacccgagcccgagcaggaaccaggaatgtccgaccctctgccaaagccgctcagagaccccttaccagatcccttgctcgacaagcttgtgcttcccgtattgcctggcgccttacaggctcgccccggtccgcacacgcaggacctgagcgagcagcagtttccaatccccctcccgtactgttggctctgccgggcattgataaaacggatccaggccatgatcccgaaaggggcattagctgtggctgtagcgcaggtgtgtcgggtggtgccgttggttgcagggggaatctgtcagtgtctagccgaacggtattccgtcatcttattggatactttgctgggtcgcatgcttccacagctggtatgtcggctcgtgctccgctgttctatggacgatagcgctgggccaaggagtcctactggcgagtggcttccacgggacagtgagtgtcacctgtgtatgtcagtgactacacaggccggtaatagtagcgaacaagctattccgcaggcaatgttgcaggcttgcgtggggtcctggctggatcgcgaaaagtgtaagcaatttgtcgagcagcacactccccagctcctgaccctggtgccccgaggctgggatgcacatacgacttgccaagcactgggggtgtgcggaaccatgagctctcctttacaatgcattcacagtccagatctgtag

SEQ ID NO: 2835 - DNA, 1050 bp, synthetic construct
  misc_feature 1..1050: note = source = /note="Description of Artificial Sequence: Synthetic coding sequence"
  source 1..1050: mol_type = other DNA
atggccgagagtcaccttctgcaatggctgttgctactcttacctactctatgtggccctggtaccgccgcctggacgaccagtagtctcgcatgcgcccagggccccgaattttggtgtcaatccctggaacaggccctgcagtgccgtgctctgggccactgccttcaggacaccatgcggaaatttcttgagcaggaatgtaacgtcttaccactgaagttattaatgccccagtgcaaccaagtgcttgatgattactttcccttagtcatcgattactttcagaatcaaactgactccaatggtatctgtatgcatctggggctttgcaagtctaggcaacccgaaccggagcaagagcctggaatgtctgaccccctccctaagccgttaagggatccgctccctgatcctttgctggataaattggttctcccagttcttcccggggcgctgcaagcgcgccctggtccccacacccaggatctgagtgaacaacagttccctatcccactaccttactgctggttgtgccgggccctcatcaaaagaatccaggccatgatccctaagggtgccctggccgtggctgtcgcgcaagtgtgcagggttgtgccccttgtggccggcggaatctgtcagtgcctggccgagaggtatagcgtgatcctactggatactttattgggcaggatgcttccacagcttgtctgcaggttggtgctgaggtgcagcatggatgactcagcagggcctcggtccccgaccggggaatggctgccgagagatagcgagtgccatctttgcatgagtgtcactacacaggccgggaattcctcagagcaggccatcccacaggcaatgctccaggcctgcgttggtagttggctggaccgggagaaatgtaaacagttcgtggaacagcataccccccaattgttgaccctggtaccaaggggatgggatgcacacacgacatgtcaggccctgggcgtttgtggcaccatgtcatccccgcttcaatgcatccattcaccagatctctag

SEQ ID NO: 2836 - DNA, 1152 bp, synthetic construct
  misc_feature 1..1152: note = source = /note="Description of Artificial Sequence: Synthetic coding sequence"
  source 1..1152: mol_type = other DNA
ggagccatggctgaatcgcacttactccagtggctcttactcctgctgccaacactgtgcggccctggaacagcagcttggacaacgtcctcgctcgcgtgtgcccagggaccagaattttggtgccagagtctggaacaagcgttgcagtgtagagccctgggacattgcctccaggaggtatgggggcacgtaggcgccgatgacctctgtcaggaatgcgaggacatcgtccacatattgaataagatggccaaggaggctatctttcaggacactatgagaaagttcttagaacaggagtgtaatgtgctgccgttgaaacttcttatgccacagtgtaatcaggtccttgatgactacttccccctcgtgatcgattacttccagaaccaaaccgattctaatggcatttgtatgcatttgggtttgtgtaagagccgacagcctgagcccgaacaagaacctggcatgtccgaccccctccctaagcccctgagggatccactacctgatccattacttgataagctggtgctgcccgtcctgcccggggcactccaagctcggcccggtccacacacgcaggacctgtcagaacaacagtttcccatccctcttccgtactgctggctgtgcagagcactgattaaacggatccaggctatgatccctaagggggcccttgccgtggctgtggcccaggtgtgcagggtggtacccctagtggctggcggaatctgccaatgcttggctgaaaggtactctgtgatcctgctggatactctgctgggaagaatgctcccccagttagtctgccggctagttctgaggtgtagcatggacgacagcgctggaccccgttcaccaaccggggaatggctgcccagggacagcgagtgtcacctgtgcatgagcgtaacgacccaggccgggaactcctcagagcaggccataccacaggccatgttacaggcgtgcgtcggctcctggcttgatagggagaagtgcaaacaattcgttgagcagcatacaccacagttgcttacactcgtgcctcgtggttgggatgcacacaccacttgtcaagctcttggagtgtgtggcacaatgtcaagtccactgcagtgcatccactcccccgatttatag

SEQ ID NO: 2837 - DNA, 1728 bp, synthetic construct
  misc_feature 1..1728: note = source = /note="Description of Artificial Sequence: Synthetic coding sequence"
  source 1..1728: mol_type = other DNA
atgctgggcgtattggtgctaggagccctagctcttgccggacttgggttccctgcaccagcagaaccccagcccggtggctcccagtgcgtggagcacgactgcttcgccctgtacccagggccagccactttcctaaacgcatcccagatctgcgacggcctacggggacacctgatgaccgtccgctccagcgtggctgccgatgtcatttccctccttctcaacggagacggaggagtcggacggcgcagactttggattggcctgcagttgcccccgggttgtggtgacccaaaacgcctgggcccacttagaggcttccagtgggtcaccggcgacaacaatacaagctactccagatgggcacgtcttgatctcaatggggctcctttatgcggccctttgtgcgttgcggtgtccgcagctgaggctaccgttccctccgagccgatttgggaagaacagcagtgtgaggtcaaggccgacggatttctgtgcgagtttcattttcccgctacctgtaggccacttgccgtggagcctggtgccgcagcagctgctgtgagtatcacatacggtacccctttcgcagctaggggagcagacttccaggcactccccgtgggctcctctgctgctgtcgcccccctgggtttacagctgatgtgcaccgcgccccccggagctgtacagggacactgggcccgagaagccccaggcgcctgggactgtagtgttgagaacggtggatgcgagcacgcctgcaatgcaatcccaggagcacccagatgccaatgcccagccggcgccgctttacaggccgatggtcggtcttgcacggcctctgcaacccagagctgtaatgatctgtgcgaacacttttgcgtccctaacccggaccagcctggcagctactcatgtatgtgtgagaccggttatcgcctagccgccgaccaacacagatgcgaggatgtggatgattgcattttagagccttccccttgcccacagcgttgtgtgaatacccagggcgggttcgaatgccactgttacccaaattacgacctggtggacggggaatgcgttgagcctgtcgacccctgttttcgggcgaattgcgagtaccagtgccagcctctaaaccagacctcttatttgtgtgtgtgcgcggaaggctttgcccccattccacacgagccacaccggtgccagatgttctgcaaccagacggcatgtcctgcagactgcgacccgaatactcaggcctcatgcgagtgccctgaagggtacatcctggacgacggtttcatctgcactgatatcgacgagtgtgagaatggaggcttctgcagcggggtgtgccataatttgccggggactttcgagtgcatctgcgggcccgattcagcacttgctcgacatatcggaaccgactgtgatagcggcaaggtggacgggggcgatagtggaagtggggaacctccaccgtcgccaactcctggctccacactcacgcctcctgcggtgggcctggtccatagtgggcttctgattggtatctctatcgcgagtctgtgcttggttgtggccttgctcgcattactgtgccacctacgcaaaaaacaaggcgccgccagggccaagatggagtataaatgcgcagctccctccaaagaagtagtgctgcagcacgttcgcacggagcgaaccccccagcgactatag

SEQ ID NO: 2838 - DNA, 1674 bp, synthetic construct
  misc_feature 1..1674: note = source = /note="Description of Artificial Sequence: Synthetic coding sequence"
  source 1..1674: mol_type = other DNA
atgtctgaagctgcaagtcagggtttgcgagcagccgctaggagtgtatgggcgggaacagatagacgcggttgtcgccatcgcaggccagtgcctctgtgtagtgggacagccctctctcagtgcccccgtttcccgagaagattgcacgcggcgcgtttgggtaacatgctcggggttcttgtgctgggagccctggccctcgccggattgggctttcccgcacccgggtgtggcgatcctaagcggctgggacctttacgcggcttccaatgggtaactggagataacaatactagctacagtcgctgggcgagacttgacttgaatggggcgccgctttgtggtcctctgtgtgttgcggttagtgctgccgaagccacagttcctagtgaacccatttgggaagagcagcagtgtgaggtcaaggcagacgggttcctgtgcgaattccacttcccagcaacatgcagacctctggctgtggagcccggagcggccgccgctgccgtttcaatcacctacggcacaccttttgcggctcgtggagcagactttcaggctcttccagtgggcagttcggccgctgtagctcccttggggctgcagttgatgtgcacagccccacccggagcggtgcaggggcattgggctagagaagcaccaggggcttgggattgcagtgtggagaatgggggatgtgaacacgcatgtaacgccattcccggggcccctcggtgccagtgtcctgctggagccgcgctgcaggcagatggacgttcctgtaccgcatctgctacgcaatcatgtaacgatctgtgcgagcatttctgtgtgccaaacccagaccagccgggttcatacagctgcatgtgcgagacaggctatcgcctggctgcggaccagcacagatgcgaggatgttgacgattgcatcctggagcccagcccctgccctcagcggtgcgtcaatacccagggcggtttcgagtgccattgttatccaaactacgacctggtcgatggagagtgcgtcgaacccgtggacccctgcttccgcgcaaactgcgagtaccagtgccagcccctcaatcagactagttacctgtgcgtgtgtgcagaaggatttgctcccatcccacacgagccacacagatgtcagatgttctgtaaccagacagcctgtccggcagattgtgatcctaatacacaggcatcttgcgaatgtccagaaggctatatacttgacgatgggtttatttgcacagacatcgacgagtgcgagaatggtggtttctgcagcggcgtctgccataacctgcctggcacctttgagtgcatctgtggccctgacagcgccctggcccgccacatcgggacggattgtgacagcggaaaggtagatggcggagattccggtagcggcgaaccccccccttcacccacccccggtagcactctgacaccccccgctgtggggttagtgcactcaggcttgttgatcggaatttcaatcgcgtccctttgtcttgttgtggccctcctggccctgttgtgccacttacgcaaaaagcagggggccgcgcgcgccaagatggagtacaagtgcgcagcaccgagtaaagaggtggtgttgcagcacgtccggactgaacggactccccagcgcctgtag

SEQ ID NO: 2839 - DNA, 1062 bp, synthetic construct
  misc_feature 1..1062: note = source = /note="Description of Artificial Sequence: Synthetic coding sequence"
  source 1..1062: mol_type = other DNA
atggagctcactgaattgctgttggtggtgatgttgctactcacagcccgtttgactctttcttcacctgccccccccgcatgcgacttgagggtcctctccaagctgctgagggatagccacgttctccacagtcggctatctcagtgtcccgaggtccacccgctacctactcccgtcctgctaccagccgttgacttcagcttgggcgagtggaagacacagatggaggaaaccaaagcccaggatatcctgggcgccgtcaccctgctcctggagggcgtgatggcagctaggggtcaactcgggcccacatgcctctccagtctactgggtcagctcagcggacaggtgagacttttactcggcgccttacaaagcctgctgggcacacaactgcctcctcaggggagaacaactgcgcataaagatcccaatgctatctttctcagctttcaacacttattgcgggggaaggttcggttcttaatgctggtgggaggaagcacgctatgcgtacggagagcccctcctactacagcagtcccttcacgcacttcacttgtcctgacattgaacgagctgcccaataggactagcggcctcttagagacaaactttactgcttccgctcgcactacaggttccgggctgctgaaatggcaacagggcttcagggccaagatccctggtctgctaaatcagaccagtcggtccctcgaccaaatccctgggtaccttaatcggattcacgaactacttaatggtacgcggggcttatttcctggaccctctagaagaacgctaggtgctccggatatttcgtctggcactagcgacaccggaagtcttcctcccaacctgcagccagggtactcacccagtccaacccatcctccgactggccagtacaccttattcccattgcccccgactctaccaacccccgtggttcaactgcaccccctgttacctgaccccagtgctcccacgccaacaccaaccagccccctcctgaacactagctatacccactcccagaacctgtcacaggaaggctag

SEQ ID NO: 2840 - DNA, 945 bp, synthetic construct
  misc_feature 1..945: note = source = /note="Description of Artificial Sequence: Synthetic coding sequence"
  source 1..945: mol_type = other DNA
atggagctcacagagctcctcctcgttgtgatgttactgctcaccgctcgcttgaccctaagtagcccagctccccccgcttgtgacttgagagttctgtcaaaactactgagagactctcatgtgctgcatagcagactgagccaatgtccagaggtgcacccactgcccacacccgtgttgctcccagccgtggactttagcctcggagagtggaaaactcaaatggaggaaaccaaagcccaggacatactgggggcagtgactctcctgcttgaaggagtgatggcggcccgaggccagctgggccctacatgtctgtcctcgttactgggtcagcttagcggtcaagtgagactgttgctaggagctctgcagagtctcctggggacccaactgcccccacaagggaggaccactgcccataaagacccgaatgccatctttctgagttttcagcacctgctgcggggtaagacatctggtcttcttgaaacgaattttactgcgagcgcacggacaaccggatctgggctgttgaagtggcagcagggctttcgggcgaagattcctgggttgcttaaccagactagccgcagcttggatcaaatcccaggatacctgaatagaatccatgaacttctgaacggtacccgggggttgttccctggaccaagccgtcgaaccctgggagcgcccgacattagttcaggcactagcgacaccggaagtttaccacccaatttgcagcctgggtattctcctagccctacgcatccaccaactgggcaatatactctatttcccctccctcctactcttccgacacccgttgtgcagcttcatcccctcctcccagatccatccgctcccactccaaccccaacctccccattgctgaacacttcatacactcacagccagaatctgtcacaggaaggctag

SEQ ID NO: 2841 - DNA, 861 bp, synthetic construct
  misc_feature 1..861: note = source = /note="Description of Artificial Sequence: Synthetic coding sequence"
  source 1..861: mol_type = other DNA
atggagcttacagagctcctgctggtggtaatgctcctcctgactgcgcgtcttacattgagcagtccggcacctccagcttgcgacctccgggtgttgagcaaactgctcagagactcgcacgtactgcacagtagactgtcccagtgccccgaggtgcacccgctgcctacgcccgtgttgttaccggcagtggacttctctcttggggaatggaaaacccagatggaagagactaaggcccaggacatattgggcgctgtaaccctgttgctcgagggcgtgatggcagctcgaggccaactgggccccacttgtctgtctagcctgctggggcagttgtccggacaggtgagactgctgctcggagcactgcagtccctgctgggtacccagctgcccccacagggtcggacaactgcacacaaggacccaaacgctatttttctctcctttcagcacctgctgagagggaaggacttctggatcgttggcgacaagctgcactgcctctcacagaattactggctctgggcttcagaagtggctgccggtattcagagccaagatagctggtccgcagagcccaacctccaggtgcctggccccaatccaagaattccggagcaggataccaggacccttgagtggaatagttggactctgtcttggacattaactcaggatccacgttcacccggacactttctacgaaatatcaggcacaggcttcccgcaacgcaacctcctgcctggatcttcagttttcccaatcccagctcatactggaccgtgtacgctcttccctcatcaacgcacctggctcacccttgcgggcccgctccaccacccgcatcctag

SEQ ID NO: 2842 - DNA, 1050 bp, synthetic construct
  misc_feature 1..1050: note = source = /note="Description of Artificial Sequence: Synthetic coding sequence"
  source 1..1050: mol_type = other DNA
atggaactgaccgagctgttactcgtcgttatgttgctcctgacagccaggctgactctcagctcgccggctccgccagcttgtgatctgagagtgctgtctaagctgctgagagactctcacgtcttgcattccagactgtcacagtgcccagaagttcaccctctccccacaccagtcttgttgccggcggttgacttcagcctgggggagtggaagactcagatggaggagacaaaggcccaggatattctgggggctgtgaccctcttgctcgaaggtgtgatggcagcgcgtggtcagctgggcccgacatgtctatcctctctgctcgggcagttgagcggtcaagtgcggctcctactgggtgccctccagtctcttctcggtactcagggaaggacaactgcccacaaggaccctaacgcaatatttctttcttttcagcacttgctgagagggaaagtgcgcttcctaatgctcgtggggggctctaccttgtgcgtgaggcgggctcctccaacaacagccgtgccctctcggacgtccttggtcttgacactcaacgaactgcctaatagaacctcaggactgcttgagactaatttcactgcttccgcccgtaccacagggtccggcctcttgaagtggcagcaaggttttcgggccaaaataccaggactgcttaaccagacgtcacgcagcctagatcagatccctggatacctgaatcggatccatgaacttctcaatggaactcgcggcctttttcccggccccagcagacgaacattgggagccccagacataagttccggcacgagtgacaccggaagtctcccccctaacctgcaacctggctacagcccatccccaacgcacccacctacggggcagtacaccctcttcccactcccacccacacttcccactcccgtcgtgcagctgcaccctctgctgcccgacccatctgcgccaaccccaacaccgacatcacccctgttgaacacgtcctatacccacagccaaaatttatctcaggagggctag

SEQ ID NO: 2843 - DNA, 963 bp, synthetic construct
  misc_feature 1..963: note = source = /note="Description of Artificial Sequence: Synthetic coding sequence"
  source 1..963: mol_type = other DNA
atgcctatgtatcaggttaaaccctatcatggcggtggtgctccactccgggtggaactgccaacttgtatgtatcgtctgcccaacgttcacggtaggtcatacggccccgctcctggagctggacacgtccaggaggagagcaacctaagcctccaggcccttgaaagtcggcaagacgacatacttaagcgcctctatgaactgaaggcggcggtagacggcttgtcgaaaatgatccagacacccgacgccgacctagacgttacaaacatcatacaggcagatgaacctaccaccctcactaccaatgctcttgacctcaattctgttctgggtaaggattacggcgccctcaaggacatcgtcattaacgcaaaccccgctagccccccgctgagtctcctggtactgcaccggctcctctgtgaacacttccgcgtcctgtccactgtgcatacacattcatctgtgaagtctgttcctgaaaacttattgaaatgcttcggcgagcagaataaaaagcagcccaggcaggactatcagttgggcttcactctcatctggaaaaatgtgcctaaaacccagatgaaattcagcattcaaactatgtgtcctatcgagggggagggtaatattgccagatttctgttctccctcttcggccagaagcataatgcagttaatgccactctgattgactcctgggtggacatagcaatcttccagttaaaagagggcagcagcaaagaaaaggcggccgtgttcaggagcatgaatagtgccctaggaaagagcccctggttggctggcaacgagttgacggtcgccgacgtggtgctgtggagcgtgctgcagcagatcggcggttgcagcgtcaccgttcccgccaatgtgcagcgttggatgcgctcatgtgagaacctcgctcctttcaacactgcgctgaagctgttaaagtag

SEQ ID NO: 2844 - DNA, 1068 bp, synthetic construct
  misc_feature 1..1068: note = source = /note="Description of Artificial Sequence: Synthetic coding sequence"
  source 1..1068: mol_type = other DNA
atggaaaggctgtggggcctctttcaacgggcacagcagctttcaccccgtagcagccagacggtctatcagcgagtagaagggcctcgtaaggggcatctcgaggaggaagaagaagacggagaggaaggcgccgaaacgctcgctcacttttgtcctatggaattgaggggtccagagcccctcggctcccgaccacgtcagccaaatcttatcccttgggctgcagctggacggagggccgccccgtacttggtgctaacagcactcctgatttttacaggagctttcttattgggatatgtggccttccggggatcttgccaggcttgcggagattccgtgttggtcgtctcagaggatgtgaattatgaacccgacctcgactttcaccagggccgcctgtactggtctgacctgcaggccatgttcttacagttcctcggcgagggtaggctcgaggatacgatacggcagacttcactgcgggagagggttgcaggcagcgcaggcatggcagcgctaacccaggacatccgggcggccctcagtagacaaaagcttgatcacgtgtggacggatacgcactatgttggactgcagttccctgatcccgctcatcccaacactttgcactgggtagacgaggctgggaaagtaggcgagcagctgccactggaagatcccgacgtgtactgcccatactccgctataggcaatgtcactggagagctggtgtatgcccattatggaagaccagaggacctgcaggaccttcgggctcgtggagtggaccctgtgggcagattacttctagtcagagtgggcgttatctcttttgctcagaaggaagcacagagaccgtgcggaccacctaggatggcaggcgagccacccagactgcctctgagtccaggacctagggccacaacagcggcaagcggtcagcagagccaggacctgcacccccatcagcagcatctgcgactgcacaggagacccttaagggcccggtccctcagatgccatagaggccctgaaggttgtatgggaccaaggtcctcgtag

SEQ ID NO: 2845 - DNA, 2406 bp, synthetic construct
  misc_feature 1..2406: note = source = /note="Description of Artificial Sequence: Synthetic coding sequence"
  source 1..2406: mol_type = other DNA
atggaacggctctggggtctatttcaacgggctcaacagctgtctcctcgcagtagccagacagtgtaccaaagggtggaagggcccaggaaagggcacctggaggaggaggaggaagatggagaggagggtgccgaaacattagcgcatttctgtcctatggagctccgcggtccagaaccgctcgggtccagacccaggcagcctaatctgatcccctgggcggcagctggcaggagagccgccccttatcttgtcttgacagctctgctcattttcactggggctttcctgcttggctacgtggcctttcggggctcatgccaggcctgcggggattccgtacttgtggtttcagaggacgttaactatgagccggacctggatttccatcagggaaggctctactggtctgatctgcaagccatgttccttcagtttctcggggaggggcgactagaggatactattcgccagacttctctgagagagagggtcgccggcagtgctggcatggctgccttgacccaggacatacgagccgcgctgtcacgacagaaactagatcacgtttggaccgacacccactacgtcgggttgcagtttcccgaccccgcacatcctaacacccttcattgggtggacgaggcgggaaaggttggggaacagctgcccctggaagatccagacgtctactgtccttactctgctatcgggaatgtgacgggtgaattggtgtacgcccactacggtcgaccagaggacctccaagacctgagagctcgaggcgtggatcccgtcgggcgattgctgcttgtgagggttggcgtgattagcttcgcccagaaggttaccaatgcccaggatttcggggcccagggtgtcctgatctatcccgaacccgccgatttcagtcaggatccccccaaacccagcctctcctcccagcaggcagtgtacggtcacgtacacctcggaacaggcgatccgtacactcctggcttcccctccttcaatcagacacaattcccccctgtggcgtcatctgggctgcctagtatccccgcacaaccgatctccgcagacattgcctctagactgctgagaaagctcaaaggccctgttgccccccaggaatggcagggtagcctgctgggctccccgtaccacctgggccctggtcccaggcttagactagtggtgaataaccatcgcactagcacccctatcaacaatatttttggctgtatagagggcaggtcagaacccgaccattatgttgtcataggggcccagagagacgcatggggccccggcgcagcgaagagtgccgtcggcaccgccatacttctggagctggtccgtacttttagctccatggtgagtaacggcttccggcccaggagatcactcctcttcatctcctgggacggcggcgattttggcagtgtggggagtactgagtggctcgaagggtacctatctgtactacatcttaaagctgtggtgtacgtgtctcttgataacgccgtcttgggcgatgacaagtttcacgccaaaacaagcccactccttacgagcttgattgagtctgttctcaagcaggtggactcacctaaccactctgggcagaccttatatgaacaggtggtattcacgaacccgtcatgggacgccgaggtgatccgccccttgcctatggattcttcagcctacagcttcacggcattcgtcggggttcccgctgtagagttttcatttatggaggacgaccaggcttatccttttctgcatacaaaggaggacacctatgagaacttgcacaaggtactgcaaggacggttacccgcagtggcacaggcggtggctcaattggccggacagctgctgatccgactgtcccacgatagactattgcctttggattttggcagatatggggatgtggtcctgcgccatattgggaacctcaatgaattttcaggggacctgaaggcccgggggctgaccctgcagtgggtctacagcgcgcgaggcgattacataagagcagctgaaaagctgcgccaggagatatactcgtcagaagagagagacgagcgacttaccaggatgtacaacgtgcggattatgcgggtggaattctacttcctttcccaatacgtgtctcccgctgactccccttttagacacatctttatgggaaggggcgatcacactctgggcgccctactggaccatctgcgccttctgagatcaaattcatctggcactcccggcgcaacctcaagcacggggttccaggagtcacgttttaggagacagctcgcgttacttacctggaccctgcaaggggctgcaaatgcccttagtggagacgtctggaacattgacaataatttctag

SEQ ID NO: 2846 - DNA, 1029 bp, synthetic construct
  misc_feature 1..1029: note = source = /note="Description of Artificial Sequence: Synthetic coding sequence"
  source 1..1029: mol_type = other DNA
atggtatctaacggtttccgccctcgaagaagcctgctcttcatttcatgggacggcggagacttcggctccgtaggctctactgaatggctggaggggtatctgagtgtattgcacttgaaagccgtagtatatgtctccttggacaacgccgtgctcggggatgataagttccacgctaaaacatcccctctactgacgtctttaatcgagagcgtgctgaagcaggtggactctccaaaccattccggccaaactctctacgagcaagtcgtattcaccaacccttcctgggatgccgaggtgatccggccactgccgatggactcaagtgcctattcttttacggcctttgtgggcgttcccgctgtggaattttctttcatggaagatgatcaagcttaccccttcctccataccaaggaggatacctacgagaatctgcacaaagttctgcaggggcgtttgcctgcagtcgctcaggcagttgcacaattagccggccagttactgatccggctgtctcacgacagattactacctctcgattttggacgctatggtgatgtcgttctccgccatataggtaacctcaatgagtttagtggtgatctcaaagctcgcggcctgaccctccagtgggtatactcggcacgaggcgattacatccgggctgcagagaaactgcgtcaggaaatatattccagcgaggaacgggatgagcgattgactcgcatgtataatgtgcgtataatgagggtagagttttacttcctgtctcagtatgtcagccccgcagacagtccattccgccatatctttatgggtcgcggcgaccacactctgggcgcactactggaccatcttcgtttgctgagatccaattcatcaggaacccccggcgctacaagcagcactggttttcaggagtcgaggtttcgtcggcagttggccttgcttacttggactttacaaggcgctgccaacgccctgagcggcgatgtgtggaatatcgacaacaacttttag

SEQ ID NO: 2847 - DNA, 1596 bp, synthetic construct
  misc_feature 1..1596: note = source = /note="Description of Artificial Sequence: Synthetic coding sequence"
  source 1..1596: mol_type = other DNA
atggccgccaccctggacttaaagtccaaggaggaaaaagacgccgagctagataagcgcatcgaggctctgcgaagaaagaatgaggcgttgattagacggtaccaggagattgaagaggaccggaaaaaggccgagcttgaaggcgtggccgtgacggcccctaggaaggggagaagtgttgagaaggaaaacgtggccgtcgaaagcgaaaagaatctgggacccagccggcggtctcccggcacaccccgcccaccgggcgcgtccaagggaggtcgaactcccccacagcagggtggacgtgcaggtatgggccgagcgagtagaagctgggagggctcccccggcgagcaaccgcgaggtggcggcgcgggagggcggggtcgaagaggaagaggtcgcggaagtccccacttgtctggcgccggcgacacatccattagtgacagaaagtccaaggagtgggaggaacgcaggcgtcagaacatagaaaagatgaacgaggaaatggaaaagattgctgaatacgaacgcaatcaacgggaaggcgtcctggaaccaaatcctgtgcgcaacttccttgatgatcctagacgccgttcaggcccgttggaagaaagtgagcgggatagaagggaggagtccaggcgccacggtcgtaactggggcggccccgacttcgagagggtgagatgcgggctcgaacacgaaaggcaaggaagaagggccggcttaggatcagccggtgacatgacactgtctatgaccggcagagagaggagtgagtatttgaggtggaaacaggagcgagaaaagattgaccaggagaggctgcagcgccatagaaaaccaaccggacagtggcgccgagaatgggatgccgaaaagacagacggcatgttcaaggacgggcccgtgcctgcccatgagccctcccacagatatgacgatcaggcttgggctagaccccccaagccaccaacgtttggtgagtttctgagccagcacaaggcggaggcgtcgagccgtcgaagaaggaagagctcccgccctcaggctaaagccgctcctagggcttactcagatcacgacgatcgctgggaaacaaaagaaggagcagccagtccagcgccagagacgccgcagccgacctccccggaaacatccccaaaggagacgccgatgcaacctcccgaaattcccgctcccgctcacagaccaccggaagacgagggtgaggaaaatgagggtgaagaggatgaggagtgggaagatatatccgaggacgaggaggaagaagagattgaagtggaggagggagatgaggaggagcctgctcaggatcatcaggccccagaggccgcccctaccggaatcccatgtagcgaacaagctcatggcgtgcccttctcaccggaggagccgctgctcgaaccacaggcgccgggaaccccaagcagtccgttctctcctccctctgggcaccagccagtcagcgactggggagaggaagtggagctgaacagccctagaactacacacctggctggggcgctctcccccggggaggcatggccgtttgaaagcgtctag

SEQ ID NO: 2848 - DNA, 1329 bp, synthetic construct
  misc_feature 1..1329: note = source = /note="Description of Artificial Sequence: Synthetic coding sequence"
  source 1..1329: mol_type = other DNA
atgcattactgcgtcctttcagctttccttatcctgcatttggtgacagtggccctttctctgtctacctgctctactttagacatggatcagtttatgaggaagagaatcgaagccatcagaggtcagattttaagcaagctgaagctcacatcccctccagaggactaccctgaacccgaagaggtgccaccggaagtcatctccatctacaatagcactagggacctgctgcaggaaaaggccagcagacgcgccgctgcgtgtgaaagagagcgctctgatgaggagtactacgccaaggaagtatacaagattgacatgcctccgttttttccttctgagacagtgtgccccgtagtcaccaccccaagtgggagtgtgggatccctgtgcagccgacaatcccaggtgctgtgcggatacctggatgccattcctcctaccttctatcgaccttacttccggatagttcgctttgacgtgtccgctatggagaaaaacgcctcaaacctggtcaaagctgagttccgagttttcagacttcaaaatccaaaagcccgagtgccggaacagaggatcgagttgtaccagatcctgaaatccaaggacctaacaagtcctacacagcggtacatcgattccaaggtcgttaagacccgagctgaaggggagtggctctcttttgacgtgactgacgcggtacacgaatggttgcatcacaaagaccgaaacttaggattcaagattagtctccactgtccctgctgtaccttcgtcccgagcaataactatattatccctaacaaatccgaagaattagaagcccggttcgccggcatcgatggtactagcacctacacgagcggcgaccaaaaaactatcaagagcaccaggaaaaaaaattcgggcaagacaccgcacctgcttctgatgttgctcccctcttatcggctagagagtcagcagaccaaccggcggaagaaacgtgcacttgacgcggcatattgctttcgcaatgtgcaggataattgttgtctccgccccctttacatcgattttaagagagatctcggatggaagtggattcacgaacctaaaggatacaatgctaacttctgtgccggtgcttgtccttacctgtggagttccgacacccagcatagcagggtccttagcctgtataatacaataaacccagaggctagcgccagcccctgctgtgtgagccaagacttggaacctcttactattctttactacatcggcaaaacacctaaaatcgaacaattaagtaacatgattgttaaaagctgcaaatgcagctag

SEQ ID NO: 2849 - DNA, 1245 bp, synthetic construct
  misc_feature 1..1245: note = source = /note="Description of Artificial Sequence: Synthetic coding sequence"
  source 1..1245: mol_type = other DNA
atgcattattgtgtcctgtcggccttcctcatcctgcatctagtaactgtagcgctaagcctgtctacatgcagcacactggacatggatcagtttatgcgcaaaagaatcgaggccattagaggccagatcctatccaagttaaaactaaccagtccccctgaagactacccggaaccagaggaagtcccacctgaagtcatttccatttataattccactagagatctgctgcaggagaaggcctcaaggcgtgcggccgcctgtgagcgcgagcgaagcgacgaggaatattacgcaaaggaggtttacaagattgatatgccccccttcttccctagtgagaacgccattcccccgacattttacaggccctattttagaattgtgcgtttcgacgtctccgctatggagaaaaatgcgagtaatctcgtgaaagctgagttccgtgtgtttagacttcaaaatcctaaagcacgcgtaccagagcagcgcattgaactgtatcaaattctgaaatctaaagatctgacctccccgactcagagatacattgattctaaagtggtcaaaacacgggcggagggggaatggctcagctttgacgttactgatgctgttcacgagtggctccatcataaggatcgaaatttgggttttaaaatttcactgcactgcccctgttgtacctttgtgccgagcaacaattacatcatccctaataagagcgaagagctagaagcccggtttgcagggattgacggtactagcacatacacctccggggatcagaagacaattaagagtacccggaaaaaaaattcagggaagaccccacacctgctcctcatgctgctcccaagttatcgccttgaaagtcaacagacaaatcgtcgcaaaaaacgggcccttgacgccgcatattgctttcgcaatgtgcaggataattgctgcctgcgacctttgtacatcgattttaagcgggatctgggctggaagtggatccatgaaccaaaaggctacaatgcgaatttctgtgccggtgcatgcccatacctgtggagtagtgatacgcagcactctcgcgttctgagtttgtataacaccatcaaccctgaagcctctgcgagcccttgttgtgtttcccaggatcttgagccccttaccatcctttactatattggcaagactccgaaaattgaacagctatcaaatatgattgtaaagtcttgtaaatgctcgtag

SEQ ID NO: 2850 - DNA, 1239 bp, synthetic construct
  misc_feature 1..1239: note = source = /note="Description of Artificial Sequence: Synthetic coding sequence"
  source 1..1239: mol_type = other DNA
atgaaaatgcatttgcagcgagcactggtggtactggcgcttctcaacttcgcaactgtgagtctcagcttgagcacatgcacaactcttgacttcggacacattaaaaagaagcgggtggaggcgatccggggacagattctatcaaagctgcgactaactagtccccctgagcccacagtgatgacccacgttccctatcaggtgctagctctctacaacagcactagggagcttcttgaagaaatgcacggcgaaagagaggaagggtgcactcaagagaacactgagtccgagtactacgcgaaggaaatacacaaattcgatatgatccagggtctcgctgagcataacgagctggccgtgtgcccgaaggggattacatccaaagtcttccgatttaatgtgagtagcgttgagaagaatcggactaatctttttagggcagaattccgcgtgctccgtgtacccaacccatcttctaaacgaaatgaacagcgaatcgaactctttcagattttgcgccctgatgagcacatagctaaacaaaggtacatcggaggcaagaatctaccgaccagaggaactgccgaatggcttagcttcgacgttactgatacagtaagagagtggctgctccggagagaaagtaacctcggtcttgagatctcaattcattgcccatgccacacttttcagcccaacggtgatatacttgaaaatattcacgaggtcatggagattaaattcaaaggggtggataacgaggatgaccatggtcgcggggatctggggcgacttaagaagcagaaagatcatcacaatccacacctgatcctgatgatgatccccccccatcggctagataacccagggcaggggggacagagaaagaagcgggccctggacaccaattattgtttcagaaacttagaggaaaattgctgcgtacggccattgtatatcgatttcaggcaggacctggggtggaagtgggtacacgagcccaagggatactacgcgaacttctgctccggcccttgtccctatcttcgttccgccgatactactcacagcacagtgctggggctttataatacccttaaccccgaggcctccgcttcaccctgctgcgtgcctcaggacctggaaccgctgactatcttgtactatgtagggagaacacccaaggtggagcagttgtctaacatggttgtcaagagctgtaaatgctcttag

SEQ ID NO: 2851 - DNA, 930 bp, synthetic construct
  misc_feature 1..930: note = source = /note="Description of Artificial Sequence: Synthetic coding sequence"
  source 1..930: mol_type = other DNA
atgaagatgcacctgcagcgtgcgttggtggtgctggcactgcttaattttgcaaccgtatctcttagcctctctacctgtacgaccttggattttggtcatataaagaagaagagagttgaagcgattagaggacagatcttaagtaagctgagattaacaagtccgcctgaaccgaccgtcatgacccatgttccgtatcaggttttggctttgtacaatagtaccagagagctgttagaagagatgcatggagagcgcgaggaaggttgcactcaggaaaacactgaaagcgaatattacgcaaaggagatacacaagtttgacatgatccaggggctggccgagcataacgagctcgcagtctgcccaaaaggcatcacatccaaggtatttcggtttaatgtctcctccgtcgaaaaaaaccgaactaacctgtttagagccgagttccgtgtactgcgcgttcctaatccctctagcaaaaggaacgaacagcgaattgaattgtttcagatactgcggccggatgaacatatagcgaaacagcggtatattggcgggaagaatcttcccacgcgaggcaccgccgagtggctgtcctttgacgttactgataccgttcgggaatggctcctgcgccgcgagagtaacctggggttagaaatctctatccactgcccgtgtcatactttccaacccaatggcgatattttagagaacattcatgaggtgatggagatcaagtttaagggagtcgataatgaggatgaccacgggcggggtgaccttggacgacttaaaaagcagaaagaccaccacaacccccatctgatattgatgatgattccgcctcaccggctggacaacccggggcaagggggacaacgcaagaagagggcactggacaccaattactgcttcagatag

SEQ ID NO: 2852 - DNA, 444 bp, synthetic construct
  misc_feature 1..444: note = source = /note="Description of Artificial Sequence: Synthetic coding sequence"
  source 1..444: mol_type = other DNA
atggccagtcataggcttctgctgttgtgtctggccgggctggtgtttgtttctgaggctgggcctacaggaactggggagagtaagtgcccattgatggtgaaagtgttggatgctgtgcgcggctcccccgccatcaatgtggctgtccatgttttccgcaaggccgccgatgacacgtgggagccatttgcttccggcaaaacttcagagagtggcgagctgcacgggctcactactgaggaagaattcgtcgagggaatttataaagtggaaatcgacactaagtcgtattggaaagccttaggcatttccccattccacgagcatgcagaagtcgttttcaccgccaatgactccggccccaggcgctacacaatagcggcattattatccccgtactcgtacagcaccactgccgtggtgaccaaccctaaggagtag

SEQ ID NO: 2853 - DNA, 555 bp, synthetic construct
  misc_feature 1..555: note = source = /note="Description of Artificial Sequence: Synthetic coding sequence"
  source 1..555: mol_type = other DNA
atggcgagccataggctactgctgctttgtctggcgggactggtcttcgtttcggaagccgggccaactggtaccggcgagtccaagtgtcctctgatggtaaaagtgctagatgcggtcaggggctctcccgctattaatgtggctgtgcatgttttccggaaagccgcagatgacacctgggagcccttcgccagcgggaagacctcggaatccggggagctccatggtctaacaaccgaagaggagttcgtggaggggatctataaagtggaaatcgatactaaatcttattggaaagctctaggaattagcccgttccacgaacacgcagaagtgtcaatccagacattcgaggcttttcaggaaatcctgtacaagaagaaatttaccacactgtggcattggaccagcggcggccagtcattcttcagggctcttgtggaagtggttttcacggcgaatgactccggtccccgtagatatacaattgcggcgcttcttagtccctatagctatagcaccactgctgtggttaccaatcctaaggagtag

SEQ ID NO: 2854 - DNA, 420 bp, synthetic construct
  misc_feature 1..420: note = source = /note="Description of Artificial Sequence: Synthetic coding sequence"
  source 1..420: mol_type = other DNA
atggcttcccaccggttgcttctgttgtgcctcgctggactggtatttgtgagtgaggctggtcctactgggacaggcgaaagtaaatgtcctctgatggttaaggttctcgatgccgtgcgtggctcgcccgcaatcaatgtggctgtgcatgtatttaggaaggctgctgacgatacatgggagccgtttgccagcggcaagacttctgagtcaggggaactgcacgggttaactacagaagaggaattcgtagaaggaatctacaaagtcgagatcgacaccaaatcctattggaaggctttgggcatctctccgtttcacgagcatgcggaggtggtgttcaccgccaatgatagcggaccacgtcggtactacagttactccaccaccgcagtggtgacgaacccaaaggaatag

SEQ ID NO: 2855 - DNA, 996 bp, synthetic construct
  misc_feature 1..996: note = source = /note="Description of Artificial Sequence: Synthetic coding sequence"
  source 1..996: mol_type = other DNA
atgaacggcacacgcaactggtgcaccctcgtagacgtgcaccccgaagatcaagccgcggtctatctcaaggggagatctggagataaaatgattcacgaaaagaacattaaccagttgaaatctgaggttcagtatatccaggaggcccggaactgcctgcagaaacttagagaagatatctcatccaaactcgaccgaaacctgggagacagtctgcatcggcaagagattcaggttgtcctggagaagccaaatggtttctcacagagcccaacagcactctacagctcccccccagaggtagatacatgcatcaacgaagacgttgagtcactgcggaaaaccgtgcaggacctgttagcgaagctgcaagaagctaagaggcagcaccaatctgactgtgttgcattcgaggtgaccctgtcgcggtatcagcgagaagccgagcagtctaacgtggcacttcagagggaagaggatagggtggagcagaaggaagcagaggtcggagagttacagagaagactgctgggcatggagaccgaacatcaggctttactcgcaaaggtgagggagggggaggtagcacttgaagaacttcgctccaacaatgctgattgccaggccgagcgcgagaaggccgcaacccttgaaaaagaggtcgctggtctgagggaaaagattcatcacctggacgatatgctgaaaagccaacagcgaaaggtgcgacagatgattgaacaactccagaactcaaaagccgttattcagtccaaggacgcgacgattcaggaattgaaagaaaagattgcatatttggaagcagagaatttggagatgcatgatcggatggagcacctaatcgaaaaacagatcagtcatgggaatttttccacacaggccagggccaaaacagagaacccaggttcaatcaggatttctaagccaccttcacccaaacccatgcccgtcatccgtgtagtcgagacgtag

SEQ ID NO: 2856 - DNA, 1098 bp, synthetic construct
  misc_feature 1..1098: note = source = /note="Description of Artificial Sequence: Synthetic coding sequence"
  source 1..1098: mol_type = other DNA
atgaacgggactcgcaattggtgcacgctcgtcgacgtgcacccagaggaccaagcagccgccgggcgtaaaacctatgctatggtctccagccactctgcaggacattccttagccagcgagctcgtagagtctcacgacgggcatgaggagatcatcaaagtatacctgaagggtagatcaggcgataaaatgatccatgaaaagaacattaatcagctgaaatctgaagtgcagtacatccaggaagctcgaaactgcttacagaaacttagagaagacattagctccaaactcgatcgcaatttaggcgatagtctacacaggcaggagatacaagttgtgttggagaagccaaatggcttctcccagagccctacggctctctacagctccccacctgaagtggacacctgcattaatgaggatgtcgaatccttgcggaagacagtgcaggacctcctggctaaattgcaagaagctaagaggcagcatcaatctgattgcgttgcctttgaggtgaccctgtccagatatcagcgcgaggcagagcaaagcaatgtggctcttcagcgggaagaagatcgggtcgagcagaaagaggccgaagtgggagaactgcagcggcgacttttaggaatggagactgagcatcaggctttgctcgctaaagtacgggaaggagaagtggccctcgaagagcttaggtcaaataatgctgattgtcaagcagaaagggaaaaagccgccaccctggagaaagaggtggctggcctccgtgaaaagatacaccacttggacgatatgctgaagtctcagcagcggaaagtgcggcagatgatagaacagttgcaaaatagcaaagccgtaattcagagcaaggatgccacaattcaagagctaaaggaaaaaatagcctatctggaagcagagaatctcgaaatgcatgatcgtatggaacacctgattgagaagcagattagtcatggcaactttagtacccaggcccgggctaagaccgaaaacccagggtcaatccgcataagcaagcccccctcgcctaaaccaatgccagtgatcagggtggttgagacttag

SEQ ID NO: 2857 - DNA, 1173 bp, synthetic construct
  misc_feature 1..1173: note = source = /note="Description of Artificial Sequence: Synthetic coding sequence"
  source 1..1173: mol_type = other DNA
atgaacggaacacgtaactggtgcaccctggtcgacgtgcatcccgaagaccaggctgcagggagcgtagacatcctgcgacttaccttgcagggcgagctcaccggtgatgagctcgagcacattgcacaaaaggcgggtcgcaaaacctacgccatggtttcgagccacagtgctggacactcactcgcgagcgagctcgttgaatcccacgatggacacgaggagattatcaaagtgtacctgaagggcagaagtggcgacaaaatgatccacgagaaaaacatcaaccagctgaagagcgaggtgcagtatattcaggaagcccggaattgtttacaaaagttgcgcgaggacatcagctctaagctggaccgtaacttgggcgattctttacacagacaggagattcaggttgtcctcgaaaagcccaacggcttctcccagagcccaacagctctgtactcctccccccccgaagtcgacacctgtattaatgaggacgtggaaagtcttaggaaaaccgttcaggatcttctcgccaagttgcaagaggcaaagcgtcaacaccagagtgactgcgtggccttcgaggtgacactttcacgatatcaacgcgaggccgagcagtccaatgtggcgctgcagcgggaggaggacagagtcgagcagaaagaggcggaagtgggtgagctccagagaaggcttttgggtatggaaacagaacatcaggccctcctggccaaagtccgtgaaggagaagttgctctcgaggagttaagaagcaataacgctgactgccaggcagaacgagagaaggccgccactctggagaaggaagttgcggggttgcgggagaaaatccaccacctggacgatatgctcaaatcccagcagcgcaaagtgcgccagatgatcgaacaactccagaattctaaagccgtcattcaaagcaaggacgcaacaatccaggagctgaaagagaagatcgcatacctggaagcggaaaatctggagatgcacgatagaatggagcatttaattgaaaagcagatctctcacggaaatttcagcacacaagcacgagctaagactgagaacccaggtagcatccgaatttcaaaaccaccctcccccaaacccatgccagtgattcgtgtggtggaaacttag

SEQ ID NO: 2858 - DNA, 600 bp, synthetic construct
  misc_feature 1..600: note = source = /note="Description of Artificial Sequence: Synthetic coding sequence"
  source 1..600: mol_type = other DNA
atgaatggcaccagaaactggtgcaccttggttgatgtccatcccgaggaccaggccgcagccggtcgcaaaacctatgccatggtcagcagccatagcgcagggcacagtctggcgagtgagctggtggagtcccatgatggccacgaagaaatcattaaagtttacctgaagggcagaagtggagataaaatgatccacgaaaagaatatcaaccagctcaagagcgaggtacagtacatacaggaagctagaaattgcttgcagaaactgagggaagacatttccagcaagcttgatcgtaatctcggggactctctccaccgccaagaaatccaggtggttctggagaaacctaacgggtttagtcaatcccctacggctctttattcatccccccctgaggtcgatacatgtatcaacgaggacgttgagagcttgcggaaaacagtccaggatctcctggccaagctccaggaggccaagcgtcagcaccaaagcgactgtgtggcgtttgaggttactctttcccggtatcagcgggaagctgagcagagcaatgtggctctgcagcgggaggaggatcgttgtccagaatag

SEQ ID NO: 2859 - DNA, 1230 bp, synthetic construct
  misc_feature 1..1230: note = source = /note="Description of Artificial Sequence: Synthetic coding sequence"
  source 1..1230: mol_type = other DNA
atgtcttcccctggtatgacgtccctgcagctggagaaggaggaatgtatgcaatgtgtgccctgcagcccaagaacaagagttgctctgttggagttgtaccgcgcaatgtgccagggatctgttgacatcctaagactgactttgcaaggagaattgacgggagatgaactggaacacatcgcacagaaggccggacgcaagacgtatgctatggttagctcacacagtgctggccattcgcttgcgagtgagctggtcgaatcacacgatggccatgaggagataatcaaagtctaccttaagggccgcagcggcgataaaatgatccacgagaagaacatcaaccagctgaagtcagaggtccagtatatacaggaagcgcgcaactgtcttcagaagctgagagaggacatttcctcaaaactggatagaaatctcggagattctctgcatagacaagaaatacaagtcgttcttgaaaaacccaatggcttctctcagtcaccgactgccctttacagctctccacccgaggtggatacctgtattaacgaggatgtggagtctctaagaaaaaccgtgcaggatctgctagcgaaattacaagaagcgaagaggcagcaccagtccgactgcgtggccttcgaagtgacgctgtccaggtaccaacgtgaggccgagcagtctaacgtcgctctgcaacgggaagaagatagagtcgaacagaaggaagccgaggtcggcgagcttcaaagacggctcttgggcatggagacagaacatcaggctcttctggcaaaagtccgcgagggagaagtcgcactcgaagagttgcggtctaacaatgccgattgccaagccgagcgggagaaagccgctacactcgagaaggaggtcgctggactgcgagagaagatccaccacttagatgacatgctgaaaagtcaacaaaggaaggtccgccagatgattgagcagctccagaattcaaaagccgtgatccaaagcaaggacgcgaccatccaagaactgaaggaaaagatagcgtatttggaggcggagaaccttgaaatgcacgataggatggaacacctgatcgaaaaacagatcagtcatgggaattttagcactcaggccagggccaagaccgagaatcccggatctatccggatctccaaacctccttcacccaagccaatgcctgtcatccgggtcgtggagacatag

SEQ ID NO: 2860 - DNA, 543 bp, synthetic construct
  misc_feature 1..543: note = source = /note="Description of Artificial Sequence: Synthetic coding sequence"
  source 1..543: mol_type = other DNA
atgaatggtactagaaattggtgcacgctggtcgatgtgcatcccgaggaccaggctgctgccggacggaagacctacgcaatggtgtcttcccattccgccggacactccctggcctctgaattggtggaatctcacgatggccacgaggaaatcatcaaggtttatctgaaaggaaggagtggcgataagatgatccatgaaaagaacatcaaccagttaaagtccgaggtgcagtacatccaggaggcccgcaattgcctccaaaaattgcgcgaggacatatctagtaagttagacaggaacttgggggattctttgcataggcaggagattcaggttgtgcttgaaaaacccaacggtttttcccaaagcccaaccgcactgaaggctggcgatactgacgtccaatccgattggagaatgagctgggggaatgaggttccttctaccaacacggcgcagtttctcgcaacaaactgtctgttcttctatcttcttcatctccagcctacgctcccatggccgcccgctgacaggtag

SEQ ID NO: 2861 - DNA, 1182 bp, synthetic construct
  misc_feature 1..1182: note = source = /note="Description of Artificial Sequence: Synthetic coding sequence"
  source 1..1182: mol_type = other DNA
atggaggagcctcagtccgatccttcggtggagcctcctctgagtcaggagacattcagcgacctttggaaattgcttcctgaaaacaatgtgctatcacccctgccttcgcaggctatggatgacctgatgttgtctccagatgatatcgagcagtggtttacggaagaccccggcccagatgaagcacccagaatgcctgaggcagctccgccggtagcccccgcccccgcagctcctacaccagctgccccagcacctgcaccttcttggccgctctcctccagcgtcccctcacagaagacttaccagggcagctacggattcaggctgggtttcttgcactctgggacagccaagagtgtgacttgtacatactctccagccctcaataagatgttttgtcagctggcaaaaacttgccccgttcagctgtgggtggactcgactccacccccaggcacacgagtacgagccatggctatatacaaacagtcccaacatatgacggaggtagtgcgcaggtgtcctcatcatgaaaggtgctctgacagtgacggtctggcacctcctcaacacctgattcgagtcgaaggcaaccttagggtggagtatcttgacgataggaatacttttcgccactctgtcgtagtgccctacgaaccgcctgaagtgggcagcgattgtaccacgatccactacaactatatgtgcaatagttcttgcatggggggtatgaaccggcgtcccatcctcacgattataactctcgaggattccagcggaaaccttctaggccgcaactctttcgaggtgcgagtgtgtgcatgccccggtcgggatcggaggacagaggaggagaatcttcggaaaaagggtgagcctcaccatgagttgccaccaggcagcaccaagcgagccctccctaataatacttcctctagcccacagcctaaaaaaaagcccttagacggcgagtattttactttgcagattcggggacgagaacggtttgagatgttcagagagttaaatgaggctcttgagttgaaggatgcacaggcaggcaaagagcccggcggatcacgcgcacactcctcacacctgaagtcaaagaaggggcagtctacctctaggcataaaaaactgatgtttaaaaccgaaggtcccgatagcgattag

SEQ ID NO: 2862 - DNA, 1032 bp, synthetic construct
  misc_feature 1..1032: note = source = /note="Description of Artificial Sequence: Synthetic coding sequence"
  source 1..1032: mol_type = other DNA
atggaggagccccaatctgacccgtctgttgagcctccgttgtcacaggaaaccttctccgacctctggaagctgctgcccgaaaacaatgtgctcagcccactcccttcccaagcaatggatgacctaatgttgtctcccgatgacatcgaacagtggtttacagaagaccccggccccgatgaagcccctcggatgcccgaggccgctccccccgttgctcccgcccctgccgcacccaccccggccgctcccgcacctgccccatcttggcctctgtcaagttccgtcccttcacagaagacatatcagggctcctacgggtttcggctgggttttctgcacagcggcacagctaaaagcgttacctgtacttactctccagccctcaacaaaatgttctgtcagctcgccaagacatgtcccgttcaattgtgggtggactcaacccccccgccaggaacaagggtgagagccatggctatctataaacagagccagcacatgaccgaggtggtgagacgctgtccccatcatgagcgctgtagcgattccgatgggcttgctcccccacagcacctcatccgtgttgaggggaacctcagagtggaatatctggatgaccgaaatacgttccggcatagtgtggtcgtgccttacgagccacccgaggttggatcagactgtaccacaatccattacaactatatgtgtaatagtagctgcatgggcggaatgaatagaaggcctatcctaaccatcattaccctggaggactctagtggcaacttgctcgggagaaactctttcgaggttcgggtctgtgcttgccctgggcgggacaggaggacggaggaagagaatctgcggaagaagggtgagccccatcatgagctccctccaggcagcaccaaacgcgcgcttcctaacaatacctccagcagcccacagcctaaaaagaaacctctggatggagagtactttactcttcagaaaacattccctgccaggcacgggggctcgcacctttag

SEQ ID NO: 2863 - DNA, 1149 bp, synthetic construct
  misc_feature 1..1149: note = source = /note="Description of Artificial Sequence: Synthetic coding sequence"
  source 1..1149: mol_type = other DNA
atggaggagccgcagtcggacccgtctgtcgaaccaccactgagccaggagacatttagtgatctgtggaaacttctgccagagaataacgtcctgtcccccttaccctctcaggcaatggacgatctcatgttgtccccagatgacatcgaacagtggttcacggaagatcccgggccggacgaagcgcctcgaatgcccgaggctgctccacctgtggctccagctcccgctgctcccacacctgcagccccagcacccgctcctagttggcccctatcgtcttccgtgccttcacagaagacataccagggatcctacgggtttcgcctgacatgtacctattctcctgccctgaacaaaatgttttgtcagctggcaaagacctgtcccgtgcaactctgggtggacagcactcctccccctggtacccgagtgcgagcaatggctatctacaaacagagtcagcatatgaccgaggtggtgagaagatgtccccaccacgagcgctgctcggactcagatggacttgccccaccccagcatcttatccgtgtggaaggcaacctgagagtggagtacttggacgacagaaacacgttccggcactcggtagtggtcccctacgaaccgcccgaggtcgggtccgactgtacaaccatccactacaactacatgtgtaacagttcttgtatgggaggcatgaatcgaagacccatcctcaccattattactctggaagattcctccggtaatctccttggaaggaactcgtttgaggtacgggtgtgcgcctgccctggccgggacagaaggactgaggaagagaacctgagaaagaaaggcgaaccccatcatgaacttcctccaggttctacaaagagggctttgcctaacaatacttcgtcatccccacagcctaaaaagaagccccttgacggcgagtactttacccttcagattcgcggacgagagcgctttgaaatgtttcgagaactgaacgaggccctcgaacttaaggacgcacaggccggcaaagaacccggaggctctcgtgctcactcaagccatcttaaaagcaagaagggacaaagtacaagtagacacaagaagctgatgttcaaaactgagggacccgactctgactag

SEQ ID NO: 2864 - DNA, 858 bp, synthetic construct
  misc_feature 1..858: note = source = /note="Description of Artificial Sequence: Synthetic coding sequence"
  source 1..858: mol_type = other DNA
atggaagaaccgcagagtgacccaagtgttgaacctcccctgtcccaggagaccttctccgacctctggaagctcctccccgagaataatgtgctttcccccttaccctcccaggccatggacgatctcatgctgagcccagatgatattgagcagtggttcaccgaggatccggggccagatgaggctcctcgtatgcctgaagctgcccccccagttgcgcccgcccccgcagcacccacccccgcagcacccgctccggcacccagttggcctctgtccagctctgtgccaagccagaagacctaccaggggtcttacggcttcagactcggttttctccattcagggaccgctaaatcagtcacatgtacttactcaccagctttgaataaaatgttttgccagttagcaaagacctgtcccgttcagttgtgggtagatagcacaccccccccaggcacaagggttcgagccatggcgatttacaagcagtcgcagcacatgacggaggtggtgcggcggtgtccccaccacgagaggtgcagcgactccgacgggttggctcctccacagcacctgattcgcgtggagggaaatctgcgcgtggaatacctggacgatcggaatactttcaggcattctgtagtggtgccctatgagccaccagaggtgggctctgattgcaccaccattcactacaactacatgtgtaattcatcctgtatgggagggatgaacagaagacctatcctgactataatcacacttgaagatagtcgtccacgacaggtcgaccacctgagaagcggggtgcaagattcactagccaacattgcaaaaagccatctgtactag

SEQ ID NO: 2865 - DNA, 273 bp, synthetic construct
  misc_feature 1..273: note = source = /note="Description of Artificial Sequence: Synthetic coding sequence"
  source 1..273: mol_type = other DNA
atgttttgtcagttggctaagacttgcccagtccagctctgggtggactccacccctccacctggaacccgcgtgagagccatggccatttataaacaaagccagcatatgacagaggttgtgcgtagatgcccccatcacgaaaggtgctccgactccgacgggctcgctccgcctcagcacctgatcagagtggaaggcaatctgagggtggaatatctggacgaccggaacacctttcggcatagcgtggtgtctggtcggagggggtag

SEQ ID NO: 2866 - DNA, 135 bp, synthetic construct
  misc_feature 1..135: note = source = /note="Description of Artificial Sequence: Synthetic coding sequence"
  source 1..135: mol_type = other DNA
ccactgccttctcaaaggagaaatcattggatggaaaatatttctcctttctcacacttaaagtccaagaaaggccaatccacgtcccgccataaaaagctgatgtttaagaccgaaggccccgacagtgattag

SEQ ID NO: 2867 - DNA, 1026 bp, synthetic construct
  misc_feature 1..1026: note = source = /note="Description of Artificial Sequence: Synthetic coding sequence"
  source 1..1026: mol_type = other DNA
atggaggagccgcagtctgatccctccgtcgagcctcctctatcccaggagaccttcagtgacctgtggaagctgctacctgaaaacaatgttcttagccctctgccaagccaagctatggatgacctcatgctcagtcccgatgacattgaacagtggtttacagaggatccgggacccgacgaggctccccgcatgcctgaagctgcacctcccgtcgctcccgcccccgccgcccccactcccgccgcgccggctcccgccccttcttggccgctgagctcatctgtgcccagtcaaaagacataccaaggaagctatgggttcagactcggcttcttgcatagcggaaccgcaaaatctgtgacctgtacatacagcccagctctgaacaagatgttttgtcagttggccaaaacctgtcccgtgcagctgtgggttgactccactcccccgcctggtacccgagtccgcgccatggctatttacaagcagtcgcagcacatgaccgaagttgtacggcggtgccctcatcacgagcgctgctctgactccgacgggctggccccaccccagcaccttattagagtggaaggaaatttacgcgtcgaatacctggatgacagaaacacgttccgccactcggtcgttgtgccttatgagccacccgaggttggtagcgattgcacaaccatccattacaattacatgtgcaacagttcttgtatgggaggtatgaacagaagacctatcttgacaatcattactctggaggattcgtctggcaacctgctggggcgcaattcttttgaagtccgggtctgcgcctgcccgggcagggacagacgcaccgaagaagaaaacctgcgcaagaagggcgaacctcaccacgaactgcctcccggaagcacaaaaagggcactgcctaacaataccagcagctctccccagccaaagaagaagccacttgacggcgagtacttcacgttgcaggatcagacgtcctttcagaaggagaattgttag

SEQ ID NO: 2868 - DNA, 1182 bp, synthetic construct
  misc_feature 1..1182: note = source = /note="Description of Artificial Sequence: Synthetic coding sequence"
  source 1..1182: mol_type = other DNA
atggaggagccccagagtgatccttcagtcgaacctcccctaagccaggagacctttagcgatttatggaagctccttcctgagaataacgtactttcgccattaccgtctcaggccatggatgatcttatgcttagcccagacgatatcgagcagtggttcactgaggatcccggcccggatgaagccccacgtatgccagaagccgctccccccgtcgcccctgcacctgccgcccccaccccagcagctcccgcacccgcgccctcctggccgctgtcctccagtgtcccatctcaaaagacttaccaagggagctacgggttcagactgggctttctgcattccgggactgcaaagtctgtgacatgtacttattcccccgctctgaataagatgttttgtcagcttgccaagacttgcccagtgcagctctgggttgatagcaccccccctcccggaactcgggtgagagcgatggctatttataagcagagccagcacatgactgaagtcgtgcgcagatgtccgcatcatgagcgctgctcagacagtgatggcctggctcctcctcaacatctgatccgtgtggaaggtaacctgagggtggagtatctggacgaccgcaacacatttcggcatagcgtggtggtcccatatgagccacctgaggtgggcagcgactgcactaccatacactacaactatatgtgcaattcctcttgcatgggaggtatgaaccgccgcccgatcctgacaataatcaccctcgaggactcttccgggaacctgcttggccgcaactcctttgaagtgcgcgtgtgcgcatgcccgggcagggacaggcggacagaggaagaaaacttacgaaaaaagggggagccacaccacgagttaccaccaggtagcaccaaaagagcactgccaaacaacacgtcctccagcccgcagcccaagaagaaaccactcgacggggagtattttaccctccagattagaggccgagagagattcgaaatgttccgagaactaaacgaggcactcgagctgaaagacgcacaggccgggaaagagcctggcggatctcgagcccactcatctcacctgaaaagcaaaaaaggtcagagcacttctcgacataaaaagttaatgtttaagacagagggtcctgatagcgattag

SEQ ID NO: 2869 - DNA, 1041 bp, synthetic construct
  misc_feature 1..1041: note = source = /note="Description of Artificial Sequence: Synthetic coding sequence"
  source 1..1041: mol_type = other DNA
atggaagaaccacagtccgatccctctgtggaaccacccctgtcccaggaaaccttcagcgacctttggaagctcttgcccgagaataacgtactctcacctcttccctcacaggccatggacgacttaatgttgtcccctgacgacatagagcagtggttcaccgaggatcctggacctgacgaagctcctcgaatgcccgaggcggcgccaccagtggccccagccccagcagcacccactcccgccgcccccgctcctgcaccatcgtggccactgtcgagcagcgtaccctctcagaaaacctaccagggatcgtacggattccgcctgggatttctccacagcggcaccgccaaatctgtgacgtgtacctactccccagcattgaataagatgttctgccagcttgcgaagacctgtccagtgcagttatgggtcgacagcacacctcccccagggacacgtgtgcgagctatggctatatacaagcaaagccaacacatgacagaggtcgtgagacggtgtccacaccatgagcggtgttcagactccgacggacttgcacccccccagcacctcatcagggtcgagggtaacctgcgcgttgagtacttggacgataggaacaccttccggcactctgtcgttgtaccttatgaacccccagaagtgggcagcgactgtactactatccactacaattatatgtgtaatagctcatgcatgggcgggatgaatagaaggcctatcctaactatcattacgttggaggatagcagcggaaacttacttggaagaaattctttcgaggtgagagtgtgcgcctgccccggccgggacagaaggactgaggaagagaatctccgcaaaaaaggtgagccccatcatgaattaccacctgggagcaccaaacgggcactcccaaacaacacctcatcatcacctcagcccaagaaaaagcccctcgacggggagtacttcaccctgcagatgctcctggatctccggtggtgttatttcctcatcaattcgagttag

SEQ ID NO: 2870 - DNA, 387 bp, synthetic construct
  misc_feature 1..387: note = source = /note="Description of Artificial Sequence: Synthetic coding sequence"
  source 1..387: mol_type = other DNA
atggaggagccacagtcagacccctcggtagaaccacccctgtcccaggagaccttttcagacctctggaaactattacccgaaaataatgtgctgtcaccattgccatcacaagccatggatgatctcatgctctcccctgacgatattgagcaatggttcaccgaggaccccgggcctgatgaggccccccggatgccagaggctgcgccaccggtcgcacctgctccagctgcaccaactcctgcggccccagctcccgccccaagctggccactaagcagcagcgttccgtcccagaagacctaccaggggtcctacgggttccgccttggcttcctgcatagcggaaccgctaagagcgtcacatgtacgtatagcccttag

SEQ ID NO: 2871 - DNA, 498 bp, synthetic construct
  misc_feature 1..498: note = source = /note="Description of Artificial Sequence: Synthetic coding sequence"
  source 1..498: mol_type = other DNA
atggaggagccccaaagcgatccatcagttgaacccccactatcccaagaaactttctcagacctgtggaagctgttgcctgagaataacgttctgtcccccctaccttcccaagccatggatgacctgatgttgagtccagacgacatcgaacaatggttcactgaagacccaggacctgatgaggcacctaggatgccggaggccgcaccccccgtggcccctgccccggccgcccccacgcccgctgcccctgcccctgcccccagctggccattaagtagctccgtgccatcgcagaaaacttatcagggaagctatgggtttcggctgggtttcctgcatagcggcacagccaaaagcgtgacctgtacctactccccggcccttaacaaaatgttttgccagcttgctaaaacatgtccggtccagttgtgggtcgacagcactccacctcccggcacacgtgtgcgcgcaatggctatttacaagcaatag

SEQ ID NO: 2872 - DNA, 600 bp, synthetic construct
  misc_feature 1..600: note = source = /note="Description of Artificial Sequence: Synthetic coding sequence"
  source 1..600: mol_type = other DNA
atgttctgccaacttgccaagacctgccctgtgcaactttgggtggacagcactccgcctccggggactagggtgagggcgatggccatctataagcaatctcaacatatgaccgaggtcgttcggcggtgcccccaccatgaacggtgctccgactcagacggccttgcccctcctcagcatctgatccgggtggagggaaacctgagggtggaatatttagacgaccggaacactttccggcacagcgttgttgtcccctatgaaccacccgaagtcggcagtgattgcacaacaattcactataactatatgtgtaatagttcttgtatggggggtatgaaccgaagacccatcttgacaatcatcacactggaggactcctcaggaaaccttctggggcgtaactcattcgaggtccgagtgtgcgcctgtcccgggcgcgatcgtaggactgaagaggagaatcttcggaaaaaaggcgaaccgcaccacgaattgccaccagggagcaccaaaagggcattaccaaacaataccagcagttccccccaacccaagaagaaaccactggacggcgagtattttaccctgcagtag

SEQ ID NO: 2873 - DNA, 468 bp, synthetic construct
  misc_feature 1..468: note = source = /note="Description of Artificial Sequence: Synthetic coding sequence"
  source 1..468: mol_type = other DNA
atggaagagccccaaagtgacccctcagtggagccacccctcagtcaggagaccttctctgacctgtggaagctgctcccagagaacaatgtgctctatagcccagctctgaataagatgttctgccagctcgctaagacatgtcctgtccaactgtgggtcgactccacaccccctccaggcaccagggtgcgggcaatggcaatttataagcagtctcagcatatgacggaggtggtccgaaggtgccctcaccacgagaggtgttcagacagtgatggattagccccaccacagcacctgattcgggtcgaaggaaatctgcgggtcgagtacctagacgacaggaacacatttaggcacagcgttgtggtgccatacgagcctcctgaagttggctccgattgtacaaccattcattataattacatgtgcaatagctcttgcatgggaggcatgaatcgctag

SEQ ID NO: 2874 - DNA, 468 bp, synthetic construct
  misc_feature 1..468: note = source = /note="Description of Artificial Sequence: Synthetic coding sequence"
  source 1..468: mol_type = other DNA
atggaggagccacagagtgatccttccgtggaacccccactgagtcaggaaaccttcagtgacctatggaagcttcttccagagaataatgttctctacagccctgccctcaacaaaatgttctgtcaactggctaagacctgtcctgtccagctttgggtggactcaacacccccgccaggtacaagagtgcgggctatggcgatctacaagcagtctcagcacatgacagaggtggtaaggcgatgtccgcaccacgagcgctgctccgattcagacggactagcccctccacaacatctgattcgcgtcgaaggtaacttgcgagtcgagtacctagacgatcggaacacctttaggcactccgtcgtggttccttacgaaccgccggaagtgggctctgactgtaccacaatccattacaactatatgtgcaactcgagctgcatgggcggcatgaatcgttag

SEQ ID NO: 2875 - DNA, 1590 bp, synthetic construct
  misc_feature 1..1590: note = source = /note="Description of Artificial Sequence: Synthetic coding sequence"
  source 1..1590: mol_type = other DNA
atgctactggcagtgctgtattgcttactctggagtttccaaacatcagctggccatttcccaagagcctgtgtctcttcgaaaaacttgatggaaaaggagtgctgccctccctggagcggagaccgctctccctgcggccagctgagcggccgcgggtcatgtcagaatatcttactgagtaacgcaccactcggtccccaattccccttcactggagtggacgatagagaatcttggccatctgtcttttacaatagaacctgtcagtgctctggaaattttatgggtttcaactgcggaaactgcaagttcgggttctggggccctaattgtaccgaacggaggctgctggttcggaggaatatctttgatctcagtgctcctgagaaggacaagttcttcgcctacctgacgctcgcaaaacatactatttctagcgactatgtcatcccaattggtacatacggccagatgaaaaatggctcaacccctatgtttaatgatataaatatttacgatttatttgtgtggatgcactactatgtcagcatggacgccctactggggggctcggaaatctggagggacattgattttgctcatgaggctccggcttttttaccttggcatcgcctcttccttctccgctgggaacaagaaatacagaaattgacaggggacgagaatttcaccataccctactgggactggcgggacgctgagaaatgtgacatctgcacggatgaatacatgggcggccagcaccccaccaatcccaatctcctgtcgcccgcatctttttttagttcttggcagatagtgtgtagtcggcttgaggagtacaacagccaccaatcactctgcaatggtacacctgagggccccctgcgcagaaacccaggcaatcacgacaaatccagaacaccacggttgccttcttctgccgatgtggaattttgtctgtccctcactcagtatgaatcgggaagcatggataaagcggccaacttttcttttagaaacaccttagagggcttcgctagcccactgacaggaatcgccgatgcatcccaatcatccatgcacaatgctttacatatttatatgaacggaacaatgtcgcaggtgcaggggtctgctaacgaccctattttcttgctacaccacgcgtttgtggattccatcttcgaacagtggttgagaagacacagaccactgcaggaggtctatcccgaagccaacgcgcctatagggcataacagggaatcatacatggtgccgttcattcctctttataggaacggggatttcttcataagtagtaaggatcttggttatgactacagctacctgcaggactctgatcctgattcgttccaggattacatcaaaagttacctggaacaagccagccgcatctggtcctggctgcttggcgccgcaatggttggggccgtccttactgccttgctggcaggacttgtcagcctgctctgtagacataagcgcaaacagctcccagaagagaagcagcccctcctgatggaaaaagaggattaccactcactctaccagagccacctgtag

SEQ ID NO: 2876 - DNA, 1365 bp, synthetic construct
  misc_feature 1..1365: note = source = /note="Description of Artificial Sequence: Synthetic coding sequence"
  source 1..1365: mol_type = other DNA
atggatccctacatgattcaaatgtctagcaagggcaacctccctagcattttggacgtacatgtgaatgtgggcggtagatctagcgtgccagggaagatgaaagggagaaaagcacgttggagcgtgcgaccgtcggacatggccaaaaagacgttcaacccaatccgagctatcgtggataatatgaaagttaaacccaatcccaacaagacaatgatatccctgtcaattggggatcccacggtgttcgggaacctgcccaccgatccagaagtgacacaagcgatgaaggatgccctggattcaggcaaatacaacggctacgcccctagcatcggcttcctgtcatctcgagaggagattgcctcctactaccactgcccagaggccccactcgaagccaaagatgtgattctcacctccggatgttctcaggccattgacttgtgcttagcagttctggctaacccggggcagaacattttggtgcccaggcctggattcagtctgtataagaccctggccgagtcaatggggatcgaagtaaaactgtacaatctcctgccggagaagtcctgggagattgacctcaaacagttagaatatctgatagacgaaaaaaccgcctgcctgatcgttaataaccccagcaatccatgtggatccgtgttctccaagcgtcacttgcaaaaaatcttggccgtggcggccaggcagtgtgtaccaatactggctgacgaaatttatggggacatggtattctcggattgcaaatatgaacctttagctaccctcagtaccgacgtgcccatcctgtcatgcggaggactggcgaagcgctggctcgttccaggatggcgcctgggctggattctgatccatgatcgcagggacatttttgggaacgagattagagacggtctggtgaagctgagccaacggatcctgggtccctgtaccatagtccagggcgccctgaagtctatactctgtagaaccccaggggagttctaccataatacactaagttttttgaaaagcaacgccgatctttgttatggtgccctagccgccattcccggcctgcgcccagtgagaccttctggcgcgatgtacctcatggtgggtatagagatggagcactttccagagttcgagaacgatgttgagtttacagagcgcctcgtcgcagaacagagtgtacactgcctccccgctacctgcttcgagtaccccaactttatccgagttgtcattactgtcccggaggtaatgatgcttgaggcttgcagcaggatacaggagttttgcgaacaacactaccattgcgccgaaggctcgcaggaggaatgtgataaatag

SEQ ID NO: 2877 - DNA, 1602 bp, synthetic construct
  misc_feature 1..1602: note = source = /note="Description of Artificial Sequence: Synthetic coding sequence"
  source 1..1602: mol_type = other DNA
atggctgttgagtcgcaaggtgggagacctctcgttctgggactccttctctgtgtgctcggtccagtggtgtcccatgcaggcaagatcctcctgataccagtggacggatcacattggctaagcatgcttggagcgatccagcagctccaacagcgcgggcatgagattgtagttttagctcctgacgctagcttgtatatccgcgatggggccttttacaccttaaagacttatcccgtgccgtttcagagggaggacgttaaggagagcttcgtgtccttaggccacaatgtcttcgagaatgacagtttcctccaacgcgttatcaagacatacaagaaaattaagaaggatagtgccatgctgctctcagggtgttcccatctgttacacaacaaggagcttatggcatccctggcagaaagctcattcgatgtgatgctcaccgatcccttcttaccctgctcaccaatagttgcccagtatctttcattacctacagtattttttctccacgcccttccatgttcactagaatttgaggctactcaatgcccgaaccccttctcctatgtcccccggccgctgtcatctcacagtgaccacatgaccttcttacagcgggtgaagaacatgcttattgcgtttagtcagaattttctctgcgacgtggtctactccccctatgccacgctggcaagcgaattcctccaaagggaagtgaccgtccaggatctgctgagtagcgctagtgtatggctgtttagatctgattttgtgaaggactacccccgtcccatcatgcccaacatggttttcgttggcggaatcaactgcctgcaccagaacccactgagccaggaatttgaagcatatatcaacgccagcggggaacacggcattgtggtgtttagtctaggcagcatggtttcagagattcccgagaaaaaggccatggcgatcgccgatgctctgggtaaaatccctcagaccgtcctctggagatacaccggcacacggcccagcaatctcgccaataacacaatccttgttaaatggcttccacaaaacgatctgctggggcatcctatgacacgcgcttttatcactcacgcgggctcccatggagtgtacgaaagcatctgtaatggagtgccaatggtgatgatgccgctctttggcgaccagatggacaatgcaaagcgcatggagaccaaaggggctggagttaccttaaacgtgctagagatgacttccgaggatctagagaatgcccttaaggcggtgatcaatgacaagtcatacaaggaaaatattatgaggctgagctccctgcacaaggaccgccctgtggagccactcgacctggccgtgttttgggtcgaattcgttatgaggcacaaaggggccccccaccttagacctgccgctcatgatctgacttggtaccagtaccatagtctggatgtgatagggttccttctggctgttgttctgacagtcgcgtttattacatttaagtgctgtgcctatggctatcggaagtgtttgggcaaaaaaggcagagttaaaaaagctcataagtctaagacgcattag

SEQ ID NO: 2878 - DNA, 1335 bp, synthetic construct
  misc_feature 1..1335: note = source = /note="Description of Artificial Sequence: Synthetic coding sequence"
  source 1..1335: mol_type = other DNA
atggccgtagagagccagggcggtaggcccctcgtgctggggcttctgctctgcgtgctggggccggttgtatcacacgccggcaagattttgctcatccctgttgacggtagccactggctctctatgctcggcgccatccagcaattgcagcaaagagggcacgagattgttgtcctagccccggatgccagcctgtacattcgagacggggccttttatacgctcaaaacctaccccgtaccgttccagcgcgaagatgtaaaggagagctttgttagtctggggcacaatgttttcgagaacgactcctttttgcagagggttattaagacttataaaaagattaagaaggactcagctatgctcctctcaggctgcagccacctgctgcacaacaaagaactgatggccagcctggctgaaagtagcttcgacgttatgcttaccgatccattcttgccttgttccccaattgtagcccagtacctgtccctccctaccgtgtttttcttgcacgctctcccttgctcgctagagttcgaggcaacccagtgtcctaaccctttcagctacgttccgagaccattgagctcacatagtgatcacatgacatttctgcaacgcgtcaagaacatgttgattgcctttagccagaattttctgtgtgacgtagtgtattccccttatgccaccctggccagcgagtttctccagcgggaagtcaccgtgcaggatcttctgagtagtgccagcgtctggctttttagaagcgatttcgtcaaggactaccccaggccaataatgcccaacatggtcttcgtgggcggaattaactgtctccatcagaaccccctgagccaggaatttgaagcctacatcaacgcaagcggagaacacggcattgtagtatttagcctcgggagtatggtgagcgagattcctgagaagaaggctatggccatcgccgatgccctgggcaagattccccagacagtgctctggagatacacaggcactcgtccgtcaaaccttgcaaataataccattctggtgaaatggctgccccagaatgatcttctaggtcatccgatgacaagggcattcatcactcacgctggatcccatggggtctacgaaagtatttgcaacggtgtgccaatggttatgatgcccctgttcggcgaccagatggacaatgcaaaaaggatggagactaagggagccggggtgacgctcaatgtattggagatgactagcgaagatctggagaacgctcttaaggccgtaataaacgataaaaggaagaagcagcagagcgggagacagatgtag

SEQ ID NO: 2879 - DNA, 1593 bp, synthetic construct
  misc_feature 1..1593: note = source = /note="Description of Artificial Sequence: Synthetic coding sequence"
  source 1..1593: mol_type = other DNA
atggcacgagccggttggacatcacccgtccctctgtgcgtgtgccttcttctcacctgcgggtttgccgaggccggaaagctgcttgtggtgccaatggatggatcccactggttcacaatgcagtcagtggttgagaaactgattctccggggtcatgaggtcgtggtggtgatgccggaagtgtcctggcaattggaacggtcactgaattgcaccgtgaagacttatagtacatcttatacccttgaggaccagaatagggagtttatggtgtttgcacatgcacagtggaaggcccaggcccagtccatcttctcgctgttgatgtcttcaagctcaggcttcctggacttgttcttttcccattgccgctccttgttcaatgacagaaaactggtggagtacttgaaagagagctccttcgacgctgtgtttttggatccatttgacacctgcggccttatcgtggccaagtatttcagcctcccttcagttgtctttacacgggggattttctgtcatcacctggaggaaggtgcccaatgtcccgcccccctgtcatacgtgcccaatgaccttctgggattctctgatgccatgaccttcaaggaacgtgtgtggaatcacattgtgcacctggaggaccacttattttgtcaatacctctttagaaacgctttggaaatagcatccgagatcttgcagactccagtcaccgcatatgacctgtattcccacacttctatatggctcctgagaacagatttcgttttggactacccaaaacctgtcatgccaaacatgatcttcattggaggcataaactgtcatcagggcaagcctctacctatggagtttgaggcatacatcaatgccagcggcgagcacggaattgtggtgtttagtttaggtagcatggtctccgaaattccagaaaagaaagctatggccatcgccgatgccctcggcaagatcccacagacagtgttgtggcggtatactggtaccagacctagcaacctggccaataatactattcttgtgaagtggttaccgcagaacgacctactggggcatccaatgactagagccttcatcactcacgccggtagtcatggcgtctacgaaagtatatgtaatggagtacccatggtgatgatgcccctgtttggggaccagatggacaatgccaagcgcatggagactaagggggctggcgtcacactgaatgttctggagatgacctccgaggacttggagaatgcactcaaggccgtaatcaatgacaaaagttacaaggaaaacatcatgagactgtcaagtctccataaggatcgaccggtagagcccctggacttagccgtgttctgggtagaatttgtgatgcgacataaaggggcaccacaccttagacccgcagcgcatgacctgacttggtaccaataccattccttagacgtgatcggttttttgctggcggtcgttctcaccgtcgcatttataacctttaaatgctgtgcttatggttaccgcaagtgcttgggaaagaagggccgagtaaaaaaggcacacaaatctaagacccattag

SEQ ID NO: 2880 - DNA, 1605 bp, synthetic construct
  misc_feature 1..1605: note = source = /note="Description of Artificial Sequence: Synthetic coding sequence"
  source 1..1605: mol_type = other DNA
atggccaccgggctgcaggtgccactgccatggctggcaactggtttactactgttgctttccgtgcagccttgggccgagtcgggaaaggtgctggtggtcccaatcgacggaagccactggctgtctatgagagaggtgcttagagagctccacgctcgaggccatcaggccgtggtgctgacccctgaagtgaatatgcatatcaaggaggaaaacttcttcacacttaccacctacgcaatctcctggacccaggatgagtttgatcggcacgtgctcggtcacacacagttgtatttcgaaaccgagcacttcctaaaaaaattcttccggtccatggcaatgctcaacaacatgagcctggtgtatcacaggtcgtgcgtcgaactgctccataacgaggctctcattagacatctgaacgctacatcctttgacgtggtcctcaccgatccagttaatctgtgtgccgcagtgctggctaaatacctgtctatcccaacggtttttttcttacgcaatatcccttgcgatttggacttcaagggtactcagtgccctaatccttccagttatataccccgtttgctcacgaccaatagcgaccacatgacgttcatgcagagagttaaaaacatgctgtacccacttgctcttagctatatatgccacgcctttagcgccccctatgcatcactcgccagcgaacttttccagcgtgaagtaagtgttgtggatattctgtcccacgcgtcagtctggttgtttcgaggggattttgtgatggactacccacggccaattatgcccaacatggtgtttattggcggtattaattgcgccaacaggaagcctctgtcacaagagttcgaggcttacattaatgcaagcggcgagcatggcatcgtcgtgttctcactgggcagtatggtcagcgaaatcccagaaaagaaggcgatggccatagcggatgctttaggcaaaataccccagacagtgctttggagatacaccggaactaggccttccaacctggccaacaataccatcctcgttaagtggctcccccagaacgatcttctgggccatccaatgacccgcgcatttattacacacgccgggagccacggagtgtatgagagcatctgtaacggggttccaatggtgatgatgcccctcttcggggatcagatggacaatgccaaaaggatggagacaaagggagccggcgttaccctaaatgtgctggagatgacttcagaggatcttgagaacgcacttaaggccgtgatcaatgataaatcatataaggaaaacatcatgcgcctgtcgtccttgcacaaagacagacccgtggaacctctggacctcgctgtattctgggtagaattcgtgatgcgtcacaagggcgcccctcacttaaggcctgccgcccatgatcttacctggtaccagtaccactctctcgacgtaatcggattcctgctggcggtcgtgctaaccgtggccttcatcaccttcaagtgttgcgcatatgggtaccggaagtgcctcggaaaaaagggtcgcgtcaagaaggctcacaaatctaagactcattag

SEQ ID NO: 2881 - DNA, 1470 bp, synthetic construct
  misc_feature 1..1470: note = source = /note="Description of Artificial Sequence: Synthetic coding sequence"
  source 1..1470: mol_type = other DNA
atggctgggcagagagtcctcctgctggtggggtttctcctccctggagtcctgctcagtgaggctgcaaaaattctgacaatctctaccgttgacttcaagaaagaagaaaagtcttaccaggtgattagctggttagctcctgaggatcaccagcgcgagtttaagaaaagtttcgacttcttcctggaggagacgctgggcggcaggggcaagtttgagaacctattaaatgtcctggaatacctggcactgcagtgtagtcacttcctgaataggaaggatataatggattcactgaaaaatgagaactttgacatggtgatagtcgagacttttgattactgcccgtttctgatcgcagaaaaactggggaagcccttcgtcgccattctgagcacaagcttcggatcgctcgaattcggactgcccatcccgctcagctatgttcccgtcttcaggtctttacttactgaccacatggatttttggggacgggtgaaaaactttctcatgttttttagcttctgcagacgacagcagcatatgcagtctaccttcgacaacactatcaaagagcattttacagaaggctcacgtcctgttttgagccatctgcttctgaaggcggagttatggttcatcaatagtgactttgctttcgattttgcacgccccctcttgcccaatactgtgtacgtgggaggcttgatggagaaaccaattaagccagtccctcaagacctcgagaattttatcgcaaagttcggagactccggctttgttctggtaaccctgggcagtatggtgaatacatgtcagaacccagagatcttcaaggagatgaacaatgcctttgctcatctgcctcagggggttatttggaagtgtcagtgtagccattggcctaaggacgtgcatctggccgccaatgtcaaaatcgtggattggcttcctcagtccgatctattggcccacccttctattcggctgttcgtgacccatggcggtcaaaactccatcatggaagctattcagcacggggtcccaatggtggggattcctctgtttggagatcagcctgaaaatatggtgcgtgtcgaggccaagaagttcggtgtgtctatccagttgaaaaaactgaaggcagagaccctcgcactcaaaatgaaacagattatggaggacaaaagatacaaatccgccgccgtcgcagcctcagtaattctgcggtcccacccactgtcccctacccagcgcctggtcgggtggatcgatcatgttctgcaaacgggtggcgccacgcatctgaagccatatgttttccagcagccttggcacgaacagtacctacttgatgtctttgttttccttctcggactgacgttagggaccctgtggttgtgtggcaaacttctgggcatggccgtgtggtggctgagaggcgccagaaaggttaaggaaacttag

SEQ ID NO: 2882 - DNA, 1572 bp, synthetic construct
  misc_feature 1..1572: note = source = /note="Description of Artificial Sequence: Synthetic coding sequence"
  source 1..1572: mol_type = other DNA
atggctggtcaaagggtactcctgctcgtggggttcctactgcccggtgtgctcctatccgaggccgcaaagattctcacaattagtactgtcggtggctcacactatctgctcatggacagggtttcccagattttacaggaccatggccacaacgtcactatgttaaatcacaagagggggcccttcatgcccgactttaaaaaagaggagaagtcttatcaggtgatctcttggctcgcccccgaggaccaccagcgcgaattcaagaagagttttgacttcttcctggaggagacactcggagggagaggcaaatttgagaatttgttaaacgtgctggaatacctggcccttcagtgcagccacttcctgaaccgcaaggacattatggatagtttaaaaaacgagaacttcgacatggtaatcgtggaaacttttgattattgtcctttcctgattgctgagaagctggggaagccgtttgttgctattttatccacatcattcggcagcctggagttcggactcccaattcctcttagctatgtcccagtctttcgatcactcctgacagaccatatggacttctgggggcgcgtcaagaatttcctgatgttctttagtttctgtagacgacagcagcatatgcagtctaccttcgataacacaataaaagagcacttcacagaaggctccagacccgtactctcacacctgctgcttaaggcagagctgtggttcattaactctgacttcgcttttgactttgctcgacccctccttccaaatactgtatacgtgggcgggctgatggagaagcctattaaaccagtccctcaggatcttgaaaactttattgctaaattcggggactccggctttgtgctggtcacactgggctcaatggtgaacacctgccagaacccagagatcttcaaggagatgaataatgccttcgctcatttaccccaaggagtaatctggaagtgccaatgctcacactggcccaaggatgttcacctggccgctaatgtgaaaatcgttgattggctgccacaaagtgacttactggcgcacccctctatccgcctctttgtgacacacggcggccagaatagcatcatggaggctatccagcacggggtccctatggtaggtatccccctttttggcgatcaaccagagaatatggttcgcgtggaggcgaaaaagttcggagtgtccattcagctcaagaaactgaaagctgaaacccttgcactaaaaatgaaacagattatggaggataagaggtacaaatccgctgcagtcgccgcctcggtcatactgagaagccaccccctcagccccactcaaaggctagtgggttggatcgatcatgtgctccagacggggggagcaacacacctgaaaccctacgtattccagcagccatggcatgagcagtatctgttggacgtgttcgtcttcctgcttggcctcacgctaggcacgctctggctctgcggcaaactgctgggcatggctgtgtggtggctgcggggcgctagaaaagtaaaagaaacgtag

SEQ ID NO: 2883 - DNA, 417 bp, synthetic construct
  misc_feature 1..417: note = source = /note="Description of Artificial Sequence: Synthetic coding sequence"
  source 1..417: mol_type = other DNA
atggccggccaaagagtactgttattggtgggctttctgttgcctggggttctgctctccgaggccgctaaaatccttaccatttccaccgtgggggggagtcattatctgttgatggaccgcgtctcccagatccttcaagaccatgggcataacgtcaccatgctgaaccataagcggggtcctttcatgccagatttcaagaaagaggagaagagctaccaggtgataagctggctggcccctgaggatcaccagagggaattcaagaaatctttcgacttctttctagaagagactctgggtggaagaggaaaattcgaaaatctgctgaacgtgttggaatacctcgctctccagtgttcacatttcttgaatcgcaaggacattatggatagcctgaagaatgaaaattag

SEQ ID NO: 2884 - DNA, 666 bp, synthetic construct
  misc_feature 1..666: note = source = /note="Description of Artificial Sequence: Synthetic coding sequence"
  source 1..666: mol_type = other DNA
atggtcaacacctgccaaaatccggagatatttaaggagatgaacaatgccttcgctcacctcccacagggagttatctggaagtgccagtgctcccactggcccaaagacgtccacttggcagccaacgtaaaaatcgtcgactggctcccccagtctgacttgctcgcccaccctagcatccggttattcgtgactcatgggggccagaacagcatcatggaggcaattcaacatggcgtgcccatggtcggcatccctcttttcggggaccagcccgagaacatggtgagagtggaagcgaagaaattcggggtgtctattcagctgaagaagctgaaggccgagacactcgcccttaaaatgaagcagatcatggaagacaagcggtataagagtgcagcagtggcagcgagcgtcattctgcggagccacccattgtcccccacgcagcgactcgtgggctggatcgaccacgtactccaaaccggcggtgccacgcatctcaagccatatgtgttccagcaaccatggcacgagcagtacttgctggatgtattcgttttcctcctgggtcttaccctgggaactctctggctctgcggcaaactactggggatggctgtatggtggttgcgcggcgcgcggaaggtgaaagaaacatag

SEQ ID NO: 2885 - DNA, 1086 bp, synthetic construct
  misc_feature 1..1086: note = source = /note="Description of Artificial Sequence: Synthetic coding sequence"
  source 1..1086: mol_type = other DNA
atggccatgaactacaacgcaaaagatgaagtggacggtggacccccttgtgctccaggcgggacagctaagactcggagacccgacaacactgcttttaaacagcagcggctgcccgcctggcagcctatactcaccgcgggcacagtgttaccaatcttctttattattggcctgatctttatacctatcggcatcggtatcttcgtaactagtaataacatacgagagatcgagatagattacacaggaaccgagcctagcagcccctgcaacaaatgtctgtccccagacgtgacaccctgtttctgcacgattaactttacactagagaagtctttcgaaggcaacgtatttatgtactacggattatctaatttttaccaaaaccatagacgttatgtgaagtcaagagatgatagccagctgaatggcgattcaagcgcactgctgaacccctcaaaggaatgcgaaccatatcggcgcaatgaagacaagcccatcgctccgtgcggggccattgctaattccatgttcaacgatacactagagctgtttctcattgggaacgactcttatccaataccaattgctcttaaaaaaaaaggaattgcctggtggacagataaaaacgtcaaatttaggaaccctccagggggtgataaccttgaagaaagattcaaagggactactaagcccgtcaactggttaaaacccgtctatatgctggactcggacccagataacaatggcttcatcaacgaagatttcattgtgtggatgcggacagcagctttacccacttttcgcaaactatatcgcctgattgagaggaaaagcgacctccatcctacactgcccgccggcagatactcactgaacgtcacatataattacccagtgcattattttgatggaagaaagcggatgatcctgtccaccatcagctggatgggcggcaagaacccattcctaggaatcgcctacattgcagttgggagtataagttttttactcggtgtggtgctacttgtcatcaatcataagtacaggaacagttccaataccgctgacatcacaatttag

SEQ ID NO: 2886 - DNA, 954 bp, synthetic construct
  misc_feature 1..954: note = source = /note="Description of Artificial Sequence: Synthetic coding sequence"
  source 1..954: mol_type = other DNA
ctgaccgacaggcagactgacactgcaccatccccatcgtaccacttgctcccagggaggcggcggacagtcgatgccgccgctagcagaggccaaggacctgaacccgcccctgggggcggggttgaaggagtgggggcccggggagtggccctgaaactgttcgtccagctgctcgggtgcagcagattcggaggggccgtggtcagagccggggaggccgaaccctctggagccgcacggagtgccagctcagggcgcgaagaaccacagcctgaggagggagaggaggaagaggaaaaggaagaggaaaggggcccacagtggagactgggggcccgaaagcctgggtcttggaccggagaggctgctgtctgtgctgattccgcacctgcggctcgcgcacctcaggctctcgctcgagcaagcggtcggggaggcagagtagcacggcgcggtgccgaggagtctgggccgccccactccccctcccggaggggttccgcttcacgcgctggccctggccgcgcctctgagactatgaactttctcctgagctgggtgcattggagcctggccctactcctgtacctccaccacgcaaaatggtcccaggccgcccctatggctgagggaggggggcaaaatcaccacgaagttgtgaaatttatggacgtgtaccagagatcatattgccatccaatagagacactcgtcgatatctttcaggagtatccagacgaaatcgaatacatctttaagccctcatgtgtcccgcttatgcgctgtgggggttgctgtaacgatgaaggcctagagtgtgtccccacggaagaaagcaatatcaccatgcaaataatgagaattaagcctcaccaggggcagcacattggggaaatgagctttctgcagcataataagtgcgaatgtcgctgcgacaagcctcggcgctag

SEQ ID NO: 2887 - DNA, 1239 bp, synthetic construct
  misc_feature 1..1239: note = source = /note="Description of Artificial Sequence: Synthetic coding sequence"
  source 1..1239: mol_type = other DNA
ctcaccgatagacaaaccgataccgccccaagcccctcataccacctacttcctggcaggcggcggaccgtggacgctgccgcctccagaggacagggaccggagcccgctcctggaggtggtgttgagggggtgggggctcgaggtgtcgccctgaagctatttgtccagctgctcggctgcagccgatttggcggggccgtggttagggccggagaggcggagccgtctggagctgccaggagtgcctcaagtggaagggaggaaccccagcccgaggaaggtgaggaggaggaggagaaggaggaggaacgcggcccccagtggcgtcttggagcacgcaagcctggctcttggacaggcgaggctgccgtgtgtgccgattcagcacctgctgcccgggctccgcaggctcttgcccgggcatctgggaggggtgggcgggtagcacgtagaggggcagaggaatccgggccaccccactcaccatctaggcgtggatccgcctctcgagccggccccgggcgcgctagtgaaacaatgaacttccttctaagctgggtgcactggagcttggccctcttgttatacctgcatcatgccaagtggagtcaggccgcgccaatggccgagggaggtggacagaatcaccatgaggtcgtcaagtttatggatgtctaccaaagatcctactgccacccaattgagacattagtcgacatcttccaggaataccctgatgagatcgagtacatcttcaagcccagttgtgtccctctgatgcgatgtggggggtgctgcaatgatgaaggactggagtgcgtgcccacagaggagtcaaatattaccatgcagatcatgcgcataaagccccaccaggggcagcatattggcgagatgtctttcctgcaacataacaagtgcgagtgtagaccgaaaaaagatcgggccagacaagaaaagaaaagcgtccgcggcaagggcaaaggacagaagcgtaagcggaagaagagcagatacaagtcctggtctgtctacgtgggcgcgaggtgctgtctgatgccctggagccttccaggccctcatccatgcggtccttgcagcgaaaggcgtaaacacctctttgtgcaggatcctcagacttgcaagtgctcttgcaagaatactgatagtcgctgcaaggcccgacagctcgagctgaatgaaaggacatgtcggtgtgacaaacccagacggtag

SEQ ID NO: 2888 - DNA, 984 bp, synthetic construct
  misc_feature 1..984: note = source = /note="Description of Artificial Sequence: Synthetic coding sequence"
  source 1..984: mol_type = other DNA
ctcactgatcgccaaacagataccgctcctagtccgtcataccacttgcttccaggacggcggaggaccgtggacgctgctgcctcacgaggacagggccccgagcctgctcctgggggaggcgtggaaggagtgggtgccagaggagtcgcactgaagctttttgtgcagctcctcggatgcagcagatttgggggggcagtggtgagggccggtgaggctgagccttccggggccgcaaggagcgcctcgtctggccgagaggagcctcagcccgaagaaggggaggaagaggaggaaaaagaagaagagcggggccctcaatggcgcctcggcgcccgaaagcctggaagttggaccggggaggctgctgtgtgtgctgactctgcgcctgctgcaagagccccacaggctctggccagagctagtggcaggggcggtcgcgttgcccggaggggagcagaggaatcaggcccccctcattcacctagtagaaggggctccgcatcccgcgctggtccggggcgcgcctccgagactatgaatttcctgctttcctgggtgcactggagcctcgctctactgctgtaccttcaccatgccaagtggagccaggcagccccaatggcagaagggggtggccagaaccaccacgaggtagttaagttcatggacgtctatcagcggagctactgccacccaatcgaaaccttggtggatattttccaggagtatcctgacgagatagaatacatctttaaaccctcatgtgtcccgctcatgcgctgtggaggctgttgtaatgacgagggccttgagtgcgttcccactgaagaatctaatataaccatgcagatcatgagaattaaaccccaccaaggccagcacattggggagatgagcttcttacagcataacaaatgcgaatgtaggcccaaaaaggaccgtgctcggcaggagaaatgtgacaagccacggcggtag

SEQ ID NO: 2889 - DNA, 1116 bp, synthetic construct
  misc_feature 1..1116: note = source = /note="Description of Artificial Sequence: Synthetic coding sequence"
  source 1..1116: mol_type = other DNA
cttaccgacaggcagacggacactgcacctagcccgtcgtaccacctactccccgggagacgacgaactgtggacgctgcagccagtcgggggcaagggccggaacccgcgccagggggcggtgtggagggggtcggggcccgcggtgttgccctgaaattattcgttcaattgcttggttgttctcgattcggcggagcggtggtcagagcgggcgaagccgaaccttcaggcgctgcaaggagcgcaagttccggaagagaggagcctcagccggaggagggagaagaggaagaagagaaggaagaggaacgaggcccacaatggcgcctgggagcaaggaagcccggctcatggaccggagaagcagctgtgtgcgctgacagcgctcccgccgccagggccccacaggccctggcacgtgcatctgggagaggtggccgtgtagcccggagaggagcagaggagtcgggccctccccatagtccttctaggcgcggaagtgcttctcgcgcaggccctggaagggccagcgagaccatgaactttttgttaagctgggtgcactggtccctggccctcttactgtacctacaccacgctaagtggagccaggccgcaccaatggccgaaggggggggacagaatcaccacgaggtggtcaagttcatggacgtgtatcagaggtcctattgtcatccgatcgaaacgctggtggatatatttcaggaataccccgatgaaattgaatacatatttaaaccctcttgtgtgcctctcatgcggtgcggcggatgctgtaacgacgaagggctagagtgtgtacccacagaagagagcaacatcacaatgcagattatgaggattaaaccacaccaaggacagcatattggtgaaatgtcctttctacagcacaataagtgtgaatgtcgcccaaagaaagatagggcaagacaggaaaatccctgcggtccttgctccgagagacgcaaacacctctttgttcaggatcctcaaacatgtaaatgttcatgcaagaacacagacagccgctgcaaagcacgccagctggagctcaacgaaagaacatgtcgctgtgacaagcctcgaaggtag

SEQ ID NO: 2890 - DNA, 444 bp, synthetic construct
  misc_feature 1..444: note = source = /note="Description of Artificial Sequence: Synthetic coding sequence"
  source 1..444: mol_type = other DNA
atgaacttcctgctgtcatgggttcactggagtttggcacttctcctgtatctgcaccatgccaagtggagtcaggccgcccccatggctgagggaggtggacagaaccaccatgaggtcgtgaagttcatggacgtgtatcagcgttcttactgccaccctatagaaaccttggttgatatcttccaggaatacccggatgaaatagagtatatctttaaaccctcctgtgtgcccctgatgaggtgtgggggctgctgcaacgacgagggactggagtgcgttccaacagaggaatccaacataacaatgcagatcatgcgaattaaaccacaccagggccagcacatcggagagatgtccttcctgcagcataataagtgtgaatgcaggccgaagaaggatcgggctcggcaagagaagtgcgacaaaccacgtaggtag

SEQ ID NO: 2891 - DNA, 1170 bp, synthetic construct
  misc_feature 1..1170: note = source = /note="Description of Artificial Sequence: Synthetic coding sequence"
  source 1..1170: mol_type = other DNA
ttgacagaccggcagaccgacaccgccccatctcctagttatcatctgctgcccggaagaagaaggaccgtcgacgcagccgcgagtagaggacaggggcccgagccggcccccggcggcggtgtggagggggtaggcgcccgaggtgttgcgcttaagcttttcgtgcagctcctgggctgttctcgatttggcggggccgttgtgagagccggcgaggctgaaccatcaggagcagctaggtcagccagcagcgggcgagaagagcctcagcctgaggaaggggaagaggaagaggaaaaagaggaagagcgggggccccagtggcgcctgggggcccgcaagccgggtagctggaccggtgaggctgccgtgtgtgccgattcagcacctgccgcccgggcgccgcaggctctcgcccgagcaagcggccgggggggccgcgtggcccggcgtggtgccgaggagtccgggcctccacatagtccttcaagacgcggttcggccagcagggccgggcctgggagggcgagcgagaccatgaactttctgctgagctgggtgcactggtccctggctctgttgttgtacctgcatcatgccaagtggagtcaggcagcccccatggctgaaggcggcggccagaatcatcatgaggtagtgaaatttatggacgtgtatcagcggtcatattgccatccaatagagacactggtggatatcttccaggaatacccggatgaaattgagtatatattcaaaccctcctgcgtgcctctgatgaggtgcgggggctgttgtaatgatgaagggttagaatgtgtacccactgaagaaagtaacatcacgatgcaaattatgcgcataaagcctcaccagggacagcatatcggtgagatgagttttctgcaacacaacaaatgcgagtgcagacctaagaaagatcgggctcgccaagaaaaaaaatcagtgcgtggtaagggcaaaggacagaagcgaaagagaaagaaatcaagaccatgcgggccatgctctgagcgacggaagcatttgttcgttcaagatcctcaaacgtgtaagtgtagttgtaaaaacactgattcccggtgtaaagcccggcagttggaactgaatgagcggacctgtcgctgtgataaaccccggagatag

SEQ ID NO: 2892 - DNA, 1065 bp, synthetic construct
  misc_feature 1..1065: note = source = /note="Description of Artificial Sequence: Synthetic coding sequence"
  source 1..1065: mol_type = other DNA
ctaacagacagacagactgacacagcgccttcaccaagctatcacctcctgcctggacggcggaggactgtggacgctgctgccagtcgtggccaggggcccgagcccgcccccggcggaggcgtcgaaggcgtgggggccaggggagtggcgcttaagttattcgtccagctgctgggttgctccagattcggcggggccgtcgtccgagccggagaggctgagccaagcggtgctgcacgctcagcatcttccggccgagaagagccgcaacccgaagagggagaggaggaagaagaaaaggaggaggaacggggaccccagtggaggctcggcgctcggaaacctggctcctggactggagaggccgccgtctgcgcagacagtgcgcctgctgctcgggcgccccaggccctcgcacgggcttctggccgcggcggaagggtggctcgcaggggcgccgaggaatcaggtccaccccatagtccctcaaggaggggctcagcttcccgcgccggccctggcagggcaagtgagactatgaatttcctgcttagttgggtgcattggagcctggccttgcttttgtatcttcaccacgctaagtggtcccaggcggctcctatggccgagggcggggggcagaatcatcacgaggtagttaagttcatggatgtctatcaacgatcctactgccacccaatagagaccttggtggacattttccaggaatatcccgacgaaatcgagtacatctttaaacctagttgtgtccccctgatgcggtgcggcgggtgctgtaatgatgagggtctcgaatgcgtgccaaccgaagaatccaatataaccatgcagattatgaggatcaagccgcatcagggacagcacattggagagatgtccttcctccagcataacaagtgcgaatgtaggcctaagaaggaccgagcaaggcaagaaaatccatgtggaccttgctctgagaggcgcaaacacctgtttgtgcaggaccctcagacatgtaagtgtagttgtaagaacacagacagtcgttgcaagatgtag

SEQ ID NO: 2893 - DNA, 1188 bp, synthetic construct
  misc_feature 1..1188: note = source = /note="Description of Artificial Sequence: Synthetic coding sequence"
  source 1..1188: mol_type = other DNA
ttgaccgataggcaaaccgacactgcccctagtccatcctaccacctcctcccaggccgacgtcggactgtggacgctgccgcatctcggggacagggacctgagccggcaccgggtgggggagttgagggagtcggagctagaggggttgcattgaaactgttcgtacaactcctgggatgctccaggttcgggggcgctgtggtgagagctggagaggctgagccatccggggccgccaggtccgcgtcctctgggcgggaagagccacagcccgaagaaggcgaggaagaggaggagaaagaagaagagcgaggcccacaatggcgtctgggcgcccgaaagcctggaagttggacgggcgaagccgcagtgtgtgcagatagcgctcctgcagccagggcccctcaagccctggctcgggctagcgggaggggggggcgcgtcgcccggcggggagctgaggaatccggaccgccacactccccatctcgccgaggcagtgcctctcgtgctggcccaggcagagcgtcggaaaccatgaatttcttgctcagttgggtgcactggagtttggcattgctgctgtatcttcatcacgctaagtggagccaggcagcacccatggccgaaggcggaggacagaaccaccatgaggttgtgaaatttatggatgtgtaccagaggtcatactgtcacccaatcgaaacccttgtggacatctttcaagaatacccggatgagatcgaatacatctttaaaccctcttgtgttcctttgatgcgctgtggagggtgctgcaacgacgagggacttgaatgcgtcccaaccgaggagtctaatatcactatgcagataatgcggatcaagccgcaccagggtcaacatattggggagatgtctttcctccagcacaacaaatgtgaatgccgtccaaagaaggaccgcgcccggcaggaaaagaagtccgtgcggggcaagggaaaaggacagaaacggaagaggaaaaaatcacgatacaaatcttggagcgtgccgtgcggcccatgtagcgaaagaagaaagcaccttttcgtacaggatccacagacttgcaagtgctcctgcaaaaatactgattcccggtgcaaggccaggcagctggaattgaatgaacgcacctgcagatgcgataagcctcggcgatag

SEQ ID NO: 2894 - DNA, 414 bp, synthetic construct
  misc_feature 1..414: note = source = /note="Description of Artificial Sequence: Synthetic coding sequence"
  source 1..414: mol_type = other DNA
atgaacttcttactaagttgggttcattggtctctcgccctgttgctctacctgcaccatgccaaatggtcccaggccgccccaatggcagaggggggggggcaaaatcatcatgaggtggttaagtttatggacgtttaccaaaggtcttactgccaccctatcgaaactctagtggatattttccaagagtatccagatgagatagaatatatcttcaagccatcatgcgtgcccctgatgcggtgcggtggatgctgtaacgacgaaggcctggagtgtgtccccactgaggagtccaatataaccatgcagatcatgcgcataaagccgcaccaggggcagcatatcggcgaaatgagttttctacagcataataagtgcgagtgtaggtgtgacaagccaaggaggtag

SEQ ID NO: 2895 - DNA, 1116 bp, synthetic construct
  misc_feature 1..1116: note = source = /note="Description of Artificial Sequence: Synthetic coding sequence"
  source 1..1116: mol_type = other DNA
ctcactgaccgccagacagatacagcaccatcacctagttatcatctgctccccggacggcggcgaaccgtggacgccgccgcaagtagaggtcagggacccgagcccgcacctggcggcggcgttgaaggagtgggagcaagaggcgtcgctctcaaactatttgttcagctactgggatgctcacggtttggcggagcggtggtaagggccggcgaggccgagccgtccggcgccgcgcggagtgcttcctccggacgggaagagccacagcccgaagagggcgaggaggaggaagagaaggaggaggagagaggcccccaatggcgactgggcgcacgcaaacccggatcctggaccggagaggccgctgtgtgcgccgattccgcaccagctgctcgcgctccacaagcacttgcacgtgcatccggccggggcggccgcgtggctcggaggggcgccgaggagtccggcccgccccactcaccaagcagacgggggtctgctagtagagccggccctggccgagctagtgagaccatgaatttcctgctttcgtgggtgcattggagtctcgcactcttgctctacctgcaccacgccaagtggtcccaggcagccccgatggccgaaggagggggtcagaatcatcacgaggtggtaaagtttatggatgtctaccaaaggagctattgtcaccccatcgagactctggtggatatattccaggaatacccggatgaaatcgaatacatatttaagccaagctgtgtgccattgatgcgctgcggcggatgttgtaacgacgaaggtttggagtgtgtgcccaccgaggaatctaatattacgatgcagataatgcgtattaaaccgcatcagggccaacatatcggtgaaatgtcctttctacagcataataaatgtgagtgccggcccaaaaaggatcgcgcccggcaggagaacccctgcggaccatgctcagaacggcgcaaacatttgttcgtccaggaccctcagacctgtaagtgtagctgcaagaacaccgacagccgctgcaaagctagacaattggagctgaatgagcgtacttgcaggagcttgactagaaaagactag

SEQ ID NO: 2896 - DNA, 630 bp, synthetic construct
  misc_feature 1..630: note = source = /note="Description of Artificial Sequence: Synthetic coding sequence"
  source 1..630: mol_type = other DNA
atgaatttcctgttgagttgggtccactggtcactggctcttttgctttatctgcaccatgccaaatggagccaagccgcccctatggctgagggcggcggtcagaatcaccacgaggtagtcaaatttatggatgtctatcagcggtcctattgtcaccctattgagacgttagtggacatttttcaagagtatccagatgagattgagtacatcttcaagccatcgtgtgtgcctctgatgcgttgtggagggtgttgcaacgatgaaggtctggaatgcgtaccgactgaagaatcaaatattacgatgcagataatgagaattaagcctcatcagggccagcacatcggtgagatgtcgttcttgcagcacaataagtgcgagtgtaggcctaaaaaagatcgagccaggcaggagaaaaaatccgtgaggggcaaagggaagggtcagaaacgaaagcgcaagaagagcagaccttgcggcccgtgctccgagagaaggaagcacctttttgtacaagaccctcagacctgtaagtgtagctgcaaaaacacagattcacggtgcaaggcacgtcaacttgagctcaacgaaaggacatgtagatgcgataagcctagacgatag

SEQ ID NO: 2897 - DNA, 576 bp, synthetic construct
  misc_feature 1..576: note = source = /note="Description of Artificial Sequence: Synthetic coding sequence"
  source 1..576: mol_type = other DNA
atgaactttcttctgagttgggtacattggtccctggccctgctgctttacttacatcatgccaaatggtctcaggcggcccctatggctgagggggggggccagaaccaccatgaggtggtcaaatttatggatgtgtaccagcggagctactgtcaccctattgagacactggtggacatttttcaagagtatcccgacgagatcgaatatatcttcaaacctagttgtgtcccacttatgcggtgtggaggatgctgcaatgacgagggcctagagtgtgttcccacagaggagtcaaacattacgatgcaaattatgcggataaagccccaccaggggcaacatatcggcgaaatgtcatttctgcagcacaataaatgtgagtgcagacctaaaaaggatagggcacggcaggagaatccatgtggtccttgttcagagaggaggaagcacctttttgttcaagacccccaaacatgtaaatgcagctgtaaaaacaccgattcacggtgtaaagctaggcagttagaattgaacgagcgcacatgccggagtttaacaaggaaagattag

SEQ ID NO: 2898 - DNA, 972 bp, synthetic construct
  misc_feature 1..972: note = source = /note="Description of Artificial Sequence: Synthetic coding sequence"
  source 1..972: mol_type = other DNA
tgacggggccagggccctgagcccgcaccaggagggggtgtggaaggggttggagcaagaggcgtcgctttaaagctctttgtccagctactaggttgttcacgtttcgggggcgcggtggtccgagccggtgaggctgagccatctggtgccgccagatcagcatcttcaggacgggaagagccccagccagaagagggggaggaggaggaagagaaggaggaagagagggggccccagtggagactgggagcccgtaagcccggtagttggaccggggaagcagccgtatgtgcggactctgcccctgctgcacgcgcaccccaggccttagcaagagcttccggccggggcgggcgagtggcacgacgcggcgcagaagagtccggccctccgcattcccctagccggagagggagcgccagcagagccgggcccggccgggcatccgagaccatgaactttctcctatcatgggtccattggtcacttgccctccttctttacctgcatcacgctaagtggagccaggcggccccaatggccgagggcggtggccagaaccatcacgaggtggttaaattcatggatgtataccaacgatcctactgccaccccatcgagaccttggtcgatatctttcaggaatatcccgacgagatcgaatacatatttaaaccgtcttgcgttccgttgatgaggtgtggcggatgctgtaatgatgaagggctggagtgtgtaccaaccgaggagtctaatatcaccatgcagataatgagaatcaaaccgcatcagggacagcatatcggcgaaatgtccttcttgcagcacaacaaatgtgaatgtcgtccaaaaaaggatcgcgctagacaagagaagaagtcagtacgggggaagggaaagggccaaaaacgcaagcgtaagaagagccggtataaatcatggtcagtatgcgataagcctaggcgctag

SEQ ID NO: 2899 - DNA, 648 bp, synthetic construct
  misc_feature 1..648: note = source = /note="Description of Artificial Sequence: Synthetic coding sequence"
  source 1..648: mol_type = other DNA
atgaactttctgcttagctgggtgcactggtcccttgctcttttgttataccttcaccacgcaaaatggtctcaagccgctcccatggccgaaggcggcggacaaaaccaccatgaggtagtaaaattcatggacgtgtatcagcggagttattgtcatccaatcgaaactctagttgacatatttcaagagtatcctgacgaaattgagtacatctttaaaccttcttgcgtgcccctgatgcggtgcggcggctgttgtaatgacgagggacttgagtgcgtgcccactgaagagtcgaacataacaatgcaaattatgaggatcaagccacaccaaggacaacacattggtgagatgtcgtttcttcagcacaataagtgcgaatgtcgcccaaaaaaggatagggcaaggcaggagaagaagtccgtgcgcggtaaagggaaaggccagaagagaaagagaaagaagagccgctataaatcttggagcgtgccatgtgggccctgttctgagagacgcaaacacttgtttgtacaggaccctcagacctgtaaatgtagctgcaagaacacagactctagatgtaaagcccgacagcttgaattaaatgagcgcacctgccgatgcgacaagcccaggaggtag

SEQ ID NO: 2900 - DNA, 525 bp, synthetic construct
  misc_feature 1..525: note = source = /note="Description of Artificial Sequence: Synthetic coding sequence"
  source 1..525: mol_type = other DNA
atgaattttctcctcagctgggttcactggagcttggcgctcctgttgtacttgcaccatgctaagtggagccaggcagcgcccatggccgaaggtggcggacagaaccatcatgaggtcgtcaagtttatggatgtgtaccagcgtagctactgccatcccattgagacacttgtggacatttttcaagagtaccccgatgaaattgaatatatcttcaaaccgtcctgcgtgccattaatgaggtgtggtggctgctgcaacgatgagggcttagagtgcgtgcccaccgaggagtcaaacatcaccatgcagatcatgaggataaagcctcaccagggccagcacatcggcgagatgagcttcctgcagcacaataagtgtgaatgtcgcccaaagaaggaccgcgcccgccaggagaatccgtgcggcccttgcagtgaacgtcgcaagcacttattcgttcaagatcctcagacatgtaaatgtagttgtaaaaataccgattctaggtgcaaaatgtag

SEQ ID NO: 2901 - DNA, 699 bp, synthetic construct
  misc_feature 1..699: note = source = /note="Description of Artificial Sequence: Synthetic coding sequence"
  source 1..699: mol_type = other DNA
atgaactttctgctaagctgggtccattggagtttagctctgctactgtacctgcaccacgccaaatggagtcaggctgcccccatggcagagggtggaggccagaatcatcacgaggtggttaagttcatggacgtataccaaagatcctattgccacccaatcgagacacttgtggacatttttcaggaataccctgatgagatcgaatatatctttaaaccttcctgcgttcccttgatgcgctgcggcggttgttgcaacgatgagggactggagtgcgtcccaaccgaggaatctaacatcacaatgcaaatcatgagaataaaacctcatcagggtcaacatattggcgagatgagctttctccagcacaacaaatgcgaatgtagacctaagaaggaccgggcccggcaggagaaaaaaagcgtgagaggcaaaggcaaggggcagaagcggaagcggaagaaaagccgatataaatcatggtctgtgtacgttggagctcgttgttgtttgatgccttggagccttcccgggccacacccttgtggtccatgtagtgaacggagaaaacacttgtttgtgcaagatcctcaaacctgcaagtgctcctgcaaaaacacggattcaaggtgcaaggctcgtcagttggaactaaacgaaaggacctgccgttgtgataagccacgccgatag

SEQ ID NO: 2902 - DNA, 576 bp, synthetic construct
  misc_feature 1..576: note = source = /note="Description of Artificial Sequence: Synthetic coding sequence"
  source 1..576: mol_type = other DNA
atgaactttcttttatcttgggtccactggagtttagccctgctcctatatctccaccatgcaaagtggtcgcaggctgcaccgatggccgagggaggcggtcagaaccatcacgaggtggttaagttcatggatgtataccagagatcatattgccacccaatcgaaactctggttgacatctttcaggagtaccctgatgaaattgagtacatcttcaaaccttcctgcgtccctctgatgcgctgtgggggctgctgtaacgacgaaggattggaatgcgtcccgaccgaggagtcaaacatcaccatgcagatcatgcggataaaaccccaccaggggcagcacatcggggagatgagttttttacagcacaacaagtgtgagtgtcggcccaaaaaggatagggcaaggcaggagaacccctgtggcccttgctctgaacggcggaagcacctgtttgttcaggacccccagacctgcaagtgcagctgtaaaaatacggactccagatgtaaggcaagacagctcgaattaaatgaaaggacctgccggtgtgataagcctcggagatag

SEQ ID NO: 2903 - DNA, 1263 bp, synthetic construct
  misc_feature 1..1263: note = source = /note="Description of Artificial Sequence: Synthetic coding sequence"
  source 1..1263: mol_type = other DNA
atgcatttgctggggtttttcagcgtcgcctgttctctgttggctgcagctctgttacccggcccccgggaagcccctgccgcagccgccgccttcgagtccgggctcgatctgtccgacgccgagcccgacgccggggaagccacagcatatgctagtaaggatcttgaggagcagcttcgtagtgtatcttcagttgatgagctgatgaccgttctttatcccgagtactggaaaatgtataagtgccaactgcgcaagggcggctggcagcacaatcgggaacaggctaatctcaatagtcgaacggaggagaccattaagttcgcggcagcccactataacactgaaattctgaaaagcatcgataacgagtggaggaagacacagtgtatgccacgggaggtttgtattgacgttgggaaggaatttggcgtcgctactaacactttcttcaagccaccctgtgtgagcgtctacagatgtggcggctgctgcaactccgaagggcttcagtgcatgaacacctctactagctatctgtcaaagacgctcttcgagatcactgtgcccctttcacagggaccaaagcccgtgaccataagctttgccaaccacaccagttgcagatgcatgtcaaagttggacgtctatagacaggtgcattccatcatccgcagatctcttcctgctacactgccccagtgccaagcagcaaacaagacgtgtcctaccaattacatgtggaataatcacatatgtcgctgcctcgcacaggaggactttatgttttccagtgatgcaggggacgactccaccgacggattccatgacatatgcggaccaaataaggagctggacgaggaaacttgtcagtgcgtgtgccgtgccgggctcaggcctgcttcttgcggaccccataaagagctggatcgaaattcttgtcaatgtgtatgtaagaataagctgttcccttcacagtgtggagccaaccgtgaattcgacgaaaacacatgccagtgcgtgtgcaagcgcacatgcccacgaaaccagccactaaatcctggtaagtgcgcatgtgagtgtactgagtctccccagaaatgtttgttgaaaggtaagaagttccaccaccagacctgttcttgctaccggagaccgtgcaccaaccgacaaaaagcatgcgagcccgggttttcctattccgaggaggtatgtcgatgcgtccctagctactggaaaaggcctcagatgatgagctag

SEQ ID NO: 2904 - DNA, 510 bp, synthetic construct
  misc_feature 1..510: note = source = /note="Description of Artificial Sequence: Synthetic coding sequence"
  source 1..510: mol_type = other DNA
atggacacacggaacaaggcgcagctcctcgtgttgttgacacttctctctgtacttttctcccagacgtccgcctggcccctgtaccgcgctccaagcgcactccggctgggtgacaggattccttttgaaggcgccaacgaaccggatcaggtctctctgaaagaagacattgacatgctccagaacgcgttggctgaaaatgacacaccttactacgacgtttctcgcaacgcccgccacgcagacggcgtctttacatctgactttagcaagctgctcggccagctttctgcaaagaagtatctcgagagcctcatgggcaaacgcgtctccaacatatccgaggatccagtccctgtgaaaagacattcagacgcggttttcacggataattataccagactgcgcaagcagatggccgttaagaaatacctgaatagcatactcaacggaaagcggtcatccgaaggcgagtctcctgacttccccgaggagttggagaagtag

SEQ ID NO: 2905 - DNA, 513 bp, synthetic construct
  misc_feature 1..513: note = source = /note="Description of Artificial Sequence: Synthetic coding sequence"
  source 1..513: mol_type = other DNA
atggatacccgtaacaaggctcagctgctggtcctcctgactctgctgagcgtattattctctcagacttcagcttggccattatacagggccccgtctgctctgcggctgggcgacaggattccattcgagggcgctaacgaaccagaccaggtgtccctgaaggaagacatcgacatgcttcagaatgcactcgctgagaatgacactccctattatgatgtttctaggaatgccagacatgccgatggtgtgtttacttctgatttttctaagttgctgggccagttgtcagctaagaagtatctggagtctttgatgggcaaacgcgtaagcagcaatatctctgaggatccagtccctgtgaaacgtcatagtgacgcagtattcaccgacaactacacaagactcaggaaacaaatggctgtgaaaaaatacctgaattccatcctcaatggtaaacgctcttctgagggagaatcaccggatttcccggaggagcttgagaagtag

SEQ ID NO: 2906 - DNA, 360 bp, synthetic construct
  misc_feature 1..360: note = source = /note="Description of Artificial Sequence: Synthetic coding sequence"
  source 1..360: mol_type = other DNA
taagtgtccctgaaggaggacatagatatgctgcaaaacgctctcgctgagaacgatactccttattacgacgtgtctcgaaatgccaggcatgctgacggtgtcttcacgtcagatttttcaaagctcctgggccagctgtcagcaaagaaatacctcgaatccctgatgggcaagcgggtttcttcgaatatttctgaggatcctgtgccggtgaaacgtcactctgacgccgtgtttacggataactatacccgtctccggaaacagatggcagtcaagaaatacctgaactccatccttaatggtaagaggtccgaaggcgagagccctgattttcctgaagaactggaaaaatag

SEQ ID NO: 2907 - DNA, 774 bp, synthetic construct
  misc_feature 1..774: note = source = /note="Description of Artificial Sequence: Synthetic coding sequence"
  source 1..774: mol_type = other DNA
atgcctctgaacgtttcttttaccaaccgaaactacgacctggactatgacagtgtgcaaccttatttctattgcgacgaagaagaaaatttctaccagcagcaacagcagagtgagttgcagccgccagctcctagcgaagacatctggaagaagttcgagctgctccccacgcctcccctttcgcccagcaggaggtctggcctctgcagtcccagctatgtggctgtcaccccattcagtctgaggggcgacaatgatggaggcggcggctcatttagtactgccgaccagttggagatggtcactgaactattagggggagacatggttaatcagtcctttatctgtgatcccgatgacgagactttcataaaaaacattataatccaggattgcatgtggtccggattttctgccgccgctaagctggtgagtgaaaaactagcatcatatcaagccgctcgcaaggacagtggctcgcctaatcccgcacgcgggcacagcgtatgctctacttcttcgctgtatctgcaggatttgagcgcggccgccagtgaatgtatcgacccctcagtggtgttcccttatcctctgaatgatagcagttcccccaagagctgcgcaagtcaagactctagcgcattttcaccctcatcggatagcctgctgtcctcgaccgagtctagcccccagggctcccccgaacccttggtgctccacgaggagactccccctaccacatcctctgattcaggagggacaaggcggtag

SEQ ID NO: 2908 - DNA, 1365 bp, synthetic construct
  misc_feature 1..1365: note = source = /note="Description of Artificial Sequence: Synthetic coding sequence"
  source 1..1365: mol_type = other DNA
ttagattttttcagagtggtggagaaccagcagccccctgcaaccatgccacttaatgtatcgttcactaatcgcaactatgacttggactacgactctgtccagccttacttctattgcgatgaggaggaaaatttctatcagcagcagcagcaaagtgaactccagcccccggcccccagcgaagatatttggaaaaagttcgagctgctgccaactcccccattgtcgccttctcggcggagcggcctttgctcgcctagctatgtggcagttacacctttctcattgagaggagataatgatggcgggggcggctccttttcaacagctgatcagctggagatggtgactgaactgcttgggggcgacatggtgaaccagagttttatctgcgatcctgatgacgagacattcattaaaaacatcataatccaggattgcatgtggtctggtttctcagccgccgctaagttagtctccgaaaaactcgcctcctaccaggccgcccggaaagacagcggctccccaaatcctgcgagggggcattccgtctgctctacgtcctcactgtacctgcaggatctctcagctgccgcaagtgaatgcattgacccatccgtcgtttttccatatcccttgaacgactcatccagccccaagtcatgtgcctcacaggactcttctgcattctccccctcctccgatagtctgctgtcttccaccgagtccagtccgcagggctctccagagccattggtcctgcacgaggagaccccacccacaacgtccagcgattcagaggaggaacaggaagatgaggaagaaatcgatgtcgtgtcggtggagaaacgtcaggcccccggcaagaggtcggagtccggatcgccgtctgccggtgggcactccaaaccgccccattctcccctggtcctgaagcgttgccatgtgtctacccaccaacataattatgccgcacccccctcaacccggaaggactaccctgccgctaagcgggtgaaacttgacagcgtgcgagtgctgcgccagatctccaacaacagaaagtgcacttccccccgaagcagcgatacggaagagaacgtgaagcggcggacacataatgtgctggagcgccagagacgaaatgagcttaagaggtcttttttcgccctccgggaccagatcccggaacttgaaaacaacgagaaggctcctaaagtggtgatcctgaagaaagccactgcctacatcctgagcgtccaggccgaagagcagaagttaatatcagaggaggacctgctcagaaaacggagggagcagctgaaacacaaactcgaacagctgagaaattcttgtgcgtag

SEQ ID NO: 2909 - DNA, 1263 bp, synthetic construct
  misc_feature 1..1263: note = source = /note="Description of Artificial Sequence: Synthetic coding sequence"
  source 1..1263: mol_type = other DNA
atgccactcaatgttagttttaccaatagaaattatgacttggactacgatagcgttcaaccctacttttattgcgacgaggaggacatttggaaaaagtttgaacttttacccacgccacctttaagcccgtctcggcggtctggattgtgttcgccttcatacgtcgcagtaacacccttcagtcttaggggtgacaacgatgggggcggtggcagtttctccacagcggaccagctggagatggtgacggaactactcggcggggacatggtcaaccaatcttttatctgcgatccagacgatgagacatttattaagaacattatcatccaagattgcatgtggagcggattcagcgcagccgccaagctggtgtcagagaaactggcatcttaccaagccgcccgcaaagatagcggcagccccaaccctgcgagaggccactctgtgtgctccacctctagtctatatcttcaggatctttcagccgccgcaagtgagtgcattgatcctagcgttgtatttccctaccccctgaacgactcatcatccccaaagtcgtgcgcctcacaggatagttctgctttcagtccatcatctgattctcttctctccagtaccgagagttctccacagggcagccctgagccactggtgctacacgaggaaaccccccctacgacgagctccgatagcgaggaggaacaggaagatgaagaggaaatagatgtggtgagcgtggaaaaacgacaggcccccggtaagaggagtgagtctgggagtccttcagccggtggccactccaaaccaccccatagtccactggtcctaaaaaggtgccatgtgtcgacccatcaacataattatgccgcaccacccagcacacgcaaggattacccagccgcgaaaagagttaaactggattctgtcagggtcttaagacagataagcaacaataggaaatgtactagcccacgcagttccgacacagaggaaaatgtcaagcggcgaacccataacgtactcgagagacagcgtcgcaatgagctcaaacggtctttcttcgcattgcgagatcagatccctgaattggagaacaacgagaaagcccccaaagtggttattctaaaaaaggcaacagcttacattctcagcgtacaagcagaggaacagaagttgattagcgaggaagacctgttgaggaaacgtcgtgagcagcttaagcacaaactcgagcagttgcggaattcatgcgcttag

SEQ ID NO: 2910 - DNA, 1362 bp, synthetic construct
  misc_feature 1..1362: note = source = /note="Description of Artificial Sequence: Synthetic coding sequence"
  source 1..1362: mol_type = other DNA
cttgatttctttcgagtagtagagaaccagcccccagcaaccatgcccctgaatgttagctttacaaacagaaactacgatctggactatgacagcgtccagccatacttctactgcgatgaagaggaaaatttctaccaacagcagcagcagagtgagcttcagcccccagccccgtctgaggacatctggaagaagttcgagctcctgcccactcccccgctaagtccgagccgcaggagtggactgtgttctcccagctacgtagccgtgacacccttctccctgagaggagataatgatggaggaggtggcagcttcagcactgcagatcaattagagatggtgactgaattactgggtggggacatggttaatcagtcttttatttgcgatccagacgatgagacgttcataaaaaatattatcattcaggactgtatgtggagcggcttttctgcggccgcaaagctggtctctgaaaaactcgcatcataccaggcagcaaggaaagatagcggcagccccaaccccgcaagaggccattcagtgtgctcaacctctagcctgtacttacaggatctgagtgcagctgcatccgaatgcattgacccttcggtagtgttcccgtatccactcaatgatagctcctctcctaagtcatgcgcatcgcaggattcttctgccttttctccttcctcagattctcttctttcctcaaccgaaagttctccccagggctcacccgaacccctcgtactgcacgaagaaactcctccaacgacaagttccgactccgaggaggaacaggaggacgaggaggaaatcgacgtagtctccgtcgagaaacggcaggcccccggaaagcggtctgagtccgggagcccgtccgccgggggacacagcaaaccccctcatagccccttagtcctgaaaaggtgccatgtctccacacatcagcacaattacgccgctcccccgtccacccgaaaagactatccagccgccaaacgtgtgaagctcgattcggttcgcgtgctgcgccaaatttctaataaccgtaaatgcactagccccaggtcctccgatactgaagagaacgttaaaaggcggacacataatgtcctcgagaggcagagacgcaacgagctgaagcggtcattcttcgctctgagggaccaaattccggagctagagaacaatgagaaggcccccaaggtcgttatattgaagaaggcgactgcatatattttgagtgtgcaggccgaggaacagaagctgatcagcgaagaagaccttctccggaagcggcgggaacagctgaagcataagctagagcagctgagaaattcatgtgcctag

SEQ ID NO: 2911 - DNA, 8442 bp, synthetic construct
  misc_feature 1..8442: note = source = /note="Description of Artificial Sequence: Synthetic coding sequence"
  source 1..8442: mol_type = other DNA
atgatcccagcacggtttgccggcgtgcttctggcattagctctgatcctgcctggcaccctttgtgctgagggcactagaggccgctcaagcaccgctagatgttctcttttcggatccgattttgtcaataccttcgacggtagcatgtattctttcgctggatattgctcatacctgctcgctggaggctgccagaagaggtcattctctataattggcgatttccaaaacggaaaacgggtgagtctttcagtgtacttgggcgaatttttcgacatccatctgtttgtaaacgggaccgtcacacagggggaccagagagtcagtatgccctatgcttcgaaagggctgtacctggagacagaggcaggctattacaaattaagcggcgaggcatacgggttcgtagccagaatcgatgggagcgggaactttcaggttttactgtcagatcgctattttaacaaaacttgcggtctgtgcggtaactttaacatattcgcagaggacgactttatgactcaggagggaaccttaacctctgatccttatgacttcgctaattcatgggcactcagcagcggtgagcaatggtgcgaacgggcgagcccgcccagctctagctgcaacatatccagcggtgagatgcagaaagggttgtgggagcagtgtcagctccttaaatccacgagcgtttttgcccggtgccatcctctggtggaccctgaacccttcgtggccctgtgtgaaaaaacactgtgcgagtgcgcaggcggccttgaatgcgcctgtcctgccctactggaatacgccaggacttgtgctcaggaagggatggtgctgtacggctggaccgaccacagcgcctgtagccccgtgtgccccgccggtatggagtaccgtcagtgcgtgtctccttgcgcaagaacttgtcaatctttacacattaacgagatgtgccaggagcggtgtgtcgacgggtgtagttgcccagaaggccaactgctggatgaaggactgtgcgttgagagcactgaatgtccatgcgtccattccggtaagagatatccccccgggacatccctgtccagagattgcaacacttgcatctgcaggaattcccagtggatttgcagtaatgaggaatgccccggcgaatgtctggtgacaggacagtcacattttaagagttttgacaatagatactttacattctcaggcatatgtcagtatctcttagccagagattgccaggatcattccttttccatcgtcatcgaaaccgtccagtgcgccgatgacagggacgcagtctgcaccaggtcagtgactgtacgcctgcccggtctgcacaacagccttgtgaaactaaaacacggagccggagtggctatggacggtcaagacgtgcagctccccctgctaaaaggcgacttacgcatccaacacaccgtcacagcaagcgtgagactgtcttatggtgaggatctccagatggactgggacggccggggcaggcttctcgtgaagctgtcccctgtgtacgccggaaagacctgtgggctctgcggcaattacaatggtaaccagggagatgacttcctcacccctagcggtctggcagaaccgagggtggaggactttgggaacgcatggaaactccacggagactgtcaagacctccagaaacagcactccgacccctgtgccctgaacccgaggatgacacgcttttccgaggaagcctgtgctgtgctgactagcccgacattcgaggcctgccacagggccgtgtcccctctgccatacctgagaaattgccgttacgatgtgtgttcgtgctccgacggccgggagtgcctgtgtggagctctggcttcatacgcggccgcgtgtgccggtcgcggcgtccgtgtggcttggcgcgagcccgggagatgtgagttgaactgccccaaagggcaggtatacttgcaatgcggcacgccatgtaatttgacctgcagatctctcagctacccagatgaagagtgcaatgaggcatgcttagaggggtgtttttgcccccccggcctctatatggatgaaagaggagattgtgttccgaaggcgcagtgcccctgttactacgacggggaaatcttccagcccgaagacatcttctcagaccatcacacaatgtgctattgcgaggatggattcatgcattgtacaatgtccggcgtacctgggagtctgctgcctgatgccgtcctgtcgtccccactgtcacacagatctaagcggtctcttagctgcagacccccaatggtcaagcttgtatgtcccgccgataacctgagagctgaaggactggaatgtactaagacgtgtcagaactacgacctggagtgcatgagcatgggctgtgtgtccgggtgcttatgccctcctgggatggtcagacacgagaatcggtgcgttgccttggaacggtgtccctgctttcaccagggtaaggagtatgcgcctggggagactgtgaaaataggatgtaatacatgtgtctgtcaagatcggaaatggaattgcacggaccacgtgtgcgacgccacttgcagtaccattggtatggctcattatctgacgttcgacggtctaaaatacttgttccccggtgagtgtcagtacgtgctcgtccaagattattgcggctcgaaccctggtaccttcagaattctggtcggaaataaagggtgttcccatccaagcgtgaagtgcaagaaacgcgtgaccatcctcgtggagggaggtgaaattgagctcttcgatggagaggttaatgtgaaaaggccaatgaaggacgaaacccacttcgaggtggttgaatccgggcgatacattatcctcctgctgggtaaagcactctcagtggtttgggaccgacatctcagtatcagtgtcgtgctcaagcaaacataccaagagaaggtgtgcgggctctgcggcaattttgacgggattcaaaataacgacctgacaagtagtaatctccaggtggaggaagatcctgtggatttcggaaactcatggaaggtgtcttcccagtgtgccgacactagaaaagtgcccctcgactcttcccctgctacctgtcacaataacattatgaagcagactatggttgattcaagctgtaggatactgacatccgacgtgtttcaggactgtaataaactggtggacccagagccgtacttggacgtctgcatctacgacacctgttcttgcgagtcgatcggtgattgtgcgtgtttttgtgatactatcgcagcttacgcgcatgtgtgtgctcagcatgggaaagtggtcacctggcgaaccgccacactgtgcccacagtcatgcgaggaacgcaatctgagggaaaatggatatgaatgcgagtggaggtacaatagctgcgccccagcctgccaggtcacttgtcagcaccctgaaccgctggcctgcccggtgcagtgcgtggaaggctgccacgcccactgcccgcctggcaaaatccttgacgaactactccagacttgtgtggaccccgaagattgccctgtttgtgaagtggccggccgaaggtttgcaagcggtaaaaaggtgactctcaacccatcagatcctgagcattgtcagatctgccattgcgacgtcgttaacttgacatgcgaggcttgccaggaacctggcgggctcgtagtcccgcctaccgacgctccagtctctcccactaccctatacgtcgaggacataagcgaacctcctctgcatgatttctactgctcacggctgctggatctggtttttttgttggacggctcctcccgtctgagtgaggcagagtttgaggttttaaaagcttttgtcgttgacatgatggagagattacgtatatcccagaaatgggtcagggttgctgtggtggagtatcatgacggtagtcatgcgtacattggcctgaaagatcgtaaacggccgtcggaattaaggcgaatagcaagtcaggtgaagtatgctggctcccaggtcgcgtccaccagcgaggtcttgaagtacaccctgttccagatctttagcaaaatcgatagacccgaagcgagccgcatcaccctgctcttaatggcctcacaggaaccccagcgaatgtctcggaacttcgtacggtatgtccaggggctcaagaaaaagaaagtgatcgtcatacccgtgggcataggacctcatgctaaccttaagcagatccgcttaatcgaaaagcaggccccggagaataaggcgtttgtcttaagtagtgttgatgagttagagcagcagagggacgagattgtgtcctatctttgcgacctcgcgcccgaggctccacctcctacacttcctccagacatggcccaggtgacggtcggtcccggactgctgggcgtgagtaccctgggacctaaacgcaacagcatggtccttgacgtcgcctttgtgctggaaggctctgacaaaataggcgaggctgacttcaatcggtctaaggaatttatggaagaagtgattcagcgaatggacgtgggccaggattccattcacgttacagttttacagtacagttacatggttaccgtggagtaccccttcagtgaagcacaaagcaagggcgatatcctgcagcgtgtgagagaaatccgttatcagggagggaatagaactaacaccggcctggcactccggtatctatccgaccatagtttcctagtgtcccaaggcgaccgggagcaagcaccaaacctcgtgtacatggtcaccggaaacccagccagcgacgaaatcaaaaggctcccgggggacatccaggtagtcccaatcggcgttggacccaacgccaatgttcaagagctggagaggatcggatggcccaatgcccccatactgatacaggacttcgaaactctgcccagagaggctccagatctggttcttcagagatgctgctccggcgagggcctgcagattcctaccctgtcccccgcccccgactgtagccagcctctggacgtaattctgctcctggacgggtcgtccagctttcccgcgtcctacttcgatgaaatgaaatcgttcgcaaaagcattcatcagcaaggctaatataggcccgcgtctgacacaagtcagtgtgcttcagtatggctcaattactaccattgatgtcccctggaatgtggttcccgaaaaagcccatctgctctcattggtggatgtcatgcagcgggaggggggtccttcccaaataggcgatgctctgggattcgccgtccgatatctgacaagcgagatgcatggggcacgccctggagcttccaaggccgttgtgattctagtaaccgacgtgtcagtggacagcgtcgatgcagctgctgatgccgcccggtctaacagagtgaccgtgttccctattggcattggggaccggtatgacgcggctcagcttcgcattcttgccggtccagcaggcgattccaatgtcgtgaaactgcaaagaatcgaagacctgccaacaatggtgaccctcggaaattcattcctgcacaaactgtgttcagggttcgtacgaatctgcatggacgaagatggtaacgagaagagacctggtgatgtgtggactctgcccgatcagtgtcacaccgtgacttgtcagcccgatggtcagaccttgttaaaaagtcatcgggtgaattgcgatcgtggcctgcggccatcatgcccgaactcccagtcaccggtgaaagttgaggaaacttgcggctgcagatggacatgcccatgtgtctgcacaggctctagcactcggcatatcgtgacatttgacggccagaacttcaagctgacaggtagttgctcctatgtcctgtttcagaataaggaacaagatctcgaagtgatcctgcacaatggcgcctgctctccaggtgcccggcagggctgcatgaagtcaatcgaagtgaagcattcggcccttagtgttgagctccacagcgacatggaagtgacagtcaatggcagattggtctccgtcccttacgtgggaggaaatatggaggttaacgtgtacggggcgatcatgcatgaggttcggtttaatcacttgggtcatatcttcacttttacccctcagaacaacgaattccagctccaactcagtccgaagaccttcgcctccaaaacatacggtctgtgcggaatatgcgacgagaacggagcaaacgactttatgctgagagatggaaccgtcacaaccgactggaagacgctggtacaggaatggaccgttcaaagacctggccagacctgtcaaccgatcttggaggagcagtgcctagtgcctgacagcagccattgccaggtcttgctgctgcctttgttcgctgaatgccacaaggttctagcaccagcaactttctacgctatttgtcaacaagatagttgccaccaggaacaggtctgtgaggttatcgcatcttatgcgcatttgtgtcgaacgaacggagtatgcgtggattggcgcacacccgacttctgcgcaatgagctgcccaccttctcttgtctataaccactgtgagcacggctgtcctcggcactgtgacgggaacgtcagcagttgcggcgatcatccgtccgagggctgtttctgcccacccgacaaggtgatgttggaaggttcatgcgttcctgaagaggcatgcacacagtgcattggcgaggatggcgtgcagcatcaattcctagaggcttgggtgccagatcatcagccatgccagatatgtacctgcttgagtggccgaaaggtcaactgcacaactcagccatgcccgaccgcgaaggccccgacatgcggtctgtgcgaggttgccaggttgagacagaatgccgaccaatgttgccccgagtatgagtgcgtctgcgacccagtgtcttgtgatctccccccggtcccccactgcgaaaggggactgcaacccaccttgacgaacccaggcgagtgcaggcccaacttcacctgtgcatgtcgcaaggaggagtgtaaacgagtgtcccctcccagctgccctccacaccggcttccgactcttcgtaagactcaatgctgtgatgaatacgagtgcgcctgcaactgtgttaactccacggtgtcatgtccactggggtatctggcctccactgcaacaaatgactgtggctgtacgactactacgtgcctgcctgacaaggtttgcgttcacagaagcaccatttaccccgtgggacagttttgggaagagggttgtgacgtgtgtacatgtaccgacatggaagatgcagtgatggggttacgcgtggcccagtgtagtcagaaaccatgtgaggatagctgtcgctcgggcttcacgtatgttctccacgaaggggaatgttgtgggagatgtctcccaagtgcatgtgaagtcgtgacggggtccccgcgcggagacagccagagctcatggaaatcggttggcagtcaatgggcaagccctgagaatccctgcttaatcaacgagtgtgtgcgcgtgaaggaggaagtgttcatccagcaacggaatgtgtcttgtccccagctggaggtgcccgtttgcccctctggtttccaactctcctgtaaaaccagcgcttgttgtccctcctgtcgctgtgagcggatggaggcatgcatgctcaatggcactgtaatcggacctgggaagaccgtgatgattgacgtttgcaccacatgccgctgcatggtgcaggtcggggttattagcgggttcaagctcgagtgtcgaaaaactacctgcaatccgtgcccccttggatacaaggaggagaacaacacgggtgagtgctgtggacggtgtctgcccaccgcctgcactattcagctgagaggtggccagatcatgaccttgaagcgggacgagactctgcaggatggctgcgatacacatttctgtaaggttaacgaacggggagagtatttttgggagaagagagtgaccgggtgtccacccttcgatgagcacaagtgtctggccgaagggggaaaaattatgaagatccctggtacttgttgtgatacctgcgaggaacctgaatgcaacgacattacggctcggctgcagtatgtgaaggtcggaagttgtaagagtgaggtggaagtggacatccattattgtcaaggaaagtgcgccagcaaggccatgtactcaattgacataaacgacgtacaagatcaatgcagctgctgcagccctactagaaccgagccaatgcaggtggctctgcattgtactaatggatctgtggtgtatcatgaagtcctgaacgccatggagtgtaagtgtagcccaagaaagtgcagcaaatag

SEQ ID NO: 2912 - DNA, 816 bp, synthetic construct
  misc_feature 1..816: note = source = /note="Description of Artificial Sequence: Synthetic coding sequence"
  source 1..816: mol_type = other DNA
atgactgagccccaggtgggctgtgtcgcctgtccaagggtccataaggagcctgctcaagtgggtaccccatggcctgcaaagcctcgcagtcaccctagaaaacgcgaccctacggctctgctgcccagatctctatggcctgcatgccaggagtcggtaaccgcactgtgctttttacaagagacagtcgaacgtttggggcagtcacccgcccaggacacccccgtactgggcccatgctgggacccaatggcacttggcacacagggacgccttctgctggatcgcgattctaaagacacccagactcgcatctcgcaaaagggccgcagactccagccacctgggaccccaagtgctcctccacagcgacgacccagaaagcaactcaacccctgtaggggcacggagcgagtggacccaggattcgagggggtgaccctaaaattccagattaagcctgatagctctctgcaaatcatccccacctattccttgccgtgcagttccagaagtcaggagtcgcctgccgatgcagtgggcggaccagcagcccacccgggaggcaccgaggcacatagcgccgggtcggaggccctggagccaagacgatgtgccagctgcaggacccagcgtacgcctctgtggcgcgacgcggaagatggtacccccctgtgtaatgcctgtggaattagatataagaagtacggcactaggtgctcaagttgctggctcgtcccaagaaagaatgtgcagcctaagagactctgcgggagatgcggagtttcgcttgacccgatacaggaggggtag

SEQ ID NO: 2913 - DNA, 1182 bp, synthetic construct
  misc_feature 1..1182: note = source = /note="Description of Artificial Sequence: Synthetic coding sequence"
  source 1..1182: mol_type = other DNA
atgaccacctacagcgacaagggggccaagccagagcggggccgcttcctgcacttccacagcgtgaccttctgggtgggcaatgccaagcaggccaccagcttctactgcagcaagatgggctttgagcccctggcctaccggggcctggagaccggcagccgggaggtggtgagccacgtgatcaagcagggcaagatcgtgtttgtgctgagcagcgccctgaacccctggaacaaggagatgggagaccacctggtgaagcatggagatggagtgaaggacatcgcctttgaggtggaggactgtgactacatcgtgcagaaggcccgggagcggggggccaagatcatgagggagccctgggtggagcaggacaagtttgggaaggtgaagtttgctgtgctgcagacctatggagacaccacccacaccctggtggagaagatgaactacatcggccagttcctgcccggctatgaggccccagccttcatggaccccctgctgcccaagctgcccaagtgcagcctggagatgattgaccacatcgtgggcaaccagcctgaccaggagatggtgtctgccagcgagtggtacctgaagaacctgcagttccaccgcttctggagcgtggatgacacccaggtgcacacagagtacagcagcctgcggagcatcgtggtggccaactatgaggagagcatcaagatgcccatcaatgaaccagcccctgggaagaagaagagccagatccaggagtatgtggactacaatggaggagctggggtgcagcacatcgccctgaagacagaggacatcatcacagccatccgccacctgcgggagcggggcctggagttcctgtctgtgcccagcacctactacaagcagctgcgggagaagctgaagacagccaagatcaaggtgaaggagaacattgatgccctggaggagctgaagatcctggtggactatgatgagaagggctacctgctgcagatcttcaccaagcctgtgcaggaccggcccaccctcttcctggaggtgatccagaggcacaaccaccagggctttggagctggcaacttcaacagcctcttcaaggcctttgaggaggagcagaacctgcggggcaacctgaccaacatggagaccaatggagtggtgcccggcatgtag

SEQ ID NO: 2914 - DNA, 1065 bp, synthetic construct
  misc_feature 1..1065: note = source = /note="Description of Artificial Sequence: Synthetic coding sequence"
  source 1..1065: mol_type = other DNA
atgggctttgagcccctggcctaccggggcctggagaccggcagccgggaggtggtgagccacgtgatcaagcagggcaagatcgtgtttgtgctgagcagcgccctgaacccctggaacaaggagatgggagaccacctggtgaagcatggagatggagtgaaggacatcgcctttgaggtggaggactgtgactacatcgtgcagaaggcccgggagcggggggccaagatcatgagggagccctgggtggagcaggacaagtttgggaaggtgaagtttgctgtgctgcagacctacggggacaccacccacaccctggtggagaagatgaactacatcggccagttcctgcccggctatgaggccccagccttcatggaccccctgctgcccaagctgcccaagtgcagcctggagatgattgaccacatcgtgggcaaccagcctgaccaggagatggtgtctgccagcgagtggtacctgaagaacctgcagttccaccgcttctggagcgtggatgacacccaggtgcacacagagtacagcagcctgcggagcatcgtggtggccaactatgaggagagcatcaagatgcccatcaatgagcccgcccctgggaagaagaagagccagatccaggagtatgtggactacaacggcggggccggcgtgcagcacatcgccctgaagacagaggacatcatcacagccatccgccacctgcgggagcggggcctggagttcctgtctgtgcccagcacctactacaagcagctgcgggagaagctgaagacagccaagatcaaggtgaaggaaaatattgatgccctggaggagctgaagatcctggtggactatgatgagaagggctacctgctgcagatcttcaccaagcctgtgcaggaccggcccaccctcttcctggaggtgatccagaggcacaaccaccagggctttggagctggcaacttcaacagcctcttcaaggcctttgaggaggagcagaacctgcggggcaacctgaccaacatggagaccaacggggtggtgcccggcatgtag

SEQ ID NO: 2915 - DNA, 1173 bp, synthetic construct
  misc_feature 1..1173: note = source = /note="Description of Artificial Sequence: Synthetic coding sequence"
  source 1..1173: mol_type = other DNA
tacagcgacaagggggccaagccagagcggggccgcttcctgcacttccacagcgtgaccttctgggtgggcaatgccaagcaggccaccagcttctactgcagcaagatgggctttgagcccctggcctaccggggcctggagaccggcagccgggaggtggtgagccacgtgatcaagcagggcaagatcgtgtttgtgctgagcagcgccctgaacccctggaacaaggagatgggagaccacctggtgaagcatggagatggagtgaaggacatcgcctttgaggtggaggactgtgactacatcgtgcagaaggcccgggagcggggggccaagatcatgagggagccctgggtggagcaggacaagtttgggaaggtgaagtttgctgtgctgcagacctacggggacaccacccacaccctggtggagaagatgaactacatcggccagttcctgcccggctatgaggccccagccttcatggaccccctgctgcccaagctgcccaagtgcagcctggagatgattgaccacatcgtgggcaaccagcctgaccaggagatggtgtctgccagcgagtggtacctgaagaacctgcagttccaccgcttctggagcgtggatgacacccaggtgcacacagagtacagcagcctgcggagcatcgtggtggccaactatgaggagagcatcaagatgcccatcaatgagcccgcccctgggaagaagaagagccagatccaggagtatgtggactacaacggcggggccggcgtgcagcacatcgccctgaagacagaggacatcatcacagccatccgccacctgcgggagcggggcctggagttcctgtctgtgcccagcacctactacaagcagctgcgggagaagctgaagacagccaagatcaaggtgaaggaaaatattgatgccctggaggagctgaagatcctggtggactatgatgagaagggctacctgctgcagatcttcaccaagcctgtgcaggaccggcccaccctcttcctggaggtgatccagaggcacaaccaccagggctttggagctggcaacttcaacagcctcttcaaggcctttgaggaggagcagaacctgcggggcaacctgaccaacatggagaccaacggggtggtgcccggcatgtag

SEQ ID NO: 2916 - DNA, 438 bp, synthetic construct
  misc_feature 1..438: note = source = /note="Description of Artificial Sequence: Synthetic coding sequence"
  source 1..438: mol_type = other DNA
atgagcacagaaggaggcggccgccgctgccaggcccaggtgagccgccgcatctccttcagcgccagccaccggctgtacagcaagttcctgagtgatgaggagaacctgaagctgtttgggaagtgcaacaaccccaatggacatggccacaactacaaggtggtggtgacagtgcacggggagattgatcctgccaccggcatggtgatgaacctggccgacctgaagaagtacatggaggaggccatcatgcagcccctggaccacaagaacctggacatggatgtgccctactttgctgatgtggtgtccaccacagaaaatgtggccgtgtacatctgggacaacctgcagaaggtgctgcctgtgggcgtgctgtacaaggtgaaggtgtatgaaacagacaacaacatcgtggtgtacaagggggagtag

SEQ ID NO: 2917 - DNA, 4284 bp, synthetic construct
  misc_feature 1..4284: note = source = /note="Description of Artificial Sequence: Synthetic coding sequence"
  source 1..4284: mol_type = other DNA
atgcaccagaggcacccccgggcccgctgcccccccctgtgtgtggccggcatcctggcctgtggcttcctgctgggctgctggggccccagccacttccagcagagctgcctgcaggccctggagccccaggccgtgagcagctacctgagccctggggcccccctgaagggccggccccccagccctggcttccagaggcagaggcagaggcagaggagagctgctgggggcatcctgcacctggagctgctggtggccgtgggcccagatgtgttccaggcccaccaggaggacacagaaagatatgtgctgaccaacctgaacatcggggctgagctgctgcgggaccccagcctgggcgcccagttccgggtgcacctggtgaagatggtgatcctgacagagcctgagggcgcccccaacatcacagccaacctgaccagcagcctgctgtctgtgtgtggctggagccagaccatcaacccagaagatgacacagatcctggccacgccgacctggtgctgtacatcaccaggtttgacctggagctgcctgatggcaaccggcaggtgcggggcgtgacccagctgggcggggcctgcagccccacctggagctgcctgatcacagaggacaccggctttgacctgggcgtgaccatcgcccacgagatcggccacagctttggcctggagcatgatggagcccctggcagcggctgcggccccagcggccacgtgatggccagtgatggagctgccccccgggccggcctggcctggagcccctgcagccggcggcagctgctgagcctgctgtctgctggccgggcccgctgtgtgtgggaccccccccggccccagcccggcagcgctggccaccccccagatgcccagcccggcctgtactacagcgccaatgagcagtgccgggtggccttcggccccaaggctgtggcctgcacctttgcccgggagcacctggacatgtgccaggccctgagctgccacacagaccccctggaccagagcagctgcagccggctgctggtgcccctgctggatggaacagaatgtggggtggagaagtggtgcagcaagggccgctgccgcagcctggtggagctgacccccatcgctgctgtgcacggccgctggagctcctggggccccaggagcccctgcagccgcagctgtggcggcggcgtggtgacccggcggcggcagtgcaacaaccccaggcctgccttcggcggccgggcctgtgtgggcgctgacctgcaggccgagatgtgcaacacccaggcctgtgagaagacccagctggagttcatgagccagcagtgtgccaggacagatggccagcccctgcggagcagccctgggggcgccagcttctaccactggggcgctgctgtgccccacagccagggagatgccctgtgccgccacatgtgccgggccatcggggagagcttcatcatgaagagaggagacagcttcctggatggcacccgctgcatgcccagcggccccagagaagatggcaccctgagcctgtgtgtgtctggcagctgcaggaccttcggctgtgatggccgcatggacagccagcaggtgtgggaccgctgccaggtgtgtggcggggacaacagcacctgcagccccaggaagggcagcttcaccgctggccgggcccgggagtatgtgaccttcctgactgtgacccccaacctgacctctgtgtacatcgccaaccaccggcccctcttcacccacctggccgtgagaattggaggccgctacgtggtggccggcaagatgagcatcagccccaacaccacctaccccagcctgctggaggatggccgggtggagtacagagtggccctgacagaggaccggctgccccggctggaggagatccgcatctggggccccctgcaggaggatgctgacatccaggtgtacagaagatatggagaggagtatggcaacctgaccaggccagacatcaccttcacctacttccagcccaagccccggcaggcctgggtgtgggccgctgtgcggggcccctgcagcgtgtcctgtggggccggcctgcgctgggtgaactacagctgcctggaccaggccaggaaggagctggtggagaccgtgcagtgccagggcagccagcagcccccagcctggccagaggcctgtgtgctggagccctgccccccctactgggccgtgggggactttggcccctgcagcgccagctgtggcggcggcctgcgggagaggcctgtgcgctgtgtggaggcccagggcagcctgctgaagaccctgcccccagcccgctgcagagctggggcccagcagcctgctgtggccctggagacctgcaacccccagccctgcccagcccgctgggaggtgtctgagcccagcagctgcaccagcgctggaggagctggcctggccctggagaatgagacctgtgtgcctggagcagatggcctggaggcccctgtgacagagggccctggctctgtggatgagaagctgcctgcccctgagccctgtgtgggcatgagctgccccccaggctggggccacctggatgccaccagcgctggggagaaggcccccagcccctggggcagcatcagaactggagcccaggccgcccacgtgtggaccccagctgctggcagctgcagcgtgtcctgtggccggggcctgatggagctgcgcttcctgtgcatggacagcgccctgcgggtgcctgtgcaggaggagctgtgtggcctggccagcaagccaggcagccggcgggaggtgtgccaggccgtgccctgcccagcccgctggcagtacaagctggccgcctgcagcgtgtcctgtggccggggcgtggtgcggcgcatcctgtactgtgcccgggcccatggagaagatgatggagaggagatcctgctggacacccagtgccagggcctgcccaggcctgagccccaggaggcctgcagcctggagccctgccccccacgctggaaggtgatgagcctgggcccctgcagcgccagctgtggcctgggcacagcccggcgctctgtggcctgtgtgcagctggaccagggccaggatgtggaggtggatgaagctgcctgtgccgccctggtgcggcctgaggcctctgtgccctgcctgattgctgactgcacctaccgctggcacgtgggcacctggatggagtgcagcgtgtcctgtggagatggcatccagaggagaagagacacctgcctgggcccccaggcccaggcccctgtgcctgctgacttctgccagcacctgcccaagcctgtgacagtgcggggctgctgggccggcccctgtgtgggccagggcacccccagcctggtgccccatgaggaggccgccgcccctggccgcaccacagccaccccagctggggccagcctggagtggagccaggcccggggcctgctcttctccccagccccccagccccggcggctgctgcccggcccccaggagaacagcgtgcagagcagcgcctgtggccggcagcacctggagcccaccggcaccatcgacatgaggggccctggccaggccgactgtgctgtggccatcggccggcccctgggggaggtggtgaccctgcgggtgctggagagcagcctgaactgcagcgctggggacatgctgctgctgtggggccgcctgacctggaggaagatgtgcaggaagctgctggacatgaccttcagcagcaagaccaacaccctggtggtgcggcagagatgtggccggcctgggggcggcgtgctgctgcgctatggcagccagctggcccctgagaccttctaccgggagtgtgacatgcagctgtttggcccctggggcgagatcgtgagccccagcctgagccctgccaccagcaatgctgggggctgccgcctcttcatcaacgtggccccccacgccagaattgccatccacgccctggccaccaacatgggcgccggcacagagggcgccaatgccagctacatcctgatccgggacacccacagcctgcggaccacagccttccacggccagcaggtgctgtactgggagagcgagagcagccaggccgagatggagttcagcgagggcttcctgaaggcccaggccagcctgcggggccagtactggaccctgcagagctgggtgcctgagatgcaggacccccagagctggaagggcaaggagggcacctag

SEQ ID NO: 2918 - DNA, 3309 bp, synthetic construct
  misc_feature 1..3309: note = source = /note="Description of Artificial Sequence: Synthetic coding sequence"
  source 1..3309: mol_type = other DNA
atgttccagctgcctgtgaacaacctgggcagcctgaggaaggccaggaagacagtgaagaagatcctgagtgacatcggcctggagtactgcaaggagcacatcgaggacttcaagcagtttgagcccaatgacttctacctgaagaacaccacctgggaggatgtgggcctgtgggaccccagcctgaccaagaaccaggactaccgcaccaagcccttctgctgcagcgcctgccccttcagcagcaagttcttcagcgcctacaagagccacttcagaaatgtgcacagtgaagattttgagaaccgcatcctgctgaactgcccctactgcaccttcaatgctgacaagaagaccctggagacccacatcaagatcttccacgccccaaatgccagcgcccccagcagcagcctgagcaccttcaaggacaagaacaagaatgatggcctgaagcccaagcaggccgacagcgtggagcaggccgtgtactactgcaagaagtgcacctacagagaccccctgtatgaaattgtgaggaagcacatctaccgggagcacttccagcacgtggccgccccctacatcgccaaggccggggagaagagcctgaatggagctgtgcccctgggcagcaatgcccgggaggagagcagcatccactgcaagcgctgcctcttcatgcccaagagctatgaggccctggtgcagcacgtgattgaggaccacgagagaattggctaccaggtgacagccatgattggccacaccaacgtggtggtgcccaggagcaagcccctgatgctgattgcccccaagccccaggacaagaagtccatgggcctgcccccaagaattggcagcctggccagcggaaatgtgcgcagcctgcccagccagcagatggtgaaccggctgagcatccccaagcccaacctgaacagcactggagtgaacatgatgagctctgtgcacctgcagcagaacaactacggcgtgaagtctgtgggccagggctacagcgtgggccagagcatgaggctgggcctgggcggcaatgcccctgtgtccatcccccagcagagccagagcgtgaagcagctgctgcccagcggaaatggccgctcctatggcctgggcagcgagcagaggagccaggccccagcccgctacagcctgcagagcgccaatgccagcagcctgagcagcggccagctgaagagccccagcctgagccagagccaggccagccgggtgctgggccagagcagcagcaagccagctgctgctgccactggacctcctcctggcaacaccagcagcacccagaagtggaagatctgcaccatctgcaatgaactcttcccagaaaatgtgtacagcgtgcactttgagaaggagcacaaggccgagaaggtgcctgctgtggccaactacatcatgaagatccacaacttcaccagcaagtgcctgtactgcaaccgctacctgcccacagacaccctgctgaaccacatgctgatccacggcctgagctgcccctactgccgcagcaccttcaatgatgtggagaagatggccgcccacatgaggatggtgcacattgatgaggagatgggccccaagacagacagcaccctgagctttgacctgaccctgcagcagggcagccacaccaacatccacctgctggtgaccacctacaacctgagagatgccccagctgagagcgtggcctaccacgcccagaacaacccccctgtgccccccaagccccagcccaaggtgcaggagaaggctgacatccctgtgaagagcagcccccaggccgctgtgccctacaagaaggatgtgggcaagaccctgtgccccctgtgcttcagcatcctgaagggccccatcagtgatgccctggcccaccacctgcgggagcggcaccaggtgatccagacagtgcaccctgtggagaagaagctgacctacaagtgcatccactgcctgggcgtgtacaccagcaacatgacagccagcaccatcaccctgcacctggtgcactgccggggcgtgggcaagacccagaatggccaggacaagaccaatgcccccagccggctgaaccagagccccagcctggcccctgtgaagaggacctatgagcagatggagttccccctgctgaagaagaggaagctggatgatgacagcgacagccccagcttctttgaggagaagccagaggagcctgtggtgctggccctggaccccaagggccatgaagatgacagctatgaggccaggaagagcttcctgaccaagtacttcaacaagcagccctaccccacccggcgggagattgagaagctggccgccagcctgtggctgtggaagagtgacatcgccagccacttcagcaacaagaggaagaagtgtgtgcgggactgtgagaagtacaagccaggagtgctgctgggcttcaacatgaaggagctgaacaaggtgaagcatgagatggactttgatgctgagtggctgtttgaaaatcatgatgagaaggacagccgggtgaatgccagcaagacagctgacaagaagctgaacctgggcaaggaggatgacagcagcagtgacagctttgagaacctggaggaggagagcaatgaaagtggcagcccctttgatcctgtgtttgaggtggagcccaagatcagcaatgacaaccctgaggagcacgtgctgaaggtgatcccagaagatgccagcgagagcgaggagaagctggaccagaaggaggatggcagcaaatatgagaccatccacctgacagaggagcccaccaagctgatgcacaatgccagtgacagcgaggtggaccaggatgatgtggtggagtggaaggatggagccagccccagcgagagcggccctggcagccagcaggtgtctgactttgaggacaacacctgtgagatgaagccaggcacctggagcgatgagagcagccagagtgaagatgcccggagcagcaagccagctgccaagaagaaggccaccatgcagggcgaccgggagcagctgaagtggaagaacagcagctatggcaaggtggagggcttctggagcaaggaccagagccagtggaagaatgcctctgaaaatgatgagcggctgagcaacccccagatcgagtggcagaacagcaccattgattctgaagatggagagcagtttgacaacatgacagatggagtggccgagcccatgcacggcagcctggccggcgtgaagctgagcagccagcaggcctag

SEQ ID NO: 2919 - DNA, 3309 bp, synthetic construct; identical to SEQ ID NO: 2918
  misc_feature 1..3309: note = source = /note="Description of Artificial Sequence: Synthetic coding sequence"
  source 1..3309: mol_type = other DNA

SEQ ID NO: 2920 - DNA, 3309 bp, synthetic construct; identical to SEQ ID NO: 2918
  misc_feature 1..3309: note = source = /note="Description of Artificial Sequence: Synthetic coding sequence"
  source 1..3309: mol_type = other DNA

SEQ ID NO: 2921 - DNA, 3309 bp, synthetic construct; identical to SEQ ID NO: 2918
  misc_feature 1..3309: note = source = /note="Description of Artificial Sequence: Synthetic coding sequence"
  source 1..3309: mol_type = other DNA

SEQ ID NO: 2922 - DNA, 522 bp, synthetic construct
  misc_feature 1..522: note = source = /note="Description of Artificial Sequence: Synthetic coding sequence"
  source 1..522: mol_type = other DNA
atgttccagctgcctgtgaacaacctgggcagcctgaggaaggccaggaagacagtgaagaagatcctgagtgacatcggcctggagtactgcaaggagcacatcgaggacttcaagcagtttgagcccaatgacttctacctgaagaacaccacctgggaggatgtgggcctgtgggaccccagcctgaccaagaaccaggactaccgcaccaagcccttctgctgcagcgcctgccccttcagcagcaagttcttcagcgcctacaagagccacttcagaaatgtgcacagtgaagattttgagaaccgcatcctgctgaactgcccctactgcaccttcaatgctgacaagaagaccctggagacccacatcaagatcttccacgccccaaatgccagcgcccccagcagcagcctgagcaccttcaaggacaagaacaagaatgatggcctgaagcccaagcaggccgacagcgtggagcaggccgtgtactactgcaagaagtgcacctacagatag

SEQ ID NO: 2923 - DNA, 441 bp, synthetic construct
  misc_feature 1..441: note = source = /note="Description of Artificial Sequence: Synthetic coding sequence"
  source 1..441: mol_type = other DNA
atggtgatcctgacagagcctgagggcgcccccaacatcacagccaacctgaccagcagcctgctgtctgtgtgtggctggagccagaccatcaacccagaagatgacacagatcctggccacgccgacctggtgctgtacatcaccaggtttgacctggagctgcctgatggcaaccggcaggtgcggggcgtgacccagctgggcggggcctgcagccccacctggagctgcctgatcacagaggacaccggctttgacctgggcgtgaccatcgcccacgagatcggccaccgcatctgtgcccggcccagccctgccacccagacccgctggaccaaggctgctgctgctgccagcagcttcctgtcctggatgggccagaatgtggcctggaggtctggggccccccgggtggccgccgccccctggtggagctag

SEQ ID NO: 2924 - DNA, 4116 bp, synthetic construct
  misc_feature 1..4116: note = source = /note="Description of Artificial Sequence: Synthetic coding sequence"
  source 1..4116: mol_type = other DNA
atgcaccagaggcacccccgggcccgctgcccccccctgtgtgtggccggcatcctggcctgtggcttcctgctgggctgctggggccccagccacttccagcagagctgcctgcaggccctggagccccaggccgtgagcagctacctgagccctggggcccccctgaagggccggccccccagccctggcttccagaggcagaggcagaggcagaggagagctgctgggggcatcctgcacctggagctgctggtggccgtgggcccagatgtgttccaggcccaccaggaggacacagaaagatatgtgctgaccaacctgaacatcggggctgagctgctgcgggaccccagcctgggcgcccagttccgggtgcacctggtgaagatggtgatcctgacagagcctgagggcgcccccaacatcacagccaacctgaccagcagcctgctgtctgtgtgtggctggagccagaccatcaacccagaagatgacacagatcctggccacgccgacctggtgctgtacatcaccaggtttgacctggagctgcctgatggcaaccggcaggtgcggggcgtgacccagctgggcggggcctgcagccccacctggagctgcctgatcacagaggacaccggctttgacctgggcgtgaccatcgcccacgagatcggccacagctttggcctggagcatgatggagcccctggcagcggctgcggccccagcggccacgtgatggccagtgatggagctgccccccgggccggcctggcctggagcccctgcagccggcggcagctgctgagcctgctgtctgctggccgggcccgctgtgtgtgggaccccccccggccccagcccggcagcgctggccaccccccagatgcccagcccggcctgtactacagcgccaatgagcagtgccgggtggccttcggccccaaggctgtggcctgcacctttgcccgggagcacctggacatgtgccaggccctgagctgccacacagaccccctggaccagagcagctgcagccggctgctggtgcccctgctggatggaacagaatgtggggtggagaagtggtgcagcaagggccgctgccgcagcctggtggagctgacccccatcgctgctgtgcacggccgctggagctcctggggccccaggagcccctgcagccgcagctgtggcggcggcgtggtgacccggcggcggcagtgcaacaaccccaggcctgccttcggcggccgggcctgtgtgggcgctgacctgcaggccgagatgtgcaacacccaggcctgtgagaagacccagctggagttcatgagccagcagtgtgccaggacagatggccagcccctgcggagcagccctgggggcgccagcttctaccactggggcgctgctgtgccccacagccagggagatgccctgtgccgccacatgtgccgggccatcggggagagcttcatcatgaagagaggagacagcttcctggatggcacccgctgcatgcccagcggccccagagaagatggcaccctgagcctgtgtgtgtctggcagctgcaggaccttcggctgtgatggccgcatggacagccagcaggtgtgggaccgctgccaggtgtgtggcggggacaacagcacctgcagccccaggaagggcagcttcaccgctggccgggcccgggagtatgtgaccttcctgactgtgacccccaacctgacctctgtgtacatcgccaaccaccggcccctcttcacccacctggccgtgagaattggaggccgctacgtggtggccggcaagatgagcatcagccccaacaccacctaccccagcctgctggaggatggccgggtggagtacagagtggccctgacagaggaccggctgccccggctggaggagatccgcatctggggccccctgcaggaggatgctgacatccaggtgtacagaagatatggagaggagtatggcaacctgaccaggccagacatcaccttcacctacttccagcccaagccccggcaggcctgggtgtgggccgctgtgcggggcccctgcagcgtgtcctgtggggccggcctgcgctgggtgaactacagctgcctggaccaggccaggaaggagctggtggagaccgtgcagtgccagggcagccagcagcccccagcctggccagaggcctgtgtgctggagccctgccccccctactgggccgtgggggactttggcccctgcagcgccagctgtggcggcggcctgcgggagaggcctgtgcgctgtgtggaggcccagggcagcctgctgaagaccctgcccccagcccgctgcagagctggggcccagcagcctgctgtggccctggagacctgcaacccccagccctgcccagcccgctgggaggtgtctgagcccagcagctgcaccagcgctggaggagctggcctggccctggagaatgagacctgtgtgcctggagcagatggcctggaggcccctgtgacagagggccctggctctgtggatgagaagctgcctgcccctgagccctgtgtgggcatgagctgccccccaggctggggccacctggatgccaccagcgctggggagaaggcccccagcccctggggcagcatcagaactggagcccaggccgcccacgtgtggaccccagctgctggcagctgcagcgtgtcctgtggccggggcctgatggagctgcgcttcctgtgcatggacagcgccctgcgggtgcctgtgcaggaggagctgtgtggcctggccagcaagccaggcagccggcgggaggtgtgccaggccgtgccctgcccagcccgctggcagtacaagctggccgcctgcagcgtgtcctgtggccggggcgtggtgcggcgcatcctgtactgtgcccgggcccatggagaagatgatggagaggagatcctgctggacacccagtgccagggcctgcccaggcctgagccccaggaggcctgcagcctggagccctgccccccacgctggaaggtgatgagcctgggcccctgcagcgccagctgtggcctgggcacagcccggcgctctgtggcctgtgtgcagctggaccagggccaggatgtggaggtggatgaagctgcctgtgccgccctggtgcggcctgaggcctctgtgccctgcctgattgctgactgcacctaccgctggcacgtgggcacctggatggagtgcagcgtgtcctgtggagatggcatccagaggagaagagacacctgcctgggcccccaggcccaggcccctgtgcctgctgacttctgccagcacctgcccaagcctgtgacagtgcggggctgctgggccggcccctgtgtgggccagggcgcctgtggccggcagcacctggagcccaccggcaccatcgacatgaggggccctggccaggccgactgtgctgtggccatcggccggcccctgggggaggtggtgaccctgcgggtgctggagagcagcctgaactgcagcgctggggacatgctgctgctgtggggccgcctgacctggaggaagatgtgcaggaagctgctggacatgaccttcagcagcaagaccaacaccctggtggtgcggcagagatgtggccggcctgggggcggcgtgctgctgcgctatggcagccagctggcccctgagaccttctaccgggagtgtgacatgcagctgtttggcccctggggcgagatcgtgagccccagcctgagccctgccaccagcaatgctgggggctgccgcctcttcatcaacgtggccccccacgccagaattgccatccacgccctggccaccaacatgggcgccggcacagagggcgccaatgccagctacatcctgatccgggacacccacagcctgcggaccacagccttccacggccagcaggtgctgtactgggagagcgagagcagccaggccgagatggagttcagcgagggcttcctgaaggcccaggccagcctgcggggccagtactggaccctgcagagctgggtgcctgagatgcaggacccccagagctggaagggcaaggagggcacctag

SEQ ID NO: 2925 - DNA, 4023 bp, synthetic construct
  misc_feature 1..4023: note = source = /note="Description of Artificial Sequence: Synthetic coding sequence"
  source 1..4023: mol_type = other DNA
atgcaccagaggcacccccgggcccgctgcccccccctgtgtgtggccggcatcctggcctgtggcttcctgctgggctgctggggccccagccacttccagcagagctgcctgcaggccctggagccccaggccgtgagcagctacctgagccctggggcccccctgaagggccggccccccagccctggcttccagaggcagaggcagaggcagaggagagctgctgggggcatcctgcacctggagctgctggtggccgtgggcccagatgtgttccaggcccaccaggaggacacagaaagatatgtgctgaccaacctgaacatcggggctgagctgctgcgggaccccagcctgggcgcccagttccgggtgcacctggtgaagatggtgatcctgacagagcctgagggcgcccccaacatcacagccaacctgaccagcagcctgctgtctgtgtgtggctggagccagaccatcaacccagaagatgacacagatcctggccacgccgacctggtgctgtacatcaccaggtttgacctggagctgcctgatggcaaccggcaggtgcggggcgtgacccagctgggcggggcctgcagccccacctggagctgcctgatcacagaggacaccggctttgacctgggcgtgaccatcgcccacgagatcggccacagctttggcctggagcatgatggagcccctggcagcggctgcggccccagcggccacgtgatggccagtgatggagctgccccccgggccggcctggcctggagcccctgcagccggcggcagctgctgagcctgctgagcgccaatgagcagtgccgggtggccttcggccccaaggctgtggcctgcacctttgcccgggagcacctggacatgtgccaggccctgagctgccacacagaccccctggaccagagcagctgcagccggctgctggtgcccctgctggatggaacagaatgtggggtggagaagtggtgcagcaagggccgctgccgcagcctggtggagctgacccccatcgctgctgtgcacggccgctggagctcctggggccccaggagcccctgcagccgcagctgtggcggcggcgtggtgacccggcggcggcagtgcaacaaccccaggcctgcctttggaggccgggcctgtgtgggcgctgacctgcaggccgagatgtgcaacacccaggcctgtgagaagacccagctggagttcatgagccagcagtgtgccaggacagatggccagcccctgcggagcagccctggaggagccagcttctaccactggggcgctgctgtgccccacagccagggagatgccctgtgccgccacatgtgccgggccatcggggagagcttcatcatgaagagaggagacagcttcctggatggcacccgctgcatgcccagcggcccccgggaggatggcaccctgagcctgtgtgtgtctggcagctgcaggaccttcggctgtgatggccgcatggacagccagcaggtgtgggaccgctgccaggtgtgtggcggggacaacagcacctgcagccccaggaagggcagcttcaccgctggccgggcccgggagtatgtgaccttcctgactgtgacccccaacctgacctctgtgtacatcgccaaccaccggcccctcttcacccacctggccgtgcgcatcggcggccgctacgtggtggccggcaagatgagcatcagccccaacaccacctaccccagcctgctggaggatggccgggtggagtacagagtggccctgacagaagatcggctgccccggctggaggagatccgcatctggggccccctgcaggaggatgctgacatccaggtgtaccgccgctacggggaggagtatggcaacctgaccaggccagacatcaccttcacctacttccagcccaagccccggcaggcctgggtgtgggccgctgtgcggggcccctgcagcgtgtcctgtggggccggcctgcgctgggtgaactacagctgcctggaccaggccaggaaggagctggtggagaccgtgcagtgccagggcagccagcagcccccagcctggccagaggcctgtgtgctggagccctgccccccctactgggccgtgggggactttggcccctgcagcgccagctgtggcggcggcctgcgggagaggcctgtgcgctgtgtggaggcccagggcagcctgctgaagaccctgcccccagcccgctgccgggccggggcccagcagcctgctgtggccctggagacctgcaacccccagccctgcccagcccgctgggaggtgtctgagcccagcagctgcaccagcgctgggggcgccggcctggccctggagaatgagacctgtgtgcctggagcagatggcctggaggcccctgtgacagagggccctggctctgtggatgagaagctgcctgcccctgagccctgtgtgggcatgagctgccccccaggctggggccacctggatgccaccagcgctggggagaaggcccccagcccctggggcagcatcagaactggagcccaggccgcccacgtgtggaccccagctgctggcagctgcagcgtgtcctgtggccggggcctgatggagctgcgcttcctgtgcatggattctgccctgcgggtgcctgtgcaggaggagctgtgtggcctggccagcaagccaggcagcagaagagaggtgtgccaggccgtgccctgcccagcccgctggcagtacaagctggccgcctgcagcgtgtcctgtggccggggcgtggtgcggcgcatcctgtactgtgcccgggcccacggggaggatgatggagaggagatcctgctggacacccagtgccagggcctgcccaggcctgagccccaggaggcctgcagcctggagccctgccccccacgctggaaggtgatgagcctgggcccctgcagcgccagctgtggcctgggcacagccaggagatctgtggcctgtgtgcagctggaccagggccaggatgtggaggtggatgaggccgcctgtgccgccctggtgcggcctgaggcctctgtgccctgcctgattgctgactgcacctaccgctggcacgtgggcacctggatggagtgcagcgtgtcctgtggagatggcatccagaggcggcgggacacctgcctgggcccccaggcccaggcccctgtgcctgctgacttctgccagcacctgcccaagcctgtgacagtgcggggctgctgggccggcccctgtgtgggccagggcgcctgtggccggcagcacctggagcccaccggcaccatcgacatgaggggccctggccaggccgactgtgctgtggccatcggccggcccctgggggaggtggtgaccctgcgggtgctggagagcagcctgaactgcagcgctggggacatgctgctgctgtggggccgcctgacctggaggaagatgtgcaggaagctgctggacatgaccttcagcagcaagaccaacaccctggtggtgcggcagagatgtggccggcctgggggcggcgtgctgctgcgctatggcagccagctggcccctgagaccttctacagagaatgtgacatgcagctgtttggcccctggggcgagatcgtgagccccagcctgagccctgccaccagcaatgccggcggctgccgcctcttcatcaacgtggcccctcatgcccgcatcgccatccacgccctggccaccaacatgggcgccggcacagaaggagccaatgccagctacatcctgatccgggacacccacagcctgcggaccacagccttccacggccagcaggtgctgtactgggagagcgagagcagccaggccgagatggagttcagcgagggcttcctgaaggcccaggccagcctgcggggccagtactggaccctgcagagctgggtgcctgagatgcaggacccccagagctggaagggcaaggagggcacctag

SEQ ID NO: 2926 - DNA, 672 bp, synthetic construct
  misc_feature 1..672: note = source = /note="Description of Artificial Sequence: Synthetic coding sequence"
  source 1..672: mol_type = other DNA
atgaggggccctggccaggccgactgtgctgtggccatcggccggcccctgggggaggtggtgaccctgcgggtgctggagagcagcctgaactgcagcgctggggacatgctgctgctgtggggccgcctgacctggaggaagatgtgcaggaagctgctggacatgaccttcagcagcaagaccaacaccctggtggtgcggcagagatgtggccggcctgggggcggcgtgctgctgcgctatggcagccagctggcccctgagaccttctaccgggagtgtgacatgcagctgtttggcccctggggcgagatcgtgagccccagcctgagccctgccaccagcaatgctgggggctgccgcctcttcatcaacgtggccccccacgccagaattgccatccacgccctggccaccaacatgggcgccggcacagagggcgccaatgccagctacatcctgatccgggacacccacagcctgcggaccacagccttccacggccagcaggtgctgtactgggagagcgagagcagccaggccgagatggagttcagcgagggcttcctgaaggcccaggccagcctgcggggccagtactggaccctgcagagctgggtgcctgagatgcaggacccccagagctggaagggcaaggagggcacctag

SEQ ID NO: 2927 - DNA, 1035 bp, synthetic construct
  misc_feature 1..1035: note = source = /note="Description of Artificial Sequence: Synthetic coding sequence"
  source 1..1035: mol_type = other DNA
atgcaccagaggcacccccgggcccgctgcccccccctgtgtgtggccggcatcctggcctgtggcttcctgctgggctgctggggccccagccacttccagcagagctgcctgcaggccctggagccccaggccgtgagcagctacctgagccctggggcccccctgaagggccggccccccagccctggcttccagaggcagaggcagaggcagaggagagctgctgggggcatcctgcacctggagctgctggtggccgtgggcccagatgtgttccaggcccaccaggaggacacagaaagatatgtgctgaccaacctgaacatcggggctgagctgctgcgggaccccagcctgggcgcccagttccgggtgcacctggtgaagatggtgatcctgacagagcctgagggcgcccccaacatcacagccaacctgaccagcagcctgctgtctgtgtgtggctggagccagaccatcaacccagaagatgacacagatcctggccacgccgacctggtgctgtacatcaccaggtttgacctggagctgcctgatggcaaccggcaggtgcggggcgtgacccagctgggcggggcctgcagccccacctggagctgcctgatcacagaggacaccggctttgacctgggcgtgaccatcgcccacgagatcggccacagctttggcctggagcatgatggagcccctggcagcggctgcggccccagcggccacgtgatggccagtgatggagctgccccccgggccggcctggcctggagcccctgcagccggcggcagctgctgagcctgctgcggcctgtgccccccagccccctgcccctgctggccacccacctgtgtgccggccgcagcctgagcctgggccccagccaggagcccgcccctgggggcggccggggccccaggacccctgtgcccacccacaagaggccccgcttccagaccctgcccagcagctgccccctgctgcggcctgccagcagccgctgcaccccccgggactag

SEQ ID NO: 2928 - DNA, 831 bp, synthetic construct
  misc_feature 1..831: note = source = /note="Description of Artificial Sequence: Synthetic coding sequence"
  source 1..831: mol_type = other DNA
atgcaccagaggcacccccgggcccgctgcccccccctgtgtgtggccggcatcctggcctgtggcttcctgctgggctgctggggccccagccacttccagcagagctgcctgcaggccctggagccccaggccgtgagcagctacctgagccctggggcccccctgaagggccggccccccagccctggcttccagaggcagaggcagaggcagaggagagctgctgggggcatcctgcacctggagctgctggtggccgtgggcccagatgtgttccaggcccaccaggaggacacagaaagatatgtgctgaccaacctgaacatcggggctgagctgctgcgggaccccagcctgggcgcccagttccgggtgcacctggtgaagatggtgatcctgacagagcctgagggcgcccccaacatcacagccaacctgaccagcagcctgctgtctgtgtgtggctggagccagaccatcaacccagaagatgacacagatcctggccacgccgacctggtgctgtacatcaccaggtttgacctggagctgcctgatggcaaccggcaggtgcggggcgtgacccagctgggcggggcctgcagccccacctggagctgcctgatcacagaggacaccggctttgacctgggcgtgaccatcgcccacgagatcggccaccgcatctgtgcccggcccagccctgccacccagacccgctggaccaaggctgctgctgctgccagcagcttcctgtcctggatgggccagaatgtggcctggaggtctggggccccccgggtggccgccgccccctggtggagctag

SEQ ID NO: 2929 - DNA, 4284 bp, synthetic construct; identical to SEQ ID NO: 2917
  misc_feature 1..4284: note = source = /note="Description of Artificial Sequence: Synthetic coding sequence"
  source 1..4284: mol_type = other DNA

SEQ ID NO: 2930 - DNA, 1095 bp, synthetic construct
  misc_feature 1..1095: note = source = /note="Description of Artificial Sequence: Synthetic coding sequence"
  source 1..1095: mol_type = other DNA
atggacatgtgccaggccctgagctgccacacagaccccctggaccagagcagctgcagccggctgctggtgcccctgctggatggaacagaatgtggggtggagaagtggtgcagcaagggccgctgccgcagcctggtggagctgacccccatcgctgctgtgcacggccgctggagctcctggggccccaggagcccctgcagccgcagctgtggcggcggcgtggtgacccggcggcggcagtgcaacaaccccaggcctgccttcggcggccgggcctgtgtgggcgctgacctgcaggccgagatgtgcaacacccaggcctgtgagaagacccagctggagttcatgagccagcagtgtgccaggacagatggccagcccctgcggagcagccctgggggcgccagcttctaccactggggcgctgctgtgccccacagccagggagatgccctgtgccgccacatgtgccgggccatcggggagagcttcatcatgaagagaggagacagcttcctggatggcacccgctgcatgcccagcggccccagagaagatggcaccctgagcctgtgtgtgtctggcagctgcaggaccttcggctgtgatggccgcatggacagccagcaggtgtgggaccgctgccaggtgtgtggcggggacaacagcacctgcagccccaggaagggcagcttcaccgctggccgggcccgggagtatgtgaccttcctgactgtgacccccaacctgacctctgtgtacatcgccaaccaccggcccctcttcacccacctggccgtgagaattggaggccgctacgtggtggccggcaagatgagcatcagccccaacaccacctaccccagcctgctggaggatggccgggtggagtacagagtggccctgacagaggaccggctgccccggctggaggagatccgcatctggggccccctgcaggaggatgctgacatccaggtgggcggcgtgcgggcccagctgatgcacatctcctggtggagcaggcctggcctgggggagcgggacctgtgtgcccggggccgctggccaggcggcagcagtgactag

SEQ ID NO: 2931 - DNA, 1095 bp, synthetic construct
  misc_feature 1..1095: note = source = /note="Description of Artificial Sequence: Synthetic coding sequence"
  source 1..1095: mol_type = other DNA
atgccctaccagtacccagccctgaccccagagcagaagaaggagctgagtgacatcgcccacagaattgtggcccctgggaagggcatcctggccgcagatgagagcacaggcagcatcgccaagaggctgcagagcattggaacagagaacacagaggagaacagacgcttctaccggcagctgctgctgacagcagatgacagagtgaacccctgcatcggcggcgtcatcctcttccacgagaccctgtaccagaaggcagatgatggccggcccttcccccaggtgatcaagagcaaaggaggagtggtgggcatcaaggtggacaagggcgtggtgcccctggccggcaccaacggggagaccaccacccagggcctggatggcctgtctgagcgctgtgcccagtacaagaaggatggagctgactttgccaagtggaggtgtgtgctgaagatcggggagcacacccccagcgccctggccatcatggagaatgccaacgtgctggcccgctatgccagcatctgccagcagaatggaattgtgcccatcgtggagcctgagatcctgcctgatggagaccatgacctgaagcgctgccagtatgtgacagagaaggtgctggccgctgtgtacaaggccctgagtgaccaccacatctacctggagggcaccctgctgaagcccaacatggtgaccccaggccacgcctgcacccagaagttcagccatgaggagatcgccatggccaccgtgacagccctgcggaggacagtgcccccagctgtgacaggcatcaccttcctgagcggcggccagagcgaggaggaggccagcatcaacctgaatgccatcaacaagtgccccctgctgaagccctgggccctgaccttctcctatggccgggccctgcaggccagcgccctgaaggcctggggcggcaagaaggagaacctgaaggccgcccaggaggagtatgtgaagagggccctggccaacagcctggcctgccagggcaagtacacccccagcggccaggccggggccgccgccagcgagagcctgtttgtgagcaaccacgcctactag

SEQ ID NO: 2932 - DNA, 1095 bp, synthetic construct; identical to SEQ ID NO: 2931
  misc_feature 1..1095: note = source = /note="Description of Artificial Sequence: Synthetic coding sequence"
  source 1..1095: mol_type = other DNA

SEQ ID NO: 2933 - DNA, 1257 bp, synthetic construct
  misc_feature 1..1257: note = source = /note="Description of Artificial Sequence: Synthetic coding sequence"
  source 1..1257: mol_type = other DNA
atggcccggaggaagccagagggcagcagcttcaacatgacccacctgtccatggccatggccttctccttcccccctgtggccagcggccagctgcacccccagctgggcaacacccagcaccagacagagctgggcaaggagctggccaccaccagcaccatgccctaccagtacccagccctgaccccagagcagaagaaggagctgagtgacatcgcccacagaattgtggcccctgggaagggcatcctggccgcagatgagagcacaggcagcatcgccaagaggctgcagagcattggaacagagaacacagaggagaacagacgcttctaccggcagctgctgctgacagcagatgacagagtgaacccctgcatcggcggcgtcatcctcttccacgagaccctgtaccagaaggcagatgatggccggcccttcccccaggtgatcaagagcaaaggaggagtggtgggcatcaaggtggacaagggcgtggtgcccctggccggcaccaacggggagaccaccacccagggcctggatggcctgtctgagcgctgtgcccagtacaagaaggatggagctgactttgccaagtggaggtgtgtgctgaagatcggggagcacacccccagcgccctggccatcatggagaatgccaacgtgctggcccgctatgccagcatctgccagcagaatggaattgtgcccatcgtggagcctgagatcctgcctgatggagaccatgacctgaagcgctgccagtatgtgacagagaaggtgctggccgctgtgtacaaggccctgagtgaccaccacatctacctggagggcaccctgctgaagcccaacatggtgaccccaggccacgcctgcacccagaagttcagccatgaggagatcgccatggccaccgtgacagccctgcggaggacagtgcccccagctgtgacaggcatcaccttcctgagcggcggccagagcgaggaggaggccagcatcaacctgaatgccatcaacaagtgccccctgctgaagccctgggccctgaccttctcctatggccgggccctgcaggccagcgccctgaaggcctggggcggcaagaaggagaacctgaaggccgcccaggaggagtatgtgaagagggccctggccaacagcctggcctgccagggcaagtacacccccagcggccaggccggggccgccgccagcgagagcctgtttgtgagcaaccacgcctactag

SEQ ID NO: 2934 - DNA, 1095 bp, synthetic construct; identical to SEQ ID NO: 2931
  misc_feature 1..1095: note = source = /note="Description of Artificial Sequence: Synthetic coding sequence"
  source 1..1095: mol_type = other DNA

SEQ ID NO: 2935 - DNA, 1095 bp, synthetic construct; identical to SEQ ID NO: 2931
  misc_feature 1..1095: note = source = /note="Description of Artificial Sequence: Synthetic coding sequence"
  source 1..1095: mol_type = other DNA

SEQ ID NO: 2936 - DNA, 1257 bp, synthetic construct; identical to SEQ ID NO: 2933
  misc_feature 1..1257: note = source = /note="Description of Artificial Sequence: Synthetic coding sequence"
  source 1..1257: mol_type = other DNA

SEQ ID NO: 2937 - DNA, 1095 bp, synthetic construct; identical to SEQ ID NO: 2931
  misc_feature 1..1095: note = source = /note="Description of Artificial Sequence: Synthetic coding sequence"
  source 1..1095: mol_type = other DNA

SEQ ID NO: 2938 - DNA, 1344 bp, synthetic construct
  misc_feature 1..1344: note = source = /note="Description of Artificial Sequence: Synthetic coding sequence"
  source 1..1344: mol_type = other DNA
atgtctgccagcaagatccccctcttcaagatgaaggacctgatcctgatcctgtgcctgctggagatgagctttgctgtgcccttcttcccccagcagagcggcaccccaggcatggccagcctgagcctggagaccatgaggcagctgggcagcctgcagaggctgaacaccctgagccagtacagccgctatggctttgggaagagcttcaacagcctgtggatgcacggcctgctgcccccccacagcagcctgccctggatgaggccccgggagcacgagacccagcagtatgagtacagcctgcctgtgcaccccccacccctgcccagccagcccagcctgaagccccagcagcccggcctgaagcccttcctgcagagcgctgctgccaccaccaaccaggccacagccctgaaggaggccctgcagccccccatccacctgggccacctgcccctgcaggagggggagctgcccctggtgcagcagcaggtggcccccagcgacaagccacccaagccagagctgcccggggtggactttgctgacccccagggccccagcctgcccggcatggacttcccagacccccagggccccagcctgcccggcctggactttgctgacccccagggcagcaccatcttccagatcgcccggctcatcagccacggccccatgccccagaacaagcagagccccctgtacccaggcatgctgtatgtgccctttggagccaaccagctgaatgccccagcccggctgggcatcatgagcagcgaggaggtggccggcggccgggaggaccccatggcctatggagccatgtttcctggctttggaggcatgaggcctggctttgagggcatgccccacaacccagccatgggcggggacttcaccctggagtttgacagccctgtggccgccaccaagggcccagaaaatgaggagggcggggcccagggcagccccatgcctgaggccaacccagacaacctggagaacccagccttcctgacagagctggagcccgcccctcatgctggcctgctggccctgcccaaggatgacatccctggcctgcccaggagccccagcggcaagatgaagggcctgcccagcgtgaccccagctgctgctgaccccctgatgaccccagagctggctgatgtgtaccgcacctatgatgctgacatgaccacctctgtggacttccaggaggaggccaccatggacaccaccatggcccccaacagcctgcagacctccatgcctggcaacaaggcccaggagcctgagatgatgcatgatgcctggcacttccaggagccctag

SEQ ID NO: 2939 - DNA, 1299 bp, synthetic construct
  misc_feature 1..1299: note = source = /note="Description of Artificial Sequence: Synthetic coding sequence"
  source 1..1299: mol_type = other DNA
atgtctgccagcaagatccccctcttcaagatgaaggacctgatcctgatcctgtgcctgctggagatgagctttgctgtgcccttcttcccccagcagagcggcaccccaggcatggccagcctgagcctggagaccatgaggcagctgggcagcctgcagaggctgaacaccctgagccagtacagccgctatggctttgggaagagcttcaacagcctgtggatgcacggcctgctgcccccccacagcagcctgccctggatgaggccccgggagcacgagacccagcagcccagcctgaagccccagcagcccggcctgaagcccttcctgcagagcgctgctgccaccaccaaccaggccacagccctgaaggaggccctgcagccccccatccacctgggccacctgcccctgcaggagggggagctgcccctggtgcagcagcaggtggcccccagcgacaagccacccaagccagagctgcccggggtggactttgctgacccccagggccccagcctgcccggcatggacttcccagacccccagggccccagcctgcccggcctggactttgctgacccccagggcagcaccatcttccagatcgcccggctcatcagccacggccccatgccccagaacaagcagagccccctgtacccaggcatgctgtatgtgccctttggagccaaccagctgaatgccccagcccggctgggcatcatgagcagcgaggaggtggccggcggccgggaggaccccatggcctacggggccatgtttcctggctttggaggcatgaggcctggctttgagggcatgccccacaacccagccatgggcggggacttcaccctggagtttgacagccctgtggccgccaccaagggcccagaaaatgaggagggcggggcccagggcagccccatgcctgaggccaacccagacaacctggagaacccagccttcctgacagagctggagcccgcccctcatgctggcctgctggccctgcccaaggatgacatccctggcctgcccaggagccccagcggcaagatgaagggcctgcccagcgtgaccccagctgctgctgaccccctgatgaccccagagctggctgatgtgtaccgcacctatgatgctgacatgaccacctctgtggacttccaggaggaggccaccatggacaccaccatggcccccaacagcctgcagacctccatgcctggcaacaaggcccaggagcctgagatgatgcatgatgcctggcacttccaggagccctag

SEQ ID NO: 2940 - DNA, 1341 bp, synthetic construct
  misc_feature 1..1341: note = source = /note="Description of Artificial Sequence: Synthetic coding sequence"
  source 1..1341: mol_type = other DNA
atgtctgccagcaagatccccctcttcaagatgaaggacctgatcctgatcctgtgcctgctggagatgagctttgctgtgcccttcttcccccagcagagcggcaccccaggcatggccagcctgagcctggagaccatgaggcagctgggcagcctgcagaggctgaacaccctgagccagtacagccgctatggctttgggaagagcttcaacagcctgtggatgcacggcctgctgcccccccacagcagcctgccctggatgaggccccgggagcacgagacccagcagtatgagtacagcctgcctgtgcaccccccacccctgcccagccagcccagcctgaagccccagcagcccggcctgaagcccttcctgcagagcgctgctgccaccaccaaccaggccacagccctgaaggaggccctgcagccccccatccacctgggccacctgcccctgcaggagggggagctgcccctggtgcagcagcaggtggcccccagcgacaagccacccaagccagagctgcgggtggactttgctgacccccagggccccagcctgcccggcatggacttcccagacccccagggccccagcctgcccggcctggactttgctgacccccagggcagcaccatcttccagatcgcccggctcatcagccacggccccatgccccagaacaagcagagccccctgtacccaggcatgctgtatgtgccctttggagccaaccagctgaatgccccagcccggctgggcatcatgagcagcgaggaggtggccggcggccgggaggaccccatggcctacggggccatgtttcctggctttggaggcatgaggcctggctttgagggcatgccccacaacccagccatgggcggggacttcaccctggagtttgacagccctgtggccgccaccaagggcccagaaaatgaggagggcggggcccagggcagccccatgcctgaggccaacccagacaacctggagaacccagccttcctgacagagctggagcccgcccctcatgctggcctgctggccctgcccaaggatgacatccctggcctgcccaggagccccagcggcaagatgaagggcctgcccagcgtgaccccagctgctgctgaccccctgatgaccccagagctggctgatgtgtaccgcacctatgatgctgacatgaccacctctgtggacttccaggaggaggccaccatggacaccaccatggcccccaacagcctgcagacctccatgcctggcaacaaggcccaggagcctgagatgatgcatgatgcctggcacttccaggagccctag

SEQ ID NO: 2941 - DNA, 528 bp, synthetic construct
  misc_feature 1..528: note = source = /note="Description of Artificial Sequence: Synthetic coding sequence"
  source 1..528: mol_type = other DNA
atgggcacctggatcctgtttgcctgcctgctgggcgccgcctttgccatgcctgtgctgacccccctgaagtggtaccagagcatccggcccccctaccccagctatggctatgagcccatgggcggctggctgcaccaccagatcatccctgtgctgagccagcagcacccccccacccacaccctgcagccccaccaccacatccctgtggtgcctgcccagcagcctgtgatcccccagcagcccatgatgcctgtgcccggccagcacagcatgacccccatccagcaccaccagcccaacctgcccccaccagcccagcagccctaccagccccagcctgtgcagccccagccccaccagcccatgcagccccagccccctgtgcaccccatgcagcccctgcccccccagccccccctgccccccatgttccccatgcagcccctgccccccatgctgcctgacctgaccctggaggcctggcccagcacagacaagaccaagcgggaggaggtggactag

SEQ ID NO: 2942 - DNA, 618 bp, synthetic construct
  misc_feature 1..618: note = source = /note="Description of Artificial Sequence: Synthetic coding sequence"
  source 1..618: mol_type = other DNA
atgggcacctggatcctgtttgcctgcctgctgggcgccgcctttgccatgcccctgcccccccaccctggccaccctggctacatcaacttctcctatgagaacagccacagccaggccatcaacgtggacagaacagccctggtgctgacccccctgaagtggtaccagagcatccggcccccctaccccagctatggctatgagcccatgggcggctggctgcaccaccagatcatccctgtgctgagccagcagcacccccccacccacaccctgcagccccaccaccacatccctgtggtgcctgcccagcagcctgtgatcccccagcagcccatgatgcctgtgcccggccagcacagcatgacccccatccagcaccaccagcccaacctgcccccaccagcccagcagccctaccagccccagcctgtgcagccccagccccaccagcccatgcagccccagccccctgtgcaccccatgcagcccctgcccccccagccccccctgccccccatgttccccatgcagcccctgccccccatgctgcctgacctgaccctggaggcctggcccagcacagacaagaccaagcgggaggaggtggactag

SEQ ID NO: 2943 - DNA, 576 bp, synthetic construct
  misc_feature 1..576: note = source = /note="Description of Artificial Sequence: Synthetic coding sequence"
  source 1..576: mol_type = other DNA
atgggcacctggatcctgtttgcctgcctgctgggcgccgcctttgccatgcccctgcccccccaccctggccaccctggctacatcaacttctcctatgaggtgctgacccccctgaagtggtaccagagcatccggcccccctaccccagctatggctatgagcccatgggcggctggctgcaccaccagatcatccctgtgctgagccagcagcacccccccacccacaccctgcagccccaccaccacatccctgtggtgcctgcccagcagcctgtgatcccccagcagcccatgatgcctgtgcccggccagcacagcatgacccccatccagcaccaccagcccaacctgcccccaccagcccagcagccctaccagccccagcctgtgcagccccagccccaccagcccatgcagccccagccccctgtgcaccccatgcagcccctgcccccccagccccccctgccccccatgttccccatgcagcccctgccccccatgctgcctgacctgaccctggaggcctggcccagcacagacaagaccaagcgggaggaggtggactag

SEQ ID NO: 2944 - DNA, 4023 bp, synthetic construct
  misc_feature 1..4023: note = source = /note="Description of Artificial Sequence: Synthetic coding sequence"
  source 1..4023: mol_type = other DNA
atgttccgggtgggcttcctgatcatcagcagcagcagcagcctgagccccctgctgctggtgtctgtggtgcgggtgaacaccaccaactgccacaagtgcctgctgagcggcacctacatctttgctgtgctgctggtgtgtgtggtgttccacagcggggcccaggagaagaactacaccatccgggaggagatcccagaaaatgtgctgattggcaacctgctgaaggacctgaacctgagcctcatccccaacaagagcctgaccaccaccatgcagttcaagctggtgtacaagacaggagatgtgcccctcatcagaattgaagaagatactggagagatcttcaccactggagccagaattgaccgggagaagctgtgtgccggcatccccagagatgagcactgcttctatgaggtggaggtggccatcctgcctgatgagatcttccggctggtgaagatccgcttcctgattgaggacatcaatgacaatgcccccctcttccctgccaccgtcatcaacatcagcatccctgagaacagcgccatcaacagcaagtacaccctgcctgctgctgtggaccctgatgtgggcatcaatggagtgcagaactatgagctgatcaagagccagaacatcttcggcctggatgtgattgagaccccagagggggacaagatgccccagctgattgtgcagaaggagctggaccgggaggagaaggacacctacgtgatgaaggtgaaggtggaggatggcggcttcccccagaggagcagcacagccatcctgcaggtgtctgtgacagacaccaatgacaaccaccctgtgttcaaggagacagaaattgaggtgtccatcccagaaaatgcccctgtgggcacctctgtgacccagctgcacgccacagatgctgacatcggggagaatgccaagatccacttctccttcagcaacctggtgagcaacatcgcccggcggctcttccacctgaatgccaccaccggcctcatcaccatcaaggagcccctggaccgggaggagacccccaaccacaagctgctggtgctggccagtgatggcggcctgatgcctgcccgggccatggtgctggtgaatgtgacagatgtgaatgacaacgtgcccagcattgacatccgctacatcgtgaaccctgtgaatgacacagtggtgctgtctgagaacatccccctgaacaccaagatcgccctgatcaccgtgacagacaaggatgctgaccacaacggccgggtgacctgcttcacagaccacgagatccccttccggctgcggcctgtgttcagcaaccagttcctgctggagaatgctgcctacctggactatgagagcaccaaggagtatgccatcaagctgctggccgcagatgctgggaagccacccctgaaccagagcgccatgctgttcatcaaggtgaaggatgaaaatgacaatgcccctgtgttcacccagagctttgtgacagtgtccatccctgagaacaacagccctggcatccagctgatgaaggtgtctgccacagatgctgacagcggccccaatgctgagatcaactacctgctgggcccagatgcccctcctgagttcagcctggacagaagaacaggcatgctgactgtggtgaagaagctggaccgggagaaggaggacaagtacctgttcaccatcctggccaaggacaatggagtgccccccctgaccagcaatgtgacagtgtttgtgtccatcatcgaccagaatgacaacagccctgtgttcacccacaatgagtacaagttctacgtgcctgagaacctgcccaggcatggcaccgtgggcctcatcaccgtgacagatcctgactatggagacaacagcgctgtgaccctgagcatcctggatgaaaatgatgacttcaccatcgacagccagacaggagtcatccggcccaacatcagctttgaccgggagaagcaggagagctacaccttctacgtgaaggccgaggatggcggccgggtgagccgcagcagcagcgccaaggtgaccatcaacgtggtggatgtgaatgacaacaagcctgtgttcatcgtgcccccctacaactacagctatgagctggtgctgcccagcaccaaccctggcaccgtggtgttccaggtgattgctgtggacaatgacaccggcatgaatgctgaggtgcgctacagcatcgtgggcggcaacacccgggacctgtttgccatcgaccaggagaccggcaacatcaccctgatggagaagtgtgatgtgacagacctgggcctgcaccgggtgctggtgaaggccaatgacctgggccagcctgacagcctcttctctgtggtgattgtgaacctgtttgtgaatgaatctgtgaccaatgccaccctcatcaatgagctggtgaggaagagcattgaggcccctgtgacccccaacacagaaattgctgatgtgagcagccccaccagtgactatgtgaagatcctggtggccgctgtggccggcaccatcaccgtggtggtggtgatcttcatcacagctgtggtgcgctgccggcaggccccccacctgaaggccgcccagaagaacatgcagaacagcgagtgggccacccccaaccctgagaaccggcagatgatcatgatgaagaagaagaagaagaagaagaagcacagccccaagaacctgctgctgaatgtggtgaccatcgaggagaccaaggcagatgatgtggacagtgatggcaacagagtgaccctggacctgcccatcgacctggaggagcagaccatgggcaagtacaactgggtgaccacccccaccaccttcaagccagacagcccagacctggcccggcactacaagagcgccagcccccagcctgccttccagatccagcctgagacccccctgaacctgaagcaccacatcatccaggagctgcccctggacaacacctttgtggcctgtgacagcatcagcaactgcagcagcagcagcagtgacccctacagcgtgtctgactgtggctaccctgtgaccacctttgaggtgcctgtgtctgtgcacacccggcccagccagaggagagtgaccttccacctgcctgagggcagccaggagagcagcagtgatggcggcctgggggaccatgatgctggcagcctgaccagcaccagccacggcctgcccctgggctacccccaggaggagtactttgaccgggccacccccagcaacagaacagaaggagatggcaacagcgaccctgagagcaacttcatcagcggcatgagggagaagatcaccgtgcagcccaccgtggaggaggccagtgacaactgcacccaggagtgcctgatctacggccacagtgatgcctgctggatgcctgccagcctggaccacagcagcagcagccaggcccaggccagcgccctgtgccacagcccccccctgagccaggccagcacccagcaccacagcccccctgtgacccagaccatcgtgctgtgccacagcccccctgtgacccagaccatcgccctgtgccacagccccccacccatccaggtgtctgccctgcaccacagcccccccctggtgcagggcacagccctgcaccacagcccccccagcgcccaggccagcgccctgtgctacagcccccccctggcccaggccgccgccatcagccacagcagcagcctgccccaggtgattgccctgcacaggagccaggcccagagctctgtgtccctgcagcagggctgggtgcagggcgccaacggcctgtgcagcgtggaccagggcgtgcagggcagcgccaccagccagttctacaccatgtctgagcggctgcaccccagtgatgacagcatcaaggtgatccccctgaccacctttgccccccggcagcaggcccggcccagcagaggagacagccccatcatggagacccaccccctgtag

SEQ ID NO: 2945 - DNA, 621 bp, synthetic construct
  misc_feature 1..621: note = source = /note="Description of Artificial Sequence: Synthetic coding sequence"
  source 1..621: mol_type = other DNA
atgggcacctggatcctgtttgcctgcctggtgggcgccgcctttgccatgcccctgcccccccaccctggccaccctggctacatcaacttctcctatgagaacagccacagccaggccatcaacgtggaccgcatcgccctggtgctgacccccctgaagtggtaccagagcatgatccggcccccctacagcagctatggctatgagcccatgggcggctggctgcaccaccagatcatccctgtggtgtcccagcagcaccccctgacccacaccctgcagagccaccaccacatccctgtggtgcctgcccagcagccccgggtgcggcagcaggccctgatgcctgtgcccggccagcagagcatgacccccacccagcaccaccagcccaacctgcccctgcctgcccagcagcccttccagccccagcctgtgcagccccagccccaccagcccatgcagccccagccccctgtgcagcccatgcagcccctgctgccccagccccccctgccccccatgttccccctgcggcccctgccccccatcctgcctgacctgcacctggaggcctggccagccacagacaagaccaagcaggaggaggtggactag

SEQ ID NO: 2946 - DNA, 618 bp, synthetic construct
  misc_feature 1..618: note = source = /note="Description of Artificial Sequence: Synthetic coding sequence"
  source 1..618: mol_type = other DNA
atgggcacctggatcctgtttgcctgcctggtgggcgccgcctttgccatgcccctgcccccccaccctggccaccctggctacatcaacttctcctatgagaacagccacagccaggccatcaacgtggaccgcatcgccctggtgctgacccccctgaagtggtaccagagcatgatccggcccccctacagcagctatggctatgagcccatgggcggctggctgcaccaccagatcatccctgtggtgtcccagcagcaccccctgacccacaccctgcagagccaccaccacatccctgtggtgcctgcccagcagccccgggtgcggcagcaggccctgatgcctgtgcccggccagcagagcatgacccccacccagcaccaccagcccaacctgcccctgcctgcccagcagcccttccagccccagcctgtgcagccccagccccaccagcccatgcagccccagccccctgtgcagcccatgcagcccctgctgccccagccccccctgccccccatgttccccctgcggcccctgccccccatcctgcctgacctgcacctggaggcctggccagccacagacaagaccaagcaggaggaggtgtag

SEQ ID NO: 2947 - DNA, 4599 bp, synthetic construct
  misc_feature 1..4599: note = source = /note="Description of Artificial Sequence: Synthetic coding sequence"
  source 1..4599: mol_type = other DNA
atgggccacagcaagcagatccgcatcctgctgctgaatgagatggagaagctggagaagaccctcttccggctggagcagggctatgagctgcagttccggctgggccccaccctgcagggcaaggctgtgacagtgtacaccaactaccccttccctggagagaccttcaaccgggagaagttccgcagcctggactgggagaaccccacagagcgggaggatgacagcgacaagtactgcaagctgaacctgcagcagagcggcagcttccagtactacttcctgcagggcaatgagaagagcggcggcggctacatcgtggtggaccccatcctgcgggtgggcgctgacaaccacgtgctgcccctggactgtgtgaccctgcagaccttcctggccaagtgcctgggcccctttgatgagtgggagagccggctgcgggtggccaaggagagcggctacaacatgatccacttcacccccctgcagaccctgggcctgagccgcagctgctacagcctggccaaccagctggagctgaacccagacttcagccggcccaacaggaagtacacctggaatgatgtgggccagctggtggagaagctgaagaaggagtggaatgtcatctgcatcacagatgtggtgtacaaccacacagctgccaacagcaagtggatccaggagcacccagaatgtgcctacaacctggtgaacagcccccacctgaagccagcctgggtgctggaccgggccctgtggaggttcagctgtgatgtggccgagggcaagtacaaggagaagggcatcccagccctgattgaaaatgaccaccacatgaacagcatcaggaagatcatctgggaggacatcttccccaagctgaagctgtgggagttcttccaggtggatgtgaacaaggctgtggagcagttccggcggctgctgacccaggagaacagaagagtgaccaagagtgaccccaaccagcacctgaccatcatccaggaccctgagtaccgccgcttcggctgcaccgtggacatgaacatcgccctgaccaccttcatcccccatgacaagggccctgctgccatcgaggagtgctgcaactggttccacaagaggatggaggagctgaacagcgagaagcacaggctcatcaactaccaccaggagcaggccgtgaactgcctgctgggcaatgtgttctatgaaaggctggccggccacggccccaagctgggccctgtgaccaggaagcaccccctggtgacccgctacttcaccttcccctttgaggagattgacttctccatggaggagagcatgatccacctgcccaacaaggcctgcttcctgatggcccacaacggctgggtgatgggagatgaccccctgaggaactttgctgagcccggcagcgaggtgtacctgcggcgggagctgatctgctggggagacagcgtgaagctgcgctatggcaacaagccagaggactgcccctacctgtgggcccacatgaagaagtacacagagatcacagccacctacttccagggcgtgcggctggacaactgccacagcacccccctgcacgtggccgagtacatgctggatgctgccaggaacctgcagcccaacctgtatgtggtggccgagctgttcaccggcagcgaggacctggacaacgtgtttgtgacccggctgggcatcagcagcctcatccgggaggccatgtctgcctacaacagccatgaggagggccgcctggtgtaccgctatggaggagagcctgtgggcagctttgtgcagccctgcctgcggcccctgatgcctgccatcgcccacgccctcttcatggacatcacccatgacaatgaatgtcccatcgtgcacaggtctgcctatgatgccctgcccagcaccaccatcgtgtccatggcctgctgtgccagcggcagcacccggggctatgatgagctggtgccccaccagatctctgtggtgtctgaggagcgcttctacaccaagtggaaccctgaggccctgcccagcaacacaggagaggtgaacttccagagcggcatcatcgccgcccgctgtgccatcagcaagctgcaccaggagctgggcgccaagggcttcatccaggtgtatgtggaccaggtggatgaagatattgtggccgtgaccaggcacagccccagcatccaccagagcgtggtggccgtgtccaggacagccttcaggaaccccaagaccagcttctacagcaaggaggtgccccagatgtgcatccctgggaagattgaggaggtggtgctggaggcccggaccatcgagaggaacaccaagccctacaggaaggatgaaaattccatcaatggcaccccagacatcaccgtggagatccgggagcacatccagctgaatgaaagcaagatcgtgaagcaggccggcgtggccaccaagggccccaatgagtacatccaggagattgaatttgagaacctgagccctggcagcgtcatcatcttccgggtgtccctggacccccacgcccaggtggccgtgggcatcctgaggaaccacctgacccagttcagcccccacttcaagagcggcagcctggccgtggacaatgctgaccccatcctgaagatcccctttgccagcctggccagccggctgaccctggccgagctgaaccagatcctgtaccgctgtgagagcgaggagaaggaggatggcggcggctgctatgacatccccaactggagcgccctgaagtatgccggcctgcagggcctgatgtctgtgctggccgagatccggcccaagaatgacctgggccaccccttctgcaacaacctgcggagcggggactggatgattgattatgtgagcaacagactcatcagccgcagcggcaccatcgccgaggtgggcaagtggctgcaggccatgttcttctacctgaagcagatcccccgctacctgatcccctgctactttgatgccatcctgattggagcctacaccaccctgctggacacagcctggaagcagatgagcagctttgtgcagaatggcagcacctttgtgaagcacctgagcctgggctctgtgcagctgtgtggggtgggcaagttccccagcctgcccatcctgagccctgccctgatggatgtgccctaccgcctgaatgagatcaccaaggagaaggagcagtgctgcgtgtccctggccgccggcctgccccacttcagcagcggcatcttccgctgctggggccgggacaccttcatcgccctgcggggcatcctgctgatcaccggccgctacgtggaggccaggaacatcatcctggcctttgctggcaccctgcggcacggcctcatccccaacctgctgggggagggcatctatgcccgctacaactgcagagatgctgtgtggtggtggctgcagtgcatccaggactactgcaagatggtgcccaacggcctggacatcctgaagtgccctgtgtccaggatgtaccccacagatgacagcgcccccctgcctgctggcaccctggaccagcccctgtttgaagtcatccaggaggccatgcagaagcacatgcagggcatccagttccgggagagaaatgccggcccccagattgacaggaacatgaaggatgagggcttcaacatcacagctggggtggatgaggagactggatttgtgtatggaggcaaccgcttcaactgtggcacctggatggacaagatgggagagagtgaccgggccaggaacagaggcatcccagccaccccaagagatggcagcgctgtggagatcgtgggcctgagcaagtctgctgtgcgctggctgctggagctgagcaagaagaacatcttcccctaccacgaggtgacagtgaagagacatggcaaggccatcaaggtgtcctatgatgagtggaacaggaagatccaggacaactttgagaagctgttccacgtgtctgaggaccccagcgacctgaatgagaagcaccccaacctggtgcacaagaggggcatctacaaggacagctatggagccagcagcccctggtgtgactaccagctgcggcccaacttcaccatcgccatggtggtggcccctgagctgttcaccacagagaaggcctggaaggccctggagattgctgagaagaagctgctgggccccctgggcatgaagaccctggaccctgatgacatggtgtactgcggcatctatgacaatgccctggacaatgacaactacaacctggccaagggcttcaactaccaccagggccctgagtggctgtggcccatcggctacttcctgcgggccaagctgtacttcagccggctgatgggccctgagaccacagccaagaccatcgtgctggtgaagaatgtgctgagccgccactacgtgcacctggagaggagcccctggaagggcctgcctgagctgaccaatgaaaatgcccagtactgccccttcagctgtgagacccaggcctggagcatcgccaccatcctggagaccctgtatgacctgtag

SEQ ID NO: 2948 - DNA, 4551 bp, synthetic construct
  misc_feature 1..4551: note = source = /note="Description of Artificial Sequence: Synthetic coding sequence"
  source 1..4551: mol_type = other DNA
atggcccccatcctgagcatcaacctcttcatcggctatgagctgcagttccggctgggccccaccctgcagggcaaggctgtgacagtgtacaccaactaccccttccctggagagaccttcaaccgggagaagttccgcagcctggactgggagaaccccacagagcgggaggatgacagcgacaagtactgcaagctgaacctgcagcagagcggcagcttccagtactacttcctgcagggcaatgagaagagcggcggcggctacatcgtggtggaccccatcctgcgggtgggcgctgacaaccacgtgctgcccctggactgtgtgaccctgcagaccttcctggccaagtgcctgggcccctttgatgagtgggagagccggctgcgggtggccaaggagagcggctacaacatgatccacttcacccccctgcagaccctgggcctgagccgcagctgctacagcctggccaaccagctggagctgaacccagacttcagccggcccaacaggaagtacacctggaatgatgtgggccagctggtggagaagctgaagaaggagtggaatgtcatctgcatcacagatgtggtgtacaaccacacagctgccaacagcaagtggatccaggagcacccagaatgtgcctacaacctggtgaacagcccccacctgaagccagcctgggtgctggaccgggccctgtggaggttcagctgtgatgtggccgagggcaagtacaaggagaagggcatcccagccctgattgaaaatgaccaccacatgaacagcatcaggaagatcatctgggaggacatcttccccaagctgaagctgtgggagttcttccaggtggatgtgaacaaggctgtggagcagttccggcggctgctgacccaggagaacagaagagtgaccaagagtgaccccaaccagcacctgaccatcatccaggaccctgagtaccgccgcttcggctgcaccgtggacatgaacatcgccctgaccaccttcatcccccatgacaagggccctgctgccatcgaggagtgctgcaactggttccacaagaggatggaggagctgaacagcgagaagcacaggctcatcaactaccaccaggagcaggccgtgaactgcctgctgggcaatgtgttctatgaaaggctggccggccacggccccaagctgggccctgtgaccaggaagcaccccctggtgacccgctacttcaccttcccctttgaggagattgacttctccatggaggagagcatgatccacctgcccaacaaggcctgcttcctgatggcccacaacggctgggtgatgggagatgaccccctgaggaactttgctgagcccggcagcgaggtgtacctgcggcgggagctgatctgctggggagacagcgtgaagctgcgctatggcaacaagccagaggactgcccctacctgtgggcccacatgaagaagtacacagagatcacagccacctacttccagggcgtgcggctggacaactgccacagcacccccctgcacgtggccgagtacatgctggatgctgccaggaacctgcagcccaacctgtatgtggtggccgagctgttcaccggcagcgaggacctggacaacgtgtttgtgacccggctgggcatcagcagcctcatccgggaggccatgtctgcctacaacagccatgaggagggccgcctggtgtaccgctatggaggagagcctgtgggcagctttgtgcagccctgcctgcggcccctgatgcctgccatcgcccacgccctcttcatggacatcacccatgacaatgaatgtcccatcgtgcacaggtctgcctatgatgccctgcccagcaccaccatcgtgtccatggcctgctgtgccagcggcagcacccggggctatgatgagctggtgccccaccagatctctgtggtgtctgaggagcgcttctacaccaagtggaaccctgaggccctgcccagcaacacaggagaggtgaacttccagagcggcatcatcgccgcccgctgtgccatcagcaagctgcaccaggagctgggcgccaagggcttcatccaggtgtatgtggaccaggtggatgaagatattgtggccgtgaccaggcacagccccagcatccaccagagcgtggtggccgtgtccaggacagccttcaggaaccccaagaccagcttctacagcaaggaggtgccccagatgtgcatccctgggaagattgaggaggtggtgctggaggcccggaccatcgagaggaacaccaagccctacaggaaggatgaaaattccatcaatggcaccccagacatcaccgtggagatccgggagcacatccagctgaatgaaagcaagatcgtgaagcaggccggcgtggccaccaagggccccaatgagtacatccaggagattgaatttgagaacctgagccctggcagcgtcatcatcttccgggtgtccctggacccccacgcccaggtggccgtgggcatcctgaggaaccacctgacccagttcagcccccacttcaagagcggcagcctggccgtggacaatgctgaccccatcctgaagatcccctttgccagcctggccagccggctgaccctggccgagctgaaccagatcctgtaccgctgtgagagcgaggagaaggaggatggcggcggctgctatgacatccccaactggagcgccctgaagtatgccggcctgcagggcctgatgtctgtgctggccgagatccggcccaagaatgacctgggccaccccttctgcaacaacctgcggagcggggactggatgattgattatgtgagcaacagactcatcagccgcagcggcaccatcgccgaggtgggcaagtggctgcaggccatgttcttctacctgaagcagatcccccgctacctgatcccctgctactttgatgccatcctgattggagcctacaccaccctgctggacacagcctggaagcagatgagcagctttgtgcagaatggcagcacctttgtgaagcacctgagcctgggctctgtgcagctgtgtggggtgggcaagttccccagcctgcccatcctgagccctgccctgatggatgtgccctaccgcctgaatgagatcaccaaggagaaggagcagtgctgcgtgtccctggccgccggcctgccccacttcagcagcggcatcttccgctgctggggccgggacaccttcatcgccctgcggggcatcctgctgatcaccggccgctacgtggaggccaggaacatcatcctggcctttgctggcaccctgcggcacggcctcatccccaacctgctgggggagggcatctatgcccgctacaactgcagagatgctgtgtggtggtggctgcagtgcatccaggactactgcaagatggtgcccaacggcctggacatcctgaagtgccctgtgtccaggatgtaccccacagatgacagcgcccccctgcctgctggcaccctggaccagcccctgtttgaagtcatccaggaggccatgcagaagcacatgcagggcatccagttccgggagagaaatgccggcccccagattgacaggaacatgaaggatgagggcttcaacatcacagctggggtggatgaggagactggatttgtgtatggaggcaaccgcttcaactgtggcacctggatggacaagatgggagagagtgaccgggccaggaacagaggcatcccagccaccccaagagatggcagcgctgtggagatcgtgggcctgagcaagtctgctgtgcgctggctgctggagctgagcaagaagaacatcttcccctaccacgaggtgacagtgaagagacatggcaaggccatcaaggtgtcctatgatgagtggaacaggaagatccaggacaactttgagaagctgttccacgtgtctgaggaccccagcgacctgaatgagaagcaccccaacctggtgcacaagaggggcatctacaaggacagctatggagccagcagcccctggtgtgactaccagctgcggcccaacttcaccatcgccatggtggtggcccctgagctgttcaccacagagaaggcctggaaggccctggagattgctgagaagaagctgctgggccccctgggcatgaagaccctggaccctgatgacatggtgtactgcggcatctatgacaatgccctggacaatgacaactacaacctggccaagggcttcaactaccaccagggccctgagtggctgtggcccatcggctacttcctgcgggccaagctgtacttcagccggctgatgggccctgagaccacagccaagaccatcgtgctggtgaagaatgtgctgagccgccactacgtgcacctggagaggagcccctggaagggcctgcctgagctgaccaatgaaaatgcccagtactgccccttcagctgtgagacccaggcctggagcatcgccaccatcctggagaccctgtatgacctgtag

SEQ ID NO: 2949 - DNA, 4548 bp, synthetic construct
  misc_feature 1..4548: note = source = /note="Description of Artificial Sequence: Synthetic coding sequence"
  source 1..4548: mol_type = other DNA
atgagcctgctgacctgtgccttctacctgggctatgagctgcagttccggctgggccccaccctgcagggcaaggctgtgacagtgtacaccaactaccccttccctggagagaccttcaaccgggagaagttccgcagcctggactgggagaaccccacagaaagagaagatgacagcgacaagtactgcaagctgaacctgcagcagagcggcagcttccagtactacttcctgcagggcaatgagaagagcggcggcggctacatcgtggtggaccccatcctgcgggtgggcgctgacaaccacgtgctgcccctggactgtgtgaccctgcagaccttcctggccaagtgcctgggcccctttgatgagtgggagagccggctgcgggtggccaaggagagcggctacaacatgatccacttcacccccctgcagaccctgggcctgagccgcagctgctacagcctggccaaccagctggagctgaacccagacttcagccggcccaacaggaagtacacctggaatgatgtgggccagctggtggagaagctgaagaaggagtggaatgtcatctgcatcacagatgtggtgtacaaccacacagctgccaacagcaagtggatccaggagcacccagaatgtgcctacaacctggtgaacagcccccacctgaagccagcctgggtgctggaccgggccctgtggaggttcagctgtgatgtggccgagggcaagtacaaggagaagggcatcccagccctgattgaaaatgaccaccacatgaacagcatcaggaagatcatctgggaggacatcttccccaagctgaagctgtgggagttcttccaggtggatgtgaacaaggctgtggagcagttccggcggctgctgacccaggagaacagaagagtgaccaagagtgaccccaaccagcacctgaccatcatccaggaccctgagtacagaagatttggctgcaccgtggacatgaacatcgccctgaccaccttcatcccccatgacaagggccctgctgccatcgaggagtgctgcaactggttccacaagaggatggaggagctgaacagcgagaagcacaggctcatcaactaccaccaggagcaggccgtgaactgcctgctgggcaatgtgttctatgagcggctggccggccacggccccaagctgggccctgtgaccaggaagcaccccctggtgacccgctacttcaccttcccctttgaggagattgacttctccatggaggagagcatgatccacctgcccaacaaggcctgcttcctgatggcccacaacggctgggtgatgggagatgaccccctgaggaactttgctgagcccggcagcgaggtgtacctgcggcgggagctgatctgctggggagacagcgtgaagctgcgctatggcaacaagccagaggactgcccctacctgtgggcccacatgaagaagtacacagagatcacagccacctacttccagggcgtgcggctggacaactgccacagcacccccctgcacgtggccgagtacatgctggatgctgccaggaacctgcagcccaacctgtatgtggtggccgagctgttcaccggcagcgaggacctggacaacgtgtttgtgacccggctgggcatcagcagcctcatccgggaggccatgtctgcctacaacagccatgaggagggccgcctggtgtaccgctatggaggagagcctgtgggcagctttgtgcagccctgcctgcggcccctgatgcctgccatcgcccacgccctcttcatggacatcacccatgacaatgaatgtcccatcgtgcacaggtctgcctatgatgccctgcccagcaccaccatcgtgtccatggcctgctgtgccagcggcagcacccggggctatgatgagctggtgccccaccagatctctgtggtgtctgaggagcgcttctacaccaagtggaaccctgaggccctgcccagcaacacaggagaggtgaacttccagagcggcatcatcgccgcccgctgtgccatcagcaagctgcaccaggagctgggcgccaagggcttcatccaggtgtatgtggaccaggtggatgaggacatcgtggccgtgaccaggcacagccccagcatccaccagagcgtggtggccgtgtccaggacagccttcaggaaccccaagaccagcttctacagcaaggaggtgccccagatgtgcatccctgggaagattgaggaggtggtgctggaggcccggaccattgaaagaaacaccaagccctacaggaaggatgagaacagcatcaatggcaccccagacatcaccgtggagatccgggagcacatccagctgaatgaaagcaagatcgtgaagcaggccggcgtggccaccaagggccccaatgagtacatccaggagattgaatttgagaacctgagccctggcagcgtcatcatcttccgggtgtccctggacccccacgcccaggtggccgtgggcatcctgaggaaccacctgacccagttcagcccccacttcaagagcggcagcctggccgtggacaatgctgaccccatcctgaagatcccctttgccagcctggccagccggctgaccctggccgagctgaaccagatcctgtaccgctgtgagagcgaggagaaggaggatggcggcggctgctatgacatccccaactggagcgccctgaagtatgccggcctgcagggcctgatgtctgtgctggccgagatccggcccaagaatgacctgggccaccccttctgcaacaacctgcggagcggggactggatgattgattatgtgagcaacagactcatcagccgcagcggcaccatcgccgaggtgggcaagtggctgcaggccatgttcttctacctgaagcagatcccccgctacctgatcccctgctactttgatgccatcctgattggagcctacaccaccctgctggacacagcctggaagcagatgagcagctttgtgcagaatggcagcacctttgtgaagcacctgagcctgggctctgtgcagctgtgtggggtgggcaagttccccagcctgcccatcctgagccctgccctgatggatgtgccctaccgcctgaatgagatcaccaaggagaaggagcagtgctgcgtgtccctggccgccggcctgccccacttcagcagcggcatcttccgctgctggggccgggacaccttcatcgccctgcggggcatcctgctgatcaccggccgctacgtggaggccaggaacatcatcctggcctttgctggcaccctgcggcacggcctcatccccaacctgctgggggagggcatctatgcccgctacaactgcagagatgctgtgtggtggtggctgcagtgcatccaggactactgcaagatggtgcccaacggcctggacatcctgaagtgccctgtgtccaggatgtaccccacagatgattctgcccccctgcctgctggcaccctggaccagcccctgtttgaggtgatccaggaggccatgcagaagcacatgcagggcatccagttccgggagagaaatgccggcccccagattgacaggaacatgaaggatgagggcttcaacatcacagctggggtggatgaggagaccggctttgtgtatggaggcaaccgcttcaactgtggcacctggatggacaagatgggagagagtgaccgggccaggaacagaggcatcccagccaccccaagagatggcagcgctgtggagatcgtgggcctgagcaagtctgctgtgcgctggctgctggagctgagcaagaagaacatcttcccctaccacgaggtgacagtgaagagacatggcaaggccatcaaggtgtcctatgatgagtggaacaggaagatccaggacaactttgagaagctgttccacgtgtctgaggaccccagcgacctgaatgagaagcaccccaacctggtgcacaagaggggcatctacaaggacagctatggagccagcagcccctggtgtgactaccagctgcggcccaacttcaccatcgccatggtggtggcccctgagctgttcaccacagagaaggcctggaaggccctggagattgctgagaagaagctgctgggccccctgggcatgaagaccctggaccctgatgacatggtgtactgcggcatctatgacaatgccctggacaatgacaactacaacctggccaagggcttcaactaccaccagggccctgagtggctgtggcccatcggctacttcctgcgggccaagctgtacttcagccggctgatgggccctgagaccacagccaagaccatcgtgctggtgaagaatgtgctgagccgccactacgtgcacctggagaggagcccctggaagggcctgcctgagctgaccaatgaaaatgcccagtactgccccttcagctgtgagacccaggcctggagcatcgccaccatcctggagaccctgtatgacctgtag

SEQ ID NO: 2950 - DNA, 4599 bp, synthetic construct; identical to SEQ ID NO: 2947
  misc_feature 1..4599: note = source = /note="Description of Artificial Sequence: Synthetic coding sequence"
  source 1..4599: mol_type = other DNA

SEQ ID NO: 2951 - DNA, 4551 bp, synthetic construct; identical to SEQ ID NO: 2948
  misc_feature 1..4551: note = source = /note="Description of Artificial Sequence: Synthetic coding sequence"
  source 1..4551: mol_type = other DNA

SEQ ID NO: 2952 - DNA, 4599 bp, synthetic construct; identical to SEQ ID NO: 2947
  misc_feature 1..4599: note = source = /note="Description of Artificial Sequence: Synthetic coding sequence"
  source 1..4599: mol_type = other DNA

SEQ ID NO: 2953 - DNA, 4599 bp, synthetic construct; identical to SEQ ID NO: 2947
  misc_feature 1..4599: note = source = /note="Description of Artificial Sequence: Synthetic coding sequence"
  source 1..4599: mol_type = other DNA

SEQ ID NO: 2954 - DNA, 672 bp, synthetic construct
  misc_feature 1..672: note = source = /note="Description of Artificial Sequence: Synthetic coding sequence"
  source 1..672: mol_type = other DNA
atgaacaagcccctgctgtggatctctgtgctgaccagcctgctggaggcctttgcccacacagacctgagcggcaaggtgtttgtgttcccccgggagagcgtgacagaccacgtgaacctgatcacccccctggagaagcccctgcagaacttcaccctgtgcttccgggcctacagcgacctgagccgggcctacagcctcttctcctacaacacccagggccgggacaatgagctgctggtgtacaaggagcgggtgggggagtacagcctgtacatcggccgccacaaggtgaccagcaaggtgattgagaagtttcctgcccctgtgcacatctgtgtgtcctgggagagcagcagcggcattgctgagttctggatcaatggcacccccctggtgaagaagggcctgcggcagggctactttgtggaggcccagcccaagatcgtgctgggccaggagcaggacagctatggaggcaagtttgacaggagccagagctttgtgggggagattggagacctgtacatgtgggacagcgtgctgcccccagagaacatcctgagcgcctaccagggcacccccctgcctgccaacatcctggactggcaggccctgaactatgagatccggggctacgtgatcatcaagcccctggtgtgggtgtag

SEQ ID NO: 2955 - DNA, 2418 bp, synthetic construct
  misc_feature 1..2418: note = source = /note="Description of Artificial Sequence: Synthetic coding sequence"
  source 1..2418: mol_type = other DNA
atgagcagcagctcctggctgctgctgagcctggtggccgtgacagctgcccagagcaccatcgaggagcaggccaagaccttcctggacaagttcaaccacgaggctgaagatctcttctaccagagcagcctggcctcctggaactacaacaccaacatcacagaagaaaatgtgcagaacatgaacaatgctggggacaagtggagcgccttcctgaaggagcagagcaccctggcccagatgtaccccctgcaggagatccagaacctgactgtgaagctgcagctgcaggccctgcagcagaatggcagctctgtgctgtctgaggacaagagcaagaggctgaacaccatcctgaacaccatgagcaccatctacagcacaggcaaggtgtgcaacccagacaacccccaggagtgcctgctgctggagcccggcctgaatgagatcatggccaacagcctggactacaatgaaaggctgtgggcctgggagagctggaggtctgaggtgggcaagcagctgcggcccctgtatgaggagtatgtggtgctgaagaatgagatggcccgggccaaccactatgaagattatggagactactggaggggggactatgaggtgaatggagtggatggctatgactacagccggggccagctgattgaagatgtggagcacacctttgaggagatcaagcccctgtatgagcacctgcacgcctacgtgcgggccaagctgatgaatgcctaccccagctacatcagccccatcggctgcctgcctgcccacctgctgggggacatgtggggccgcttctggaccaacctgtacagcctgactgtgcccttcggccagaagcccaacattgatgtgacagatgccatggtggaccaggcctgggatgcccagaggatcttcaaggaggccgagaagttctttgtgtctgtgggcctgcccaacatgacccagggcttctgggagaacagcatgctgacagatcctggaaatgtgcagaaggctgtgtgccaccccacagcctgggacctgggcaaaggagacttccgcatcctgatgtgcaccaaggtgaccatggatgacttcctgacagcccaccacgagatgggccacatccagtatgacatggcctatgctgcccagcccttcctgctgagaaatggagccaatgaaggcttccatgaagctgtgggggagatcatgagcctgtctgctgccacccccaagcacctgaagagcatcggcctgctgagcccagacttccaggaggacaatgaaacagagatcaacttcctgctgaagcaggccctgaccatcgtgggcaccctgcccttcacctacatgctggagaagtggcgctggatggtgttcaagggggagatccccaaggaccagtggatgaagaagtggtgggagatgaagcgggagatcgtgggcgtggtggagcctgtgccccatgatgagacctactgtgaccctgccagcctcttccacgtgtccaatgactacagcttcatccgctactacaccaggaccctgtaccagttccagttccaggaggccctgtgccaggccgccaagcatgagggccccctgcacaagtgtgacatcagcaacagcacagaggccggccagaagctgttcaacatgctgcggctgggcaagtctgagccctggaccctggccctggagaatgtggtgggcgccaagaacatgaatgtgcggcccctgctgaactactttgagcccctcttcacctggctgaaggaccagaacaagaacagctttgtgggctggagcacagactggagcccctatgctgaccagagcatcaaggtgcgcatcagcctgaagagcgccctgggggacaaggcctatgagtggaatgacaatgagatgtacctgttccgcagctctgtggcctatgccatgaggcagtacttcctgaaggtgaagaaccagatgatcctgtttggagaggaggatgtgcgggtggccaacctgaagccccgcatctccttcaacttctttgtgacagcccccaagaatgtgtctgacatcatccccaggacagaggtggagaaggccatccgcatgagccgcagccgcatcaatgatgccttccggctgaatgacaacagcctggagttcctgggcatccagcccaccctgggcccccccaaccagccccctgtgtccatctggctgattgtgtttggagtggtgatgggcgtgattgtggtgggcatcgtcatcctgatcttcaccggcatccgggacaggaagaagaagaacaaggcccggagcggggagaacccctatgccagcattgacatcagcaagggggagaacaaccctggcttccagaacacagatgatgtgcagaccagcttctag

SEQ ID NO: 2956 - DNA, 2418 bp, synthetic construct; identical to SEQ ID NO: 2955
  misc_feature 1..2418: note = source = /note="Description of Artificial Sequence: Synthetic coding sequence"
  source 1..2418: mol_type = other DNA

SEQ ID NO: 2957 - DNA, 804 bp, synthetic construct
  misc_feature 1..804: note = source = /note="Description of Artificial Sequence: Synthetic coding sequence"
  source 1..804: mol_type = other DNA
atgaaggctgctgtgctgaccctggccgtgctcttcctgaccggcagccaggcccggcacttctggcagcaggatgagcccccccagagcccctgggacagagtgaaggacctggccaccgtgtatgtggatgtgctgaaggacagcggccgggactatgtgtcccagtttgagggcagcgccctgggcaagcagctgaacctgaagctgctggacaactgggacagcgtgaccagcaccttcagcaagctgcgggagcagctgggccctgtgacccaggagttctgggacaacctggagaaggagacagagggcctgcggcaggagatgagcaaggacctggaggaggtgaaggccaaggtgcagccctacctggatgacttccagaagaagtggcaggaggagatggagctgtaccggcagaaggtggagcccctgcgggcagagctgcaggagggcgcccggcagaagctgcacgagctgcaggagaagctgagccccctgggggaggagatgagggaccgggcccgggcccacgtggatgccctgcggacccacctggccccctacagtgatgagctgcggcagtgcctggccgcccggctggaggccctgaaggaaaatggaggagcccggctggccgagtaccacgccaaggccacagagcacctgagcaccctgtctgagaaggccaagccagccctggaggacctgcggcagggcctgctgcctgtgctggagagcttcaaggtgtccttcctgagcgccctggaggagtacaccaagaagctgaacacccagtag

SEQ ID NO: 2958 - DNA, 804 bp, synthetic construct
  misc_feature 1..804: note = source = /note="Description of Artificial Sequence: Synthetic coding sequence"
  source 1..804: mol_type = other DNA
atgaaggctgctgtgctgaccctggccgtgctcttcctgaccggcagccaggcccggcacttctggcagcaggatgagcccccccagagcccctgggacagagtgaaggacctggccaccgtgtatgtggatgtgctgaaggacagcggccgggactatgtgtcccagtttgagggcagcgccctgggcaagcagctgaacctgaagctgctggacaactgggacagcgtgaccagcaccttcagcaagctgcgggagcagctgggccctgtgacccaggagttctgggacaacctggagaaggagacagagggcctgcggcaggagatgagcaaggacctggaggaggtgaaggccaaggtgcagccctacctggatgacttccagaagaagtggcaggaggagatggagctgtaccggcagaaggtggagcccctgcgggcagagctgcaggagggcgcccggcagaagctgcacgagctgcaggagaagctgagccccctgggggaggagatgagggactgtgcccgggcccacgtggatgccctgcggacccacctggccccctacagtgatgagctgcggcagaggctggccgcccggctggaggccctgaaggaaaatggaggagcccggctggccgagtaccacgccaaggccacagagcacctgagcaccctgtctgagaaggccaagccagccctggaggacctgcggcagggcctgctgcctgtgctggagagcttcaaggtgtccttcctgagcgccctggaggagtacaccaagaagctgaacacccagtag

SEQ ID NO: 2959 - DNA, 804 bp, synthetic construct
  misc_feature 1..804: note = source = /note="Description of Artificial Sequence: Synthetic coding sequence"
  source 1..804: mol_type = other DNA
atgaaggctgctgtgctgaccctggccgtgctcttcctgaccggcagccaggcccggcacttctggcagcaggatgagcccccccagagcccctgggacagagtgaaggacctggccaccgtgtatgtggatgtgctgaaggacagcggccgggactatgtgtcccagtttgagggcagcgccctgggcaagcagctgaacctgaagctgctggacaactgggacagcgtgaccagcaccttcagcaagctgcgggagcagctgggccctgtgacccaggagttctgggacaacctggagaaggagacagagggcctgcggcaggagatgagcaaggacctggaggaggtgaaggccaaggtgcagccctacctggatgacttccagaagaagtggcaggaggagatggagctgtaccggcagaaggtggagcccctgcgggcagagctgcaggagggcgcccggcagaagctgcacgagctgcaggagaagctgagccccctgggggaggagatgagggaccgggcccgggcccacgtggatgccctgcggacccacctggccccctacagtgatgagctgcggcagaggctggccgcccggctggaggccctgaaggaaaatggaggagcccggctggccgagtaccacgccaaggccacagagcacctgagcaccctgtctgagaaggccaagccagccctggaggacctgcggcagggcctgctgcctgtgctggagagcttcaaggtgtccttcctgagcgccctggaggagtacaccaagaagctgaacacccagtag

SEQ ID NO: 2960 - DNA, 804 bp, synthetic construct; identical to SEQ ID NO: 2959
  misc_feature 1..804: note = source = /note="Description of Artificial Sequence: Synthetic coding sequence"
  source 1..804: mol_type = other DNA

SEQ ID NO: 2961 - DNA, 804 bp, synthetic construct; identical to SEQ ID NO: 2959
  misc_feature 1..804: note = source = /note="Description of Artificial Sequence: Synthetic coding sequence"
  source 1..804: mol_type = other DNA

SEQ ID NO: 2962 - DNA, 804 bp, synthetic construct; identical to SEQ ID NO: 2959
  misc_feature 1..804: note = source = /note="Description of Artificial Sequence: Synthetic coding sequence"
  source 1..804: mol_type = other DNA

SEQ ID NO: 2963 - DNA, 1653 bp, synthetic construct
  misc_feature 1..1653: note = source = /note="Description of Artificial Sequence: Synthetic coding sequence"
  source 1..1653: mol_type = other DNA
atgaccggggacaagggcccccagaggctgagcggcagcagctatggcagcatcagcagccccaccagccccaccagccctggcccccagcaggccccaccccgggagacctacctgtctgagaagatccccatcccagacaccaagccaggcaccttcagcctgaggaagctgtgggccttcaccggccctggcttcctgatgagcatcgccttcctggaccccggcaacatcgagagtgacctgcaggccggggctgtggccggcttcaagctgctgtgggtgctgctgtgggccaccgtgctgggcctgctgtgccagaggctggccgcccggctgggcgtggtgacaggcaaggacctgggggaggtgtgccacctgtactaccccaaggtgcccaggacagtgctgtggctgaccatcgagctggccatcgtgggcagtgacatgcaggaggtgattggaacagccatcgccttcaacctgctgtctgctggccgcatccccctgtggggcggcgtgctgatcaccatcgtggacaccttcttcttcctgttcctggacaactacggcctgaggaagctggaggccttcttcggcctgctgatcaccatcatggccctgaccttcggctatgaatatgtggtggcccggcctgagcagggcgccctgctgcggggcctcttcctgcccagctgccccggctgcggccaccctgagctgctgcaggccgtgggcatcgtgggcgccatcatcatgccccacaacatctacctgcacagcgccctggtgaagagccgggagattgaccgggccaggagagctgacatccgggaggccaacatgtacttcctgattgaggccaccatcgccctgtctgtgtccttcatcatcaacctgtttgtgatggctgtgtttggccaggccttctaccagaagaccaaccaggccgccttcaacatctgtgccaacagcagcctgcatgactatgccaagatcttccccatgaacaatgccaccgtggccgtggacatctaccagggcggcgtcatcctgggctgcctgtttggacctgctgccctgtacatctgggccatcggcctgctggccgccggccagagcagcaccatgacaggcacctacgccggccagtttgtgatggagggcttcctgcggctgcgctggagcagatttgcccgggtgctgctgaccaggagctgtgccatcctgcccaccgtgctggtggccgtgttccgggacctgcgggacctgagcggcctgaatgacctgctgaatgtgctgcagagcctgctgctgccctttgctgtgctgcccatcctgaccttcacctccatgcccaccctgatgcaggagtttgccaacggcctgctgaacaaggtggtgaccagcagcatcatggtgctggtgtgtgccatcaacctgtactttgtggtgtcctacctgcccagcctgccccacccagcctacttcggcctggccgccctgctggccgccgcctacctgggcctgagcacctacctggtgtggacctgctgcctggcccacggggccaccttcctggcccacagcagccaccaccacttcctgtatggcctgctggaggaggaccagaagggggagaccagcggctag

SEQ ID NO: 2964 - DNA, 13035 bp, synthetic construct
  misc_feature 1..13035: note = source = /note="Description of Artificial Sequence: Synthetic coding sequence"
  source 1..13035: mol_type = other DNA
atggacccccccaggcctgccctgctggccctgctggccctgcctgccctgctgctgctgctgctggccggggcccgggcagaggaggagatgctggagaatgtgtccctggtgtgccccaaggatgccacccgcttcaagcacctgaggaagtacacctacaactatgaggccgagagcagcagcggcgtgcctggaacagctgacagccgcagcgccacccgcatcaactgcaaggtggagctggaggtgccccagctgtgcagcttcatcctgaagaccagccagtgcaccctgaaggaggtgtatggcttcaaccctgagggcaaggccctgctgaagaagaccaagaacagcgaggagtttgctgctgccatgagccgctatgagctgaagctggccatccctgagggcaagcaggtgttcctgtacccagagaaggatgagcccacctacatcctgaacatcaagaggggcatcatcagcgccctgctggtgcccccagagacagaggaggccaagcaggtgctcttcctggacacagtgtatggcaactgcagcacccacttcaccgtgaagaccaggaaaggaaatgtggccacagagatcagcacagagcgggacctgggccagtgtgaccgcttcaagcccatcagaacaggcatcagccccctggccctgatcaagggcatgacccggcccctgagcaccctcatcagcagcagccagagctgccagtacaccctggatgccaagaggaagcacgtggccgaggccatctgcaaggagcagcacctgttcctgcccttctcctacaagaacaagtatggcatggtggcccaggtgacccagaccctgaagctggaggacacccccaagatcaacagccgcttctttggagagggcaccaagaagatgggcctggcctttgagagcaccaagagcaccagcccccccaagcaggccgaggccgtgctgaagaccctgcaggagctgaagaagctgaccatcagcgagcagaacatccagagggccaacctcttcaacaagctggtgacagagctgcggggcctgagtgatgaggccgtgaccagcctgctgccccagctgattgaggtgagcagccccatcaccctgcaggccctggtgcagtgtggccagccccagtgcagcacccacatcctgcagtggctgaagagggtgcacgccaaccccctgctgattgatgtggtgacctacctggtggccctgatccctgagcccagcgcccagcagctgcgggagatcttcaacatggcccgggaccagaggagccgggccaccctgtatgccctgagccatgctgtgaacaactaccacaagaccaaccccaccggcacccaggagctgctggacatcgccaactacctgatggagcagatccaggatgactgcacaggagatgaggactacacctacctgatcctgcgggtcatcggcaacatgggccagaccatggagcagctgaccccagagctgaagagcagcatcctgaagtgtgtgcagagcaccaagcccagcctgatgatccagaaggccgccatccaggccctgaggaagatggagcccaaggacaaggaccaggaggtgctgctgcagaccttcctggatgatgccagccctggggacaagaggctggccgcctacctgatgctgatgaggagccccagccaggccgacatcaacaagatcgtgcagatcctgccctgggagcagaatgagcaggtgaagaactttgtggccagccacatcgccaacatcctgaacagcgaggagctggacatccaggacctgaagaagctggtgaaggaggccctgaaggagagccagctgcccaccgtgatggacttcaggaagttcagcaggaactaccagctgtacaagtctgtgtccctgcccagcctggaccctgccagcgccaagattgagggcaacctgatctttgaccccaacaactacctgcccaaggagagcatgctgaagaccaccctgacagccttcggctttgccagcgctgacctgattgagatcggcctggagggcaaaggatttgagcccaccctggaggccctgtttgggaagcagggcttcttcccagacagcgtgaacaaggccctgtactgggtgaatggccaggtgcctgatggagtgtccaaggtgctggtggaccacttcggctacaccaaggatgacaagcatgagcaggacatggtgaatggcatcatgctgtctgtggagaagctgatcaaggacctgaagagcaaggaggtgcctgaggcccgggcctacctgcgcatcctgggggaggagctgggctttgccagcctgcatgacctgcagctgctgggcaagctgctgctgatgggcgcccggaccctgcagggcatcccccagatgattggagaggtgatcaggaagggcagcaagaatgacttcttcctgcactacatcttcatggagaatgcctttgagctgcccaccggggccggcctgcagctgcagatcagcagcagtggagtcatcgcccctggggccaaggccggcgtgaagctggaggtggccaacatgcaggccgagctggtggccaagcccagcgtgtctgtggagtttgtgaccaacatgggcatcatcatcccagactttgcccggtctggagtgcagatgaacaccaacttcttccatgaaagtggcctggaggcccacgtggccctgaaggccggcaagctgaagttcatcatccccagccccaagaggcctgtgaagctgctgagcggcggcaacaccctgcacctggtgtccaccaccaagacagaggtgatcccccccctgattgagaaccggcagagctggagcgtgtgcaagcaggtgtttcctggcctgaactactgcaccagcggggcctacagcaatgccagcagcacagattctgccagctactaccccctgaccggggacacccggctggagctggagctgcggcccaccggggagattgagcagtacagcgtgtctgccacctatgagctgcagagagaagatcgggccctggtggacaccctgaagtttgtgacccaggccgagggcgccaagcagacagaggccaccatgaccttcaagtacaaccggcagagcatgaccctgagcagcgaggtgcagatcccagactttgatgtggacctgggcaccatcctgcgggtgaatgatgagagcacagagggcaagaccagctaccgcctgaccctggacatccagaacaagaagatcacagaggtggccctgatgggccacctgagctgtgacaccaaggaggagaggaagatcaagggcgtcatcagcatcccccggctgcaggccgaggcccggtctgagatcctggcccactggagccctgccaagctgctgctgcagatggacagcagcgccacagcctacggcagcacagtgtccaagagggtggcctggcactatgatgaggagaagattgaatttgagtggaacacaggcaccaacgtggacaccaagaagatgaccagcaacttccctgtggacctgagtgactaccccaagagcctgcacatgtatgccaaccggctgctggaccaccgggtgccccagacagacatgaccttcagacatgtgggcagcaagctgattgtggccatgagctcctggctgcagaaggccagcggcagcctgccctacacccagaccctgcaggaccacctgaacagcctgaaggagttcaacctgcagaacatgggcctgcctgacttccacatcccagaaaatctcttcctgaagagtgatggccgggtgaagtacaccctgaacaagaacagcctgaagattgagatccccctgccctttggaggcaagagcagccgggacctgaagatgctggagaccgtgaggaccccagccctgcacttcaagtctgtgggcttccacctgcccagccgggagttccaggtgcccaccttcaccatccccaagctgtaccagctgcaggtgcccctgctgggcgtgctggacctgagcaccaacgtgtacagcaacctgtacaactggagcgccagctacagcggcggcaacaccagcacagaccacttcagcctgcgggcccgctaccacatgaaggctgacagcgtggtggacctgctgagctacaacgtgcagggcagcggggagaccacctatgaccacaagaacaccttcaccctgtcctatgatggcagcctgcggcacaagttcctggacagcaacatcaagttcagccacgtggagaagctgggcaacaaccctgtgtccaagggcctgctgatctttgatgccagcagctcctggggcccccagatgtctgcctctgtgcacctggacagcaagaagaagcagcacctgtttgtgaaggaggtgaagattgatggccagttccgggtgagcagcttctacgccaagggcacctacggcctgagctgccagagggaccccaacacaggccgcctgaatggagagagcaacctgcgcttcaacagcagctacctgcagggcaccaaccagatcaccggccgctatgaagatggcaccctgagcctgaccagcaccagtgacctgcagagcggcatcatcaagaacacagccagcctgaagtatgagaactatgagctgaccctgaagagtgacaccaacgggaagtacaagaactttgccaccagcaacaagatggacatgaccttcagcaagcagaatgccctgctgcggtctgagtaccaggccgactatgagagcctgcgcttcttcagcctgctgagcggcagcctgaacagccacggcctggagctgaatgctgacatcctgggcacagacaagatcaacagcggggcccacaaggccaccctgagaattggccaggacggcatcagcaccagcgccaccaccaacctgaagtgcagcctgctggtgctggagaatgagctgaatgctgagctgggcctgagcggggcctccatgaagctgaccaccaacggccgcttccgggagcacaatgccaagttcagcctggatggcaaggccgccctgacagagctgagcctgggcagcgcctaccaggccatgatcctgggcgtggacagcaagaacatcttcaacttcaaggtgtcccaggagggcctgaagctgagcaatgacatgatgggcagctatgcagagatgaagtttgaccacaccaacagcctgaacattgctggcctgagcctggacttcagcagcaagctggacaacatctacagcagtgacaagttctacaagcagacagtgaacctgcagctgcagccctacagcctggtgaccaccctgaacagcgacctgaagtacaatgccctggacctgaccaacaacgggaagctgcggctggagcccctgaagctgcacgtggccggcaacctgaagggggcctaccagaacaatgagatcaagcacatctatgccatcagcagcgctgccctgagcgccagctacaaggctgacacagtggccaaggtgcagggcgtggagttcagccaccggctgaacacagacattgctggcctggccagcgccatcgacatgagcaccaactacaacagcgacagcctgcacttcagcaatgtgttccgctctgtgatggcccccttcaccatgaccattgatgcccacaccaatggaaatggcaagctggccctgtggggcgagcacacaggccagctgtacagcaagttcctgctgaaggccgagcccctggccttcaccttcagccatgactacaagggcagcaccagccaccacctggtgtccaggaagagcatctctgctgccctggagcacaaggtgtctgccctgctgaccccagctgagcagacaggcacctggaagctgaagacccagttcaacaacaatgagtacagccaggacctggatgcctacaacaccaaggacaagattggagtggagctgaccggccgcaccctggccgacctgaccctgctggacagccccatcaaggtgcccctgctgctgtctgagcccatcaacatcattgatgccctggagatgagagatgctgtggagaagccccaggagttcaccatcgtggcctttgtgaagtatgacaagaaccaggatgtgcacagcatcaacctgcccttctttgagaccctgcaggagtactttgaaagaaaccggcagaccatcatcgtggtgctggagaatgtgcagaggaacctgaagcacatcaacatcgaccagtttgtgaggaagtacagagctgccctgggcaagctgccccagcaggccaatgactacctgaacagcttcaactgggagcggcaggtgtcccatgccaaggagaagctgacagccctgaccaagaagtaccgcatcacagaaaatgacatccagatcgccctggatgatgccaagatcaacttcaatgagaagctgagccagctgcagacctacatgatccagtttgaccagtacatcaaggacagctatgacctgcatgacctgaagatcgccatcgccaacatcattgatgagatcatcgagaagctgaagagcctggatgagcactaccacatccgggtgaacctggtgaagaccatccatgacctgcacctgttcatcgagaacatcgacttcaacaagagcggcagcagcacagcctcctggatccagaatgtggacaccaagtaccagatccgcatccagatccaggagaagctgcagcagctgaagaggcacatccagaacatcgacatccagcacctggccggcaagctgaagcagcacatcgaggccattgatgtgcgggtgctgctggaccagctgggcaccaccatcagctttgagcgcatcaatgacatcctggagcacgtgaagcacttcgtcatcaacctgattggagactttgaggtggccgagaagatcaatgccttccgggccaaggtgcatgagctgattgaaagatatgaggtggaccagcagatccaggtgctgatggacaagctggtggagctggcccaccagtacaagctgaaggagaccatccagaagctgagcaatgtgctgcagcaggtgaagatcaaggactactttgagaagctggtgggcttcattgatgatgctgtgaagaagctgaatgagctgtccttcaagaccttcattgaagatgtgaacaagttcctggacatgctgatcaagaagctgaagagctttgactaccaccagtttgtggatgagaccaatgacaagatccgggaggtgacccagaggctgaatggagagatccaggccctggagctgccccagaaggccgaggccctgaagctgttcctggaggagaccaaggccaccgtggccgtgtacctggagagcctgcaggacaccaagatcaccctcatcatcaactggctgcaggaggccctgagcagcgccagcctggcccacatgaaggccaagttccgggagaccctggaggacacccgggacaggatgtaccagatggacatccagcaggagctgcagcgctacctgagcctggtgggccaggtgtacagcaccctggtgacctacatcagtgactggtggaccctggccgccaagaacctgacagactttgctgagcagtacagcatccaggactgggccaagaggatgaaggccctggtggagcagggcttcaccgtgcctgagatcaagaccatcctgggcaccatgcctgcctttgaggtgtccctgcaggccctgcagaaggccaccttccagaccccagacttcatcgtgcccctgacagacctgcgcatccccagcgtgcagatcaacttcaaggacctgaagaacatcaagatccccagccgcttcagcaccccagagttcaccatcctgaacaccttccacatccccagcttcaccatcgactttgtggagatgaaggtgaagatcatccgcaccatcgaccagatgctgaacagcgagctgcagtggcctgtgcctgacatctacctgcgggacctgaaggtggaggacatccccctggcccgcatcaccctgcctgacttccggctgcctgagatcgccatccctgagttcatcatccccaccctgaacctgaatgacttccaggtgcctgacctgcacatccctgagttccagctgccccacatcagccacaccatcgaggtgcccaccttcggcaagctgtacagcatcctgaagatccagagccccctcttcaccctggatgccaatgctgacattggaaatggcaccaccagcgccaatgaagctggcattgctgccagcatcacagccaagggggagagcaagctggaggtgctgaactttgacttccaggccaatgcccagctgagcaaccccaagatcaaccccctggccctgaaggagagcgtgaagttcagcagcaagtacctgaggacagaacatggcagcgagatgctgttctttggaaatgccatcgagggcaagagcaacacagtggccagcctgcacacagagaagaacaccctggagctgagcaatggagtcatcgtgaagatcaacaaccagctgaccctggacagcaacaccaagtacttccacaagctgaacatccccaagctggacttcagcagccaggccgacctgagaaatgagatcaagaccctgctgaaggccggccacatcgcctggaccagcagcggcaagggctcctggaagtgggcctgcccccgcttcagtgatgagggcacccatgagagccagatctccttcaccatcgagggccccctgaccagctttggcctgagcaacaagatcaacagcaagcacctgcgggtgaaccagaacctggtgtatgagagcggcagcctgaacttcagcaagctggagatccagagccaggtggacagccagcacgtgggccacagcgtgctgacagccaagggcatggccctgtttggagagggcaaggccgagttcaccggcagacatgatgcccacctgaatggcaaggtgattggcaccctgaagaacagcctcttcttcagcgcccagccctttgagatcacagccagcaccaacaatgaaggcaacctgaaggtgcgcttccccctgcggctgaccgggaagattgacttcctgaacaactatgccctcttcctgagccccagcgcccagcaggcctcctggcaggtgtctgcccgcttcaaccagtacaagtacaaccagaacttctctgctggcaacaatgaaaacatcatggaggcccacgtgggcatcaacggggaggccaacctggacttcctgaacatccccctgaccatccctgagatgaggctgccctacaccatcatcaccaccccacccctgaaggacttcagcctgtgggagaagacaggcctgaaggagttcctgaagaccaccaagcagagctttgacctgtctgtgaaggcccagtacaagaagaacaagcaccgccacagcatcaccaaccccctggccgtgctgtgtgagttcatcagccagagcatcaagagctttgacagacactttgagaagaacagaaataatgccctggactttgtgaccaagagctacaatgagaccaagatcaagtttgacaagtacaaggccgagaagagccatgatgagctgcccaggaccttccagatccctggctacacagtgcctgtggtgaatgtggaggtgagccccttcaccatcgagatgtctgccttcggctacgtgttccccaaggctgtgtccatgcccagcttcagcatcctgggcagtgatgtgcgggtgcccagctacaccctcatcctgcccagcctggagctgcctgtgctgcacgtgcccaggaacctgaagctgagcctgcctgacttcaaggagctgtgcaccatcagccacatcttcatcccagccatgggcaacatcacctatgacttctccttcaagagcagcgtcatcaccctgaacaccaatgctgagctgttcaaccagagcgacatcgtggcccacctgctgagcagcagcagctctgtgattgatgccctgcagtacaagctggagggcaccacccggctgaccaggaagaggggcctgaagctggccacagccctgagcctgagcaacaagtttgtggagggcagccacaacagcacagtgtccctgaccaccaagaacatggaggtgtctgtggccaccaccaccaaggcccagatccccatcctgaggatgaacttcaagcaggagctgaatggaaacaccaagagcaagcccaccgtgagcagctccatggagttcaagtatgacttcaacagctccatgctgtacagcacagccaagggagctgtggaccacaagctgagcctggagagcctgaccagctacttcagcattgagagcagcaccaagggagatgtgaagggctctgtgctgagccgggagtacagcggcaccatcgccagcgaggccaacacctacctgaacagcaagagcaccaggagctctgtgaagctgcagggcaccagcaagattgatgacatctggaacctggaggtgaaggagaactttgctggggaggccaccctgcagaggatctacagcctgtgggagcacagcaccaagaaccacctgcagctggagggcctcttcttcaccaacggggagcacaccagcaaggccaccctggagctgagcccctggcagatgtctgccctggtgcaggtgcacgccagccagcccagcagcttccatgacttcccagacctgggccaggaggtggccctgaatgccaacaccaagaaccagaagatccgctggaagaatgaggtgcgcatccacagcggcagcttccagagccaggtggagctgagcaatgaccaggagaaggcccacctggacattgctggcagcctggagggccacctgcgcttcctgaagaacatcatcctgcctgtgtatgacaagagcctgtgggacttcctgaagctggatgtgaccaccagcatcggccggcggcagcacctgcgggtgtccacagcctttgtgtacaccaagaaccccaacggctacagcttcagcatccctgtgaaggtgctggccgacaagttcatcatccctggcctgaagctgaatgacctgaacagcgtgctggtgatgcccaccttccacgtgcccttcacagacctgcaggtgcccagctgcaagctggacttccgggagatccagatctacaagaagctgcggaccagcagctttgccctgaacctgcccaccctgcctgaggtgaagtttcctgaggtggatgtgctgaccaagtacagccagcctgaggacagcctcatccccttctttgagatcaccgtgcctgagagccagctgactgtgtcccagttcaccctgcccaagtctgtgtctgatggcattgctgccctggacctgaatgctgtggccaacaagattgctgactttgagctgcccaccatcatcgtgcctgagcagaccatcgagatccccagcatcaagttctctgtgcctgctggcatcgtcatccccagcttccaggccctgacagccaggtttgaggtggacagccctgtgtacaatgccacctggagcgccagcctgaagaacaaggctgactatgtggagaccgtgctggacagcacctgcagcagcacagtgcagttcctggagtatgagctgaatgtgctgggcacccacaagattgaagatggcaccctggccagcaagaccaagggcacctttgcccaccgggacttcagcgcagaatatgaggaggatggcaagtatgagggcctgcaggagtgggagggcaaggcccacctgaacatcaagagccctgccttcacagacctgcacctgcgctaccagaaggacaagaagggcatcagcaccagcgctgccagccctgctgtgggcaccgtgggcatggacatggatgaagatgatgacttcagcaagtggaacttctactacagcccccagagcagcccagacaagaagctgaccatcttcaagacagagctgcgggtgcgggagagtgatgaggagacccagatcaaggtgaactgggaggaggaggccgccagcggcctgctgaccagcctgaaggacaacgtgcccaaggccaccggggtgctgtatgactatgtgaacaagtaccactgggagcacacaggcctgaccctgcgggaggtgagcagcaagctgcggaggaacctgcagaacaatgctgagtgggtgtaccagggcgccatccggcagattgatgacattgatgtgcgcttccagaaggccgccagcggcaccaccggcacctaccaggagtggaaggacaaggcccagaacctgtaccaggagctgctgacccaggagggccaggccagcttccagggcctgaaggacaacgtgtttgatggcctggtgcgggtgacccaggagttccacatgaaggtgaagcacctgattgacagcctgattgacttcctgaacttcccccgcttccagtttcctgggaagccaggcatctacacccgggaggagctgtgcaccatgttcatccgggaggtgggcaccgtgctgagccaggtgtacagcaaggtgcacaatggaagtgagatcctcttctcctacttccaggacctggtgatcaccctgccctttgagctgaggaagcacaagctgattgatgtgatctccatgtaccgggagctgctgaaggacctgagcaaggaggcccaggaggtgttcaaggccatccagagcctgaagaccacagaggtgctgaggaacctgcaggacctgctgcagttcatcttccagctgattgaggacaacatcaagcagctgaaggagatgaagttcacctacctgatcaactacatccaggatgagatcaacaccatcttcagtgactacatcccctgcttctag

SEQ ID NO: 2965 - DNA, 798 bp, synthetic construct
  misc_feature 1..798: note = source = /note="Description of Artificial Sequence: Synthetic coding sequence"
  source 1..798: mol_type = other DNA
atgaagaaggaggtgtgcagcgtggccttcctgaaggctgtgtttgctgagttcctggccaccctcatctttgtgttcttcggcctgggcagcgccctgaagtggcccagcgccctgcccaccatcctgcagatcgccctggccttcggcctggccatcggcaccctggcccaggccctgggccctgtgtctgggggccacatcaacccagccatcaccctggccctgctggtgggcaaccagatcagcctgctgcgggccttcttctacgtggccgcccagctggtgggcgccatcgccggggccggcatcctgtatggagtggcccccctgaatgcccggggcaacctggccgtgaatgccctgaacaacaacaccacccagggccaggccatggtggtggagctgatcctgaccttccagctggccctgtgcatctttgccagcacagacagcaggaggaccagccctgtgggcagccctgccctgagcatcggcctgtctgtgaccctgggccacctggtgggcatctacttcaccggctgcagcatgaacccagcccggagctttggacctgctgtggtgatgaaccgcttctccccagcccactgggtgttctgggtgggccccatcgtgggcgctgtgctggccgccatcctgtacttctacctgctcttccccaacagcctgagcctgtctgagcgggtggccatcatcaagggcacctatgagccagatgaggactgggaggagcagcgggaggagaggaagaagaccatggagctgaccaccaggtag

SEQ ID NO: 2966 - DNA, 993 bp, synthetic construct
  misc_feature 1..993: note = source = /note="Description of Artificial Sequence: Synthetic coding sequence"
  source 1..993: mol_type = other DNA
atgtctgccaagagcaggaccatcggcatcattggagcccccttcagcaagggccagccccggggcggcgtggaggagggccccaccgtgctgaggaaggccggcctgctggagaagctgaaggagcaggtgacccagaacttcctgatcctggagtgtgatgtgaaggactatggagacctgccctttgctgacatccccaatgacagccccttccagatcgtgaagaaccccaggtctgtgggcaaggccagcgagcagctggccggcaaggtggccgaggtgaagaagaatggccgcatcagcctggtgctgggcggggaccacagcctggccatcggcagcatcagcggccacgcccgggtgcacccagacctgggcgtcatctgggtggatgcccacacagacatcaacacccccctgaccaccaccagcggcaacctgcacggccagcctgtgtccttcctgctgaaggagctgaagggcaagatcccagatgtgcccggcttctcctgggtgaccccctgcatcagcgccaaggacatcgtgtacatcggcctgagagatgtggaccccggggagcactacatcctgaagaccctgggcatcaagtacttctccatgacagaggtggaccggctgggcatcggcaaggtgatggaggagaccctgagctacctgctgggcaggaagaagaggcccatccacctgagctttgatgtggatggcctggaccccagcttcaccccagccaccggcacccctgtggtgggcggcctgacctaccgggagggcctgtacatcacagaggagatctacaagacaggcctgctgagcggcctggacatcatggaggtgaaccccagcctgggcaagaccccagaggaggtgaccaggacagtgaacacagctgtggccatcaccctggcctgcttcggcctggcccgggagggcaaccacaagcccatcgactacctgaacccccccaagtag

SEQ ID NO: 2967 - DNA, 969 bp, synthetic construct
  misc_feature 1..969: note = source = /note="Description of Artificial Sequence: Synthetic coding sequence"
  source 1..969: mol_type = other DNA
atgtctgccaagagcaggaccatcggcatcattggagcccccttcagcaagggccagccccggggcggcgtggaggagggccccaccgtgctgaggaaggccggcctgctggagaagctgaaggagcaggagtgtgatgtgaaggactatggagacctgccctttgctgacatccccaatgacagccccttccagatcgtgaagaaccccaggtctgtgggcaaggccagcgagcagctggccggcaaggtggccgaggtgaagaagaatggccgcatcagcctggtgctgggcggggaccacagcctggccatcggcagcatcagcggccacgcccgggtgcacccagacctgggcgtcatctgggtggatgcccacacagacatcaacacccccctgaccaccaccagcggcaacctgcacggccagcctgtgtccttcctgctgaaggagctgaagggcaagatcccagatgtgcccggcttctcctgggtgaccccctgcatcagcgccaaggacatcgtgtacatcggcctgagagatgtggaccccggggagcactacatcctgaagaccctgggcatcaagtacttctccatgacagaggtggaccggctgggcatcggcaaggtgatggaggagaccctgagctacctgctgggcaggaagaagaggcccatccacctgagctttgatgtggatggcctggaccccagcttcaccccagccaccggcacccctgtggtgggcggcctgacctaccgggagggcctgtacatcacagaggagatctacaagacaggcctgctgagcggcctggacatcatggaggtgaaccccagcctgggcaagaccccagaggaggtgaccaggacagtgaacacagctgtggccatcaccctggcctgcttcggcctggcccgggagggcaaccacaagcccatcgactacctgaacccccccaagtag

SEQ ID NO: 2968 - DNA, 711 bp, synthetic construct
  misc_feature 1..711: note = source = /note="Description of Artificial Sequence: Synthetic coding sequence"
  source 1..711: mol_type = other DNA
atgtctgccaagagcaggaccatcggcatcattggagcccccttcagcaagggccagccccggggcggcgtggaggagggccccaccgtgctgaggaaggccggcctgctggagaagctgaaggagcaggagtgtgatgtgaaggactatggagacctgccctttgctgacatccccaatgacagccccttccagatcgtgaagaaccccaggtctgtgggcaaggccagcgagcagctggccggcaaggtggccgaggtgaagaagaatggccgcatcagcctggtgctgggcggggaccacagcctggccatcggcagcatcagcggccacgcccgggtgcacccagacctgggcgtcatctgggtggatgcccacacagacatcaacacccccctgaccaccaccagcggcaacctgcacggccagcctgtgtccttcctgctgaaggagctgaagggcaagatcccagatgtgcccggcttctcctgggtgaccccctgcatcagcgccaaggacatcgtgtacatcggcctgagagatgtggaccccggggagcactacatcctgaagaccctgggcatcaagtacttctccatgacagaggtgaccaggacagtgaacacagctgtggccatcaccctggcctgcttcggcctggcccgggagggcaaccacaagcccatcgactacctgaacccccccaagtag

SEQ ID NO: 2969 - DNA, 1395 bp, synthetic construct
  misc_feature 1..1395: note = source = /note="Description of Artificial Sequence: Synthetic coding sequence"
  source 1..1395: mol_type = other DNA
atggccagcgagagcggcaagctgtggggcggccgctttgtgggcgctgtggaccccatcatggagaagttcaatgccagcatcgcctatgacagacacctgtgggaggtggatgtgcagggcagcaaggcctacagccggggcctggagaaggccggcctgctgaccaaggccgagatggaccagatcctgcacggcctggacaaggtggccgaggagtgggcccagggcaccttcaagctgaacagcaatgatgaggacatccacacagccaatgaaagaaggctgaaggagctgattggagccacagctgggaagctgcacacaggccgcagcagaaatgaccaggtggtgacagacctgcggctgtggatgaggcagacctgcagcaccctgagcggcctgctgtgggagctgatccgcaccatggtggacagagctgaggccgagagagatgtgctcttccctggctacacccacctgcagagggcccagcccatccgctggagccactggatcctgagccatgctgtggccctgacccgggacagcgagcggctgctggaggtgaggaagaggatcaacgtgctgcccctgggcagcggggccatcgccggcaaccccctgggcgtggaccgggagctgctgcgggcagagctgaactttggagccatcaccctgaacagcatggatgccaccagcgagcgggactttgtggccgagttcctgttctgggccagcctgtgcatgacccacctgagcaggatggccgaggacctgatcctgtactgcaccaaggagttctcctttgtgcagctgagtgatgcctacagcacaggcagcagcctgatgccccagaagaagaacccagacagcctggagctgatccgcagcaaggccggccgggtgtttggccgctgtgccggcctgctgatgaccctgaagggcctgcccagcacctacaacaaggacctgcaggaggacaaggaggccgtgtttgaggtgtctgacaccatgtctgctgtgctgcaggtggccactggagtcatcagcaccctgcagatccaccaggagaacatgggccaggccctgagcccagacatgctggccacagacctggcctactacctggtgaggaagggcatgcccttccggcaggcccacgaggccagcggcaaggctgtgttcatggccgagaccaagggcgtggccctgaaccagctgagcctgcaggagctgcagaccatcagccccctcttctctggagatgtgatctgtgtgtgggactatggccacagcgtggagcagtatggagccctgggcggcacagcccggagctctgtggactggcagatccggcaggtgcgggccctgctgcaggcccagcaggcctag

SEQ ID NO: 2970 - DNA, 1317 bp, synthetic construct
  misc_feature 1..1317: note = source = /note="Description of Artificial Sequence: Synthetic coding sequence"
  source 1..1317: mol_type = other DNA
atggccagcgagagcggcaagctgtggggcggccgctttgtgggcgctgtggaccccatcatggagaagttcaatgccagcatcgcctatgacagacacctgtgggaggtggatgtgcagggcagcaaggcctacagccggggcctggagaaggccggcctgctgaccaaggccgagatggaccagatcctgcacggcctggacaaggtggccgaggagtgggcccagggcaccttcaagctgaacagcaatgatgaggacatccacacagccaatgaaagaaggctgaaggagctgattggagccacagctgggaagctgcacacaggccgcagcagaaatgaccaggtggtgacagacctgcggctgtggatgaggcagacctgcagcaccctgagcggcctgctgtgggagctgatccgcaccatggtggacagagctgaggccgagagagatgtgctcttccctggctacacccacctgcagagggcccagcccatccgctggagccactggatcctgagcggggccatcgccggcaaccccctgggcgtggaccgggagctgctgcgggcagagctgaactttggagccatcaccctgaacagcatggatgccaccagcgagcgggactttgtggccgagttcctgttctgggccagcctgtgcatgacccacctgagcaggatggccgaggacctgatcctgtactgcaccaaggagttctcctttgtgcagctgagtgatgcctacagcacaggcagcagcctgatgccccagaagaagaacccagacagcctggagctgatccgcagcaaggccggccgggtgtttggccgctgtgccggcctgctgatgaccctgaagggcctgcccagcacctacaacaaggacctgcaggaggacaaggaggccgtgtttgaggtgtctgacaccatgtctgctgtgctgcaggtggccactggagtcatcagcaccctgcagatccaccaggagaacatgggccaggccctgagcccagacatgctggccacagacctggcctactacctggtgaggaagggcatgcccttccggcaggcccacgaggccagcggcaaggctgtgttcatggccgagaccaagggcgtggccctgaaccagctgagcctgcaggagctgcagaccatcagccccctcttctctggagatgtgatctgtgtgtgggactatggccacagcgtggagcagtatggagccctgggcggcacagcccggagctctgtggactggcagatccggcaggtgcgggccctgctgcaggcccagcaggcctag

SEQ ID NO: 2971 - DNA, 1335 bp, synthetic construct
  misc_feature 1..1335: note = source = /note="Description of Artificial Sequence: Synthetic coding sequence"
  source 1..1335: mol_type = other DNA
atggccagcgagagcggcaagctgtggggcggccgctttgtgggcgctgtggaccccatcatggagaagttcaatgccagcatcgcctatgacagacacctgtgggaggtggatgtgcagggcagcaaggcctacagccggggcctggagaaggccggcctgctgaccaaggccgagatggaccagatcctgcacggcctggacaaggtggccgaggagtgggcccagggcaccttcaagctgaacagcaatgatgaggacatccacacagccaatgaaagaaggctgaaggagctgattggagccacagctgggaagctgcacacaggccgcagcagaaatgaccaggtggtgacagacctgcggctgtggatgaggcagacctgcagcaccctgagcggcctgctgtgggagctgatccgcaccatggtggacagagctgaggccgagagagatgtgctcttccctggctacacccacctgcagagggcccagcccatccgctggagccactggatcctgagccatgctgtggccctgacccgggacagcgagcggctgctggaggtgaggaagaggatcaacgtgctgcccctgggcagcggggccatcgccggcaaccccctgggcgtggaccgggagctgctgcgggcagagctgaactttggagccatcaccctgaacagcatggatgccaccagcgagcgggactttgtggccgagttcctgttctgggccagcctgtgcatgacccacctgagcaggatggccgaggacctgatcctgtactgcaccaaggagttctcctttgtgcagctgagtgatgcctacagcacaggcagcagcctgatgccccagaagaagaacccagacagcctggagctgatccgcagcaaggccggccgggtgtttggaagagaggacaaggaggccgtgtttgaggtgtctgacaccatgtctgctgtgctgcaggtggccactggagtcatcagcaccctgcagatccaccaggagaacatgggccaggccctgagcccagacatgctggccacagacctggcctactacctggtgaggaagggcatgcccttccggcaggcccacgaggccagcggcaaggctgtgttcatggccgagaccaagggcgtggccctgaaccagctgagcctgcaggagctgcagaccatcagccccctcttctctggagatgtgatctgtgtgtgggactatggccacagcgtggagcagtatggagccctgggcggcacagcccggagctctgtggactggcagatccggcaggtgcgggccctgctgcaggcccagcaggcctag

SEQ ID NO: 2972 - DNA, 1395 bp, synthetic construct; identical to SEQ ID NO: 2969
  misc_feature 1..1395: note = source = /note="Description of Artificial Sequence: Synthetic coding sequence"
  source 1..1395: mol_type = other DNA

SEQ ID NO: 2973 - DNA, 297 bp, synthetic construct
  misc_feature 1..297: note = source = /note="Description of Artificial Sequence: Synthetic coding sequence"
  source 1..297: mol_type = other DNA
atggagaagttcaatgccagcatcgcctatgacagacacctgtgggaggtggatgtgcagggcagcaaggcctacagccggggcctggagaaggccggcctgctgaccaaggccgagatggaccagatcctgcacggcctggacaaggtggccgaggagtgggcccagggcaccttcaagctgaacagcaatgatgaggacatccacacagccaatgaaagaaggctgaaggagctgattggagccacagctgggaagctgcacacaggccgcagcagaaatgaccaggtgctgtag

SEQ ID NO: 2974 - DNA, 1239 bp, synthetic construct
  misc_feature 1..1239: note = source = /note="Description of Artificial Sequence: Synthetic coding sequence"
  source 1..1239: mol_type = other DNA
atgagcagcaagggctctgtggtgctggcctacagcggcggcctggacaccagctgcatcctggtgtggctgaaggagcagggctatgatgtgattgcctacctggccaacatcggccagaaggaggactttgaggaggccaggaagaaggccctgaagctgggcgccaagaaggtgttcattgaagatgtgtcccgggagtttgtggaggagttcatctggccagccatccagagcagcgccctgtatgaggaccgctacctgctgggcaccagcctggcccggccctgcatcgccaggaagcaggtggagatcgcccagcgggagggcgccaagtatgtgagccacggggccactggaaaaggaaatgaccaggtgcgctttgagctgagctgctacagcctggccccccagatcaaggtgattgccccctggaggatgcctgagttctacaaccgcttcaagggcagaaatgacctgatggagtatgccaagcagcacggcatccccatccctgtgacccccaagaacccctggagcatggatgagaacctgatgcacatctcctatgaggccggcatcctggagaaccccaagaaccaggcccctcctggcctgtacaccaagacccaggaccctgccaaggcccccaacaccccagacatcctggagattgagttcaagaagggcgtgcctgtgaaggtgaccaacgtgaaggatggcaccacccaccagaccagcctggagctgttcatgtacctgaatgaggtggccggcaagcatggagtgggcagaattgacatcgtggagaaccgcttcatcggcatgaagagccggggcatctatgagaccccagctggcaccatcctgtaccacgcccacctggacatcgaggccttcaccatggaccgggaggtgaggaagatcaagcagggcctgggcctgaagtttgctgagctggtgtacacaggcttctggcacagcccagaatgtgaatttgtgcgccactgcatcgccaagagccaggagcgggtggagggcaaggtgcaggtgtctgtgctgaagggccaggtgtacatcctgggccgggagagccccctgagcctgtacaatgaggagctggtgtccatgaatgtgcagggcgactatgagcccacagatgccaccggcttcatcaacatcaacagcctgcggctgaaggagtaccaccggctgcagagcaaggtgacagccaagtag

SEQ ID NO: 2975 - DNA, 1239 bp, synthetic construct; identical to SEQ ID NO: 2974
  misc_feature 1..1239: note = source = /note="Description of Artificial Sequence: Synthetic coding sequence"
  source 1..1239: mol_type = other DNA

SEQ ID NO: 2976 - DNA, 510 bp, synthetic construct
  misc_feature 1..510: note = source = /note="Description of Artificial Sequence: Synthetic coding sequence"
  source 1..510: mol_type = other DNA
gagcccggccccctgcagctgatggtggtggccgaggcccagggcggcaagcacggcgtgggcagaattgatattgtggagaaccgcttcatcggcatgaagagccggggcatctatgagaccccagctggcaccatcctgtaccacgcccacctggacatcgaggccttcaccatggaccgggaggtgaggaagatcaagcagggcctgggcctgaagtttgctgagctggtgtacacaggcttctggcacagcccagaatgtgaatttgtgcgccactgcatcgccaagagccaggagcgggtggagggcaaggtgcaggtgtctgtgctgaagggccaggtgtacatcctgggccgggagagccccctgagcctgtacaatgaggagctggtgtccatgaatgtgcagggcgactatgagcccacagatgccaccggcttcatcaacatcaacagcctgcggctgaaggagtaccaccggctgcagagcaaggtgacagccaagtag

SEQ ID NO: 2977 - DNA, 1239 bp, synthetic construct; identical to SEQ ID NO: 2974
  misc_feature 1..1239: note = source = /note="Description of Artificial Sequence: Synthetic coding sequence"
  source 1..1239: mol_type = other DNA

SEQ ID NO: 2978 - DNA, 1239 bp, synthetic construct; identical to SEQ ID NO: 2974
  misc_feature 1..1239: note = source = /note="Description of Artificial Sequence: Synthetic coding sequence"
  source 1..1239: mol_type = other DNA

SEQ ID NO: 2979 - DNA, 597 bp, synthetic construct
  misc_feature 1..597: note = source = /note="Description of Artificial Sequence: Synthetic coding sequence"
  source 1..597: mol_type = other DNA
atgagcagcaagggctctgtggtgctggcctacagcggcggcctggacaccagctgcatcctggtgtggctgaaggagcagggctatgatgtgattgcctacctggccaacatcggccagaaggaggactttgaggaggccaggaagaaggccctgaagctgggcgccaagaaggtgttcattgaagatgtgtcccgggagtttgtggaggagttcatctggccagccatccagagcagcgccctgtatgaggaccgctacctgctgggcaccagcctggcccggccctgcatcgccaggaagcaggtggagatcgcccagcgggagggcgccaagtatgtgagccacggggccactggaaaaggaaatgaccaggtgcgctttgagctgagctgctacagcctggccccccagatcaaggtgattgccccctggaggatgcctgagttctacaaccgcttcaagggcagaaatgacctgatggagtatgccaagcagcacggcatccccatccctgtgacccccaagaacccctggagcatggatgagaacctgatgcacatctcctatgaggccggcatcctggagaacccctag

SEQ ID NO: 2980 - DNA, 540 bp, synthetic construct
  misc_feature 1..540: note = source = /note="Description of Artificial Sequence: Synthetic coding sequence"
  source 1..540: mol_type = other DNA
atgagcagcaagggctctgtggtgctggcctacagcggcggcctggacaccagctgcatcctggtgtggctgaaggagcagggctatgatgtgattgcctacctggccaacatcggccagaaggaggactttgaggaggccaggaagaaggccctgaagctgggcgccaagaaggtgttcattgaagatgtgtcccgggagtttgtggaggagttcatctggccagccatccagagcagcgccctgtatgaggaccgctacctgctgggcaccagcctggcccggccctgcatcgccaggaagcaggtggagatcgcccagcgggagggcgccaagtatgtgagccacggggccaccgggaaggtgattgccccctggaggatgcctgagttctacaaccgcttcaagggcagaaatgacctgatggagtatgccaagcagcacggcatccccatccctgtgacccccaagaacccctggagcatggatgagaacctgatgcacatctcctatgaagctggcatcctggagaacccctag

SEQ ID NO: 2981 - DNA, 663 bp, synthetic construct
  misc_feature 1..663: note = source = /note="Description of Artificial Sequence: Synthetic coding sequence"
  source 1..663: mol_type = other DNA
atggagctgggcctgggcggcctgagcaccctgagccactgcccctggccccggcagcagcctgccctgtggcccaccctggccgccctggccctgctgagctctgtggccgaggccagcctgggcagcgcccccaggagccctgccccccgggagggccccccacctgtgctggccagccctgctggccacctgcccggcggccgcacagcccgctggtgcagcggccgggcccggcggcccccaccccagcccagcaggcctgcccctcctcctccagcccctccttctgccctgccccggggcggccgggccgcccgggccggcggccctggcagccgggcccgggccgccggggcccggggctgccgcctgcggagccagctggtgcctgtgcgggccctgggcctgggccacagaagtgatgagctggtgcgcttccgcttctgcagcggcagctgcagaagagcccggagcccccatgacctgagcctggccagcctgctgggcgctggggccctgcggcccccacctggcagcaggcctgtgtcccagccctgctgccggcccaccaggtatgaagctgtgtccttcatggatgtgaacagcacctggaggacagtggaccggctgagcgccacagcctgtggctgcctgggctag

SEQ ID NO: 2982 - DNA, 663 bp, synthetic construct; identical to SEQ ID NO: 2981
  misc_feature 1..663: note = source = /note="Description of Artificial Sequence: Synthetic coding sequence"
  source 1..663: mol_type = other DNA

SEQ ID NO: 2983 - DNA, 687 bp, synthetic construct
  misc_feature 1..687: note = source = /note="Description of Artificial Sequence: Synthetic coding sequence"
  source 1..687: mol_type = other DNA
atggagctgggcctgggcggcctgagcaccctgagccactgcccctggccccggcagcaggcccccctgggcctgagcgcccagcctgccctgtggcccaccctggccgccctggccctgctgagctctgtggccgaggccagcctgggcagcgcccccaggagccctgccccccgggagggccccccacctgtgctggccagccctgctggccacctgcccggcggccgcacagcccgctggtgcagcggccgggcccggcggcccccaccccagcccagcaggcctgcccctcctcctccagcccctccttctgccctgccccggggcggccgggccgcccgggccggcggccctggcagccgggcccgggccgccggggcccggggctgccgcctgcggagccagctggtgcctgtgcgggccctgggcctgggccacagaagtgatgagctggtgcgcttccgcttctgcagcggcagctgcagaagagcccggagcccccatgacctgagcctggccagcctgctgggcgctggggccctgcggcccccacctggcagcaggcctgtgtcccagccctgctgccggcccaccaggtatgaagctgtgtccttcatggatgtgaacagcacctggaggacagtggaccggctgagcgccacagcctgtggctgcctgggctag

SEQ ID NO: 2984 - DNA, 201 bp, synthetic construct
  misc_feature 1..201: note = source = /note="Description of Artificial Sequence: Synthetic coding sequence"
  source 1..201: mol_type = other DNA
atggagctgggcctgggcggcctgagcaccctgagccactgcccctggccccggcagcagcctgccctgtggcccaccctggccgccctggccctgctgagctctgtggccgaggccagcctgggcagcgcccccaggagccctgccccccgggagggccccccacctgtgctggccagccctgctggccacctgccctag

SEQ ID NO: 2985 - DNA, 270 bp, synthetic construct
  misc_feature 1..270: note = source = /note="Description of Artificial Sequence: Synthetic coding sequence"
  source 1..270: mol_type = other DNA
atggagctgggcctgggcggcctgagcaccctgagccactgcccctggccccggcagcaggcccccctgggcctgagcgcccagcctgccctgtggcccaccctggccgccctggccctgctgagctctgtggccgaggccagcctgggcagcgcccccaggagccctgccccccgggagggccccccacctgtgctggccagccctgctggccacctgcccggcggccgcacagcccgctggtgcagcggccgggcccggcggccctag

SEQ ID NO: 2986 - DNA, 201 bp, synthetic construct; identical to SEQ ID NO: 2984
  misc_feature 1..201: note = source = /note="Description of Artificial Sequence: Synthetic coding sequence"
  source 1..201: mol_type = other DNA

SEQ ID NO: 2987 - DNA, 270 bp, synthetic construct; identical to SEQ ID NO: 2985
  misc_feature 1..270: note = source = /note="Description of Artificial Sequence: Synthetic coding sequence"
  source 1..270: mol_type = other DNA

SEQ ID NO: 2988 - DNA, 687 bp, synthetic construct; identical to SEQ ID NO: 2983
  misc_feature 1..687: note = source = /note="Description of Artificial Sequence: Synthetic coding sequence"
  source 1..687: mol_type = other DNA

SEQ ID NO: 2989 - DNA, 1602 bp, synthetic construct
  misc_feature 1..1602: note = source = /note="Description of Artificial Sequence: Synthetic coding sequence"
  source 1..1602: mol_type = other DNA
atgggccccaggggggccgccagcctgccccggggccctggcccccggcggctgctgctgcctgtggtgctgcccctgctgctgctgctgctgctggcccctcctggcagcggggccggggccagccggcccccccacctggtgttcctgctggctgatgacctgggctggaatgatgtgggcttccacggcagccgcatccgcaccccccacctggatgccctggccgccggcggcgtgctgctggacaactactacacccagcccctgtgcacccccagccgcagccagctgctgaccggccgctaccagatcagaacaggcctgcagcaccagatcatctggccctgccagcccagctgtgtgcccctggatgagaagctgctgccccagctgctgaaggaggccggctacaccacccacatggtgggcaagtggcacctgggcatgtacaggaaggagtgcctgcccacccggcggggctttgacacctacttcggctacctgctgggcagcgaggactactacagccatgagcgctgcaccctgattgatgccctgaatgtgacccgctgtgccctggacttcagagatggagaggaggtggccaccggctacaagaacatgtacagcaccaacatcttcaccaagagggccatcgccctgatcaccaaccaccccccagagaagcccctcttcctgtacctggccctgcagagcgtgcatgagcccctgcaggtgcctgaggagtacctgaagccctatgacttcatccaggacaagaacagacaccactacgccggcatggtgtccctgatggatgaggccgtgggcaatgtgacagctgccctgaagagcagcggcctgtggaacaacacagtgttcatcttcagcacagacaatggaggccagaccctggccggcggcaacaactggcccctgcggggcaggaagtggagcctgtgggagggcggcgtgcggggcgtgggctttgtggccagccccctgctgaagcagaagggcgtgaagaaccgggagctgatccacatcagtgactggctgcccaccctggtgaagctggcccggggccacaccaacggcaccaagcccctggatggctttgatgtgtggaagaccatcagcgagggcagccccagccccagaattgagctgctgcacaacatcgaccccaactttgtggacagcagcccctgccccagaaattccatggccccagccaaggatgacagcagcctgcctgagtacagcgccttcaacacctctgtgcatgctgccatcagacatggcaactggaagctgctgaccggctacccaggctgcggctactggttccccccacccagccagtacaacgtgtctgagatccccagcagtgacccccccaccaagaccctgtggctgtttgatattgaccgggaccctgaggagagacatgacctgagccgggagtacccccacatcgtgaccaagctgctgagccggctgcagttctaccacaagcacagcgtgcctgtgtacttccctgcccaggacccccgctgtgaccccaaggccaccggggtgtggggcccctggatgtag

SEQ ID NO: 2990 - DNA, 1602 bp, synthetic construct; identical to SEQ ID NO: 2989
  misc_feature 1..1602: note = source = /note="Description of Artificial Sequence: Synthetic coding sequence"
  source 1..1602: mol_type = other DNA

SEQ ID NO: 2991 - DNA, 1242 bp, synthetic construct
  misc_feature 1..1242: note = source = /note="Description of Artificial Sequence: Synthetic coding sequence"
  source 1..1242: mol_type = other DNA
atgggccccaggggggccgccagcctgccccggggccctggcccccggcggctgctgctgcctgtggtgctgcccctgctgctgctgctgctgctggcccctcctggcagcggggccggggccagccggcccccccacctggtgttcctgctggctgatgacctgggctggaatgatgtgggcttccacggcagccgcatccgcaccccccacctggatgccctggccgccggcggcgtgctgctggacaactactacacccagcccctgtgcacccccagccgcagccagctgctgaccggccgctaccagatcagaacaggcctgcagcaccagatcatctggccctgccagcccagctgtgtgcccctggatgagaagctgctgccccagctgctgaaggaggccggctacaccacccacatggtgggcaagtggcacctgggcatgtacaggaaggagtgcctgcccacccggcggggctttgacacctacttcggctacctgctgggcagcgaggactactacagccatgagcgctgcaccctgattgatgccctgaatgtgacccgctgtgccctggacttcagagatggagaggaggtggccaccggctacaagaacatgtacagcaccaacatcttcaccaagagggccatcgccctgatcaccaaccaccccccagagaagcccctcttcctgtacctggccctgcagagcgtgcatgagcccctgcaggtgcctgaggagtacctgaagccctatgacttcatccaggacaagaacagacaccactacgccggcatggtgtccctgatggatgaggccgtgggcaatgtgacagctgccctgaagagcagcggcctgtggaacaacacagtgttcatcttcagcacagacaatggaggccagaccctggccggcggcaacaactggcccctgcggggcaggaagtggagcctgtgggagggcggcgtgcggggcgtgggctttgtggccagccccctgctgaagcagaagggcgtgaagaaccgggagctgatccacatcagtgactggctgcccaccctggtgaagctggcccggggccacaccaacggcaccaagcccctggatggctttgatgtgtggaagaccatcagcgagggcagccccagccccagaattgagctgctgcacaacatcgaccccaactttgtggacagcagcccctactggccagagtgcagcctgctgctgtag

SEQ ID NO: 2992 - DNA, 138 bp, synthetic construct
  misc_feature 1..138: note = source = /note="Description of Artificial Sequence: Synthetic coding sequence"
  source 1..138: mol_type = other DNA
atgggccccaggggggccgccagcctgccccggggccctggcccccggcggctgctgctgcctgtggtgctgcccctgctgctgctgctgctgctggcccctcctggcagcggggccggggccagccggcccccatag

SEQ ID NO: 2993 - DNA, 1788 bp, synthetic construct
  misc_feature 1..1788: note = source = /note="Description of Artificial Sequence: Synthetic coding sequence"
  source 1..1788: mol_type = other DNA
atggccggccccagcccccccctgcgggccggcgtgggccggcggctgctgggcgtggcccacccagacctgcggccctgcctgtgtggggagctgcaggtggagggcggccctggccctgtgcccggcatgctgcggacctgctacgtgcgcagcccctggaggcggggccccagcagcgcccggggggagcagagcggcagcggccacctggagcaggaggaggtgcagagcggcagcctgctcttccggctgctgctcttcctgagccgcagccctgccagcaggaaccagaggatcctgtacacagtgctggagtgccagcccctgtttgacagcagtgacatgaccatcgccgagtgggtgtgcctggcccagaccatcaagaggcactatgagcagtaccacggctttgtggtgatccacggcacagacaccatggcctttgctgcctccatgctgtccttcatgctggagaacctgcagaagacagtcatcctgaccggggcccaggtgcccatccacgccctgtggagcgatggaagagagaacctgctgggcgccctgctgatggccggccagtatgtgattcctgaggtgtgcctcttcttccagaaccagctgttccggggcaacagagccaccaaggtggatgccaggagatttgctgccttctgcagccccaacctgctgcccctggccaccgtgggcgctgacatcaccatcaaccgggagctggtgaggaaggtggatggcaaggccggcctggtggtgcacagctccatggagcaggatgtgggcctgctgcggctgtacccaggcatcccagctgccctggtgcgggccttcctgcagccccccctgaagggcgtggtgatggagaccttcggcagcggaaatggccccaccaagccagacctgctgcaggagctgcgggtggccacagagcggggcctggtgattgtgaactgcacccactgcctgcagggcgctgtgaccacagattatgctgctggcatggccatggccggggccggggtcatcagcggctttgacatgaccagcgaggccgccctggccaagctgtcctatgtgctgggccagcccggcctgagcctggatgtgaggaaggagctgctgaccaaggacctgcggggggagatgaccccacccagcgtggaggagcggcggcccagcctgcagggcaacaccctgggcggcggcgtgtcctggctgctgagcctgagcggcagccaggaggctgatgccctgagaaatgccctggtgcccagcctggcctgtgccgccgcccatgctggagatgtggaggccctgcaggccctggtggagctgggcagtgacctgggcctggtggacttcaacggccagacccccctgcacgccgccgcccggggcggccacacagaagctgtgaccatgctgctgcagaggggcgtggatgtgaacacccgggacacagatggcttcagccccctgctgctggccgtgcggggccgccaccctggggtgattggcctgctgcgggaggccggggccagcctgagcacccaggagctggaggaggccggcacagagctgtgccgcctggcctacagagctgacctggagggcctgcaggtgtggtggcaggccggggctgacctgggccagcccggctatgatggccacagcgccctgcacgtggccgaggccgccggcaacctggccgtggtggccttcctgcagagcctggagggcgctgtgggcgcccaggccccctgcccctag

SEQ ID NO: 2994 - DNA, 1740 bp, synthetic construct
  misc_feature 1..1740: note = source = /note="Description of Artificial Sequence: Synthetic coding sequence"
  source 1..1740: mol_type = other DNA
atggcccgggctgtgggccctgagcggcggctgctggccgtgtacacaggaggcaccatcggcatgaggtctgagctgggcgtgctggtgcccggcaccggcctggccgccatcctgcggaccctgcccatgtttcatgatgaggagcacgcccgggcccggggcctgtctgaggacaccctggtgctgcccccagccagcaggaaccagaggatcctgtacacagtgctggagtgccagcccctgtttgacagcagtgacatgaccatcgccgagtgggtgtgcctggcccagaccatcaagaggcactatgagcagtaccacggctttgtggtgatccacggcacagacaccatggcctttgctgcctccatgctgtccttcatgctggagaacctgcagaagacagtcatcctgaccggggcccaggtgcccatccacgccctgtggagcgatggaagagagaacctgctgggcgccctgctgatggccggccagtatgtgattcctgaggtgtgcctcttcttccagaaccagctgttccggggcaacagagccaccaaggtggatgccaggagatttgctgccttctgcagccccaacctgctgcccctggccaccgtgggcgctgacatcaccatcaaccgggagctggtgaggaaggtggatggcaaggccggcctggtggtgcacagctccatggagcaggatgtgggcctgctgcggctgtacccaggcatcccagctgccctggtgcgggccttcctgcagccccccctgaagggcgtggtgatggagaccttcggcagcggaaatggccccaccaagccagacctgctgcaggagctgcgggtggccacagagcggggcctggtgattgtgaactgcacccactgcctgcagggcgctgtgaccacagattatgctgctggcatggccatggccggggccggggtcatcagcggctttgacatgaccagcgaggccgccctggccaagctgtcctatgtgctgggccagcccggcctgagcctggatgtgaggaaggagctgctgaccaaggacctgcggggggagatgaccccacccagcgtggaggagcggcggcccagcctgcagggcaacaccctgggcggcggcgtgtcctggctgctgagcctgagcggcagccaggaggctgatgccctgagaaatgccctggtgcccagcctggcctgtgccgccgcccatgctggagatgtggaggccctgcaggccctggtggagctgggcagtgacctgggcctggtggacttcaacggccagacccccctgcacgccgccgcccggggcggccacacagaagctgtgaccatgctgctgcagaggggcgtggatgtgaacacccgggacacagatggcttcagccccctgctgctggccgtgcggggccgccaccctggggtgattggcctgctgcgggaggccggggccagcctgagcacccaggagctggaggaggccggcacagagctgtgccgcctggcctacagagctgacctggagggcctgcaggtgtggtggcaggccggggctgacctgggccagcccggctatgatggccacagcgccctgcacgtggccgaggccgccggcaacctggccgtggtggccttcctgcagagcctggagggcgctgtgggcgcccaggccccctgcccagagcccagctgcttccaggaggtgctgcccggggtgtag

SEQ ID NO: 2995 - DNA, 423 bp, synthetic construct
  misc_feature 1..423: note = source = /note="Description of Artificial Sequence: Synthetic coding sequence"
  source 1..423: mol_type = other DNA
gctgctgcccggggcggccacacagaggccgtgaccatgctgctgcagaggggcgtggatgtgaacacccgggacacagatggcttcagccccctgctgctggccgtgcggggccgccaccctggggtcatcggcctgctgcgggaggccggggccagcctgagcacccaggagctggaggaggccggcacagagctgtgccgcctggcctacagagctgacctggagggcctgcaggtgtggtggcaggccggggctgacctgggccagcccggctatgatggccacagcgccctgcacgtggccgaggccgccggcaacctggccgtggtggccttcctgcagagcctggagggcgctgtgggcgcccaggccccctgcccagagcccagctgcttccaggaggtgctgcccggggtgtag

SEQ ID NO: 2996 - DNA, 1722 bp, synthetic construct
  misc_feature 1..1722: note = source = /note="Description of Artificial Sequence: Synthetic coding sequence"
  source 1..1722: mol_type = other DNA
atggcccgggctgtgggccctgagcggcggctgctggccgtgtacacaggaggcaccatcggcatgaggtctgagctgggcgtgctggtgcccggcaccggcctggccgccatcctgcggaccctgcccatgtttcatgatgaggagcacgcccgggcccggggcctgtctgaggacaccctggtgctgcccccagccagcaggaaccagaggatcctgtacacagtgctggagtgccagcccctgtttgacagcagtgacatgaccatcgccgagtgggtgtgcctggcccagaccatcaagaggcactatgagcagtaccacggctttgtggtgatccacggcacagacaccatggcctttgctgcctccatgctgtccttcatgctggagaacctgcagaagacagtcatcctgaccggggcccaggtgcccatccacgccctgtggagcgatggaagagagaacctgctgggcgccctgctgatggccggccagtatgtgattcctgaggtgtgcctcttcttccagaaccagctgttccggggcaacagagccaccaaggtggatgccaggagatttgctgccttctgcagccccaacctgctgcccctggccaccgtgggcgctgacatcaccatcaaccgggagctggtgaggaaggtggatggcaaggccggcctggtggtgcacagctccatggagcaggatgtgggcctgctgcggctgtacccaggcatcccagctgccctggtgcgggccttcctgcagccccccctgaagggcgtggtgatggagaccttcggcagcggaaatggccccaccaagccagacctgctgcaggagctgcgggtggccacagagcggggcctggtgattgtgaactgcacccactgcctgcagggcgctgtgaccacagattatgctgctggcatggccatggccggggccggggtcatcagcggctttgacatgaccagcgaggccgccctggccaagctgtcctatgtgctgggccagcccggcctgagcctggatgtgaggaaggagctgctgaccaaggacctgcggggggagatgaccccacccagcgtggaggagcggcggcccagcctgcagggcaacaccctgggcggcggcgtgtcctggctgctgagcctgagcggcagccaggaggctgatgccctgagaaatgccctggtgcccagcctggcctgtgccgccgcccatgctggagatgtggaggccctgcaggccctggtggagctgggcagtgacctgggcctggtggacttcaacggccagacccccctgcacgccgccgcccggggcggccacacagaagctgtgaccatgctgctgcagaggggcgtggatgtgaacacccgggacacagatggcttcagccccctgctgctggccgtgcggggccgccaccctggggtgattggcctgctgcgggaggccggggccagcctgagcacccaggagctggaggaggccggcacagagctgtgccgcctggcctacagagctgacctggagggcctgcaggtgtggtggcaggccggggctgacctgggccagcccggctatgatggccacagcgccctgcacgtggccgaggccgccggcaacctggccgtggtggccttcctgcagagcctggagggcgctgtgggcgcccaggccccctgcccagaggtgctgcccggggtgtag

SEQ ID NO: 2997 - DNA, 942 bp, synthetic construct
  misc_feature 1..942: note = source = /note="Description of Artificial Sequence: Synthetic coding sequence"
  source 1..942: mol_type = other DNA
atgaccagctgccacatcgccgaggagcacatccagaaggtggccatctttggaggcacccatggaaatgagctgactggagtcttcctggtgaagcactggctggagaatggagctgagatccagaggacaggcctggaggtgaagcccttcatcaccaaccccagggctgtgaagaagtgcacccgctacatcgactgtgacctgaaccgcatctttgacctggagaacctgggcaagaagatgtctgaggacctgccctatgaggtgagaagagcccaggagatcaaccacctgtttggccccaaggacagcgaggacagctatgacatcatctttgacctgcacaacaccaccagcaacatgggctgcaccctcatcctggaggacagcaggaacaacttcctgatccagatgttccactacatcaagaccagcctggcccccctgccctgctacgtgtacctgattgagcaccccagcctgaagtatgccaccaccaggagcatcgccaagtaccctgtgggcatcgaggtgggcccccagccccagggcgtgctgcgggctgacatcctggaccagatgaggaagatgatcaagcacgccctggacttcatccaccacttcaatgaaggcaaggagttccccccctgtgccatcgaggtgtacaagatcatcgagaaggtggactaccccagagatgaaaatggagaaattgctgccatcatccaccccaacctgcaggaccaggactggaagcccctgcaccctggggaccccatgttcctgaccctggatggcaagaccatccccctgggcggggactgcaccgtgtaccctgtgtttgtgaatgaggccgcctactatgagaagaaggaggcctttgccaagaccaccaagctgaccctgaatgccaagagcatccgctgctgcctgcactag

SEQ ID NO: 2998 - DNA, 942 bp, synthetic construct; identical to SEQ ID NO: 2997
  misc_feature 1..942: note = source = /note="Description of Artificial Sequence: Synthetic coding sequence"
  source 1..942: mol_type = other DNA

SEQ ID NO: 2999 - DNA, 3756 bp, synthetic construct
  misc_feature 1..3756: note = source = /note="Description of Artificial Sequence: Synthetic coding sequence"
  source 1..3756: mol_type = other DNA
atgagcacagagcgggacagcgagaccacctttgatgaggacagccagcccaatgatgaggtggtgccctacagtgatgatgaaacagaagatgagctggatgaccagggcagcgctgtggagcctgagcagaacagagtgaaccgggaggccgaggagaaccgggagcccttcagaaaagaatgtacctggcaggtgaaggccaatgacaggaagtaccacgagcagccccacttcatgaacaccaagttcctgtgcatcaaggagagcaaatatgccaacaatgccatcaagacctacaagtacaatgccttcaccttcatccccatgaacctgtttgagcagttcaagagagctgccaacctgtacttcctggccctgctgatcctgcaggccgtgccccagatcagcaccctggcctggtacaccaccctggtgcccctgctggtggtgctgggcgtgacagccatcaaggacctggtggatgatgtggcccggcacaagatggacaaggagatcaacaacagaacctgtgaggtgatcaaggatggccgcttcaaggtggccaagtggaaggagatccaggtgggagatgtgatccggctgaagaagaatgactttgtgcctgctgacatcctgctgctgagcagcagcgagcccaacagcctgtgctacgtggagacagctgagctggatggagagaccaacctgaagttcaagatgagcctggagatcacagaccagtacctgcagcgggaggacaccctggccacctttgatggcttcattgaatgtgaggagcccaacaaccggctggacaagttcaccggcaccctcttctggaggaacaccagcttccccctggatgctgacaagatcctgctgcggggctgcgtcatccggaacacagacttctgccacggcctggtgatctttgctggagctgacaccaagatcatgaagaacagcggcaagacccgcttcaagaggaccaagattgactacctgatgaactacatggtgtacaccatctttgtggtgctgatcctgctgtctgctggcctggccatcggccacgcctactgggaggcccaggtgggcaacagctcctggtacctgtatgatggagaagatgacacccccagctaccggggcttcctgatcttctggggctacatcatcgtgctgaacaccatggtgcccatcagcctgtatgtgtctgtggaggtgatccggctgggccagagccacttcatcaactgggacctgcagatgtactatgcagagaaggacaccccagccaaggcccggaccaccaccctgaatgagcagctgggccagatccactacatcttcagtgacaagacaggcaccctgacccagaacatcatgaccttcaagaagtgctgcatcaatggccagatctacggggaccacagagatgccagccagcacaaccacaacaagattgagcaggtggacttctcctggaacacctatgcagatggcaagctggccttctatgaccactacctgattgagcagatccagagcggcaaggagcctgaggtgcggcagttcttcttcctgctggccgtgtgccacacagtgatggtggacagaacagatggccagctgaactaccaggccgccagcccagatgagggcgccctggtgaatgctgccaggaactttggatttgccttcctggcccggacccagaacaccatcaccatcagcgagctgggcacagagaggacctacaacgtgctggccatcctggacttcaacagcgacaggaagaggatgagcatcatcgtgaggaccccagagggcaacatcaagctgtactgcaagggagctgacaccgtcatctatgaaaggctgcacaggatgaaccccaccaagcaggagacccaggatgccctggacatctttgccaatgagaccctgcggaccctgtgcctgtgctacaaggagattgaggagaaggagttcacagagtggaacaagaagttcatggccgcctctgtggccagcaccaacagagatgaggccctggacaaggtgtatgaggagattgagaaggacctgatcctgctgggcgccacagccatcgaggacaagctgcaggatggagtgcctgagaccatcagcaagctggccaaggctgacatcaagatctgggtgctgaccggggacaagaaggagacagctgagaacatcggctttgcctgtgagctgctgacagaggacaccaccatctgctatggagaggacatcaacagcctgctgcacgccaggatggagaaccagaggaacagaggaggagtgtatgccaagtttgcccctcctgtgcaggagagcttcttccccccaggcggcaacagagccctgatcatcaccggctcctggctgaatgagatcctgctggagaagaagaccaagaggaacaagatcctgaagctgaagttccccaggacagaggaggagaggaggatgaggacccagagcaagaggcggctggaggccaagaaggagcagaggcagaagaactttgtggacctggcctgtgaatgttctgctgtgatctgctgccgggtgacccccaagcagaaggccatggtggtggacctggtgaagcgctacaagaaggccatcaccctggccatcggagatggagccaatgatgtgaacatgatcaagacagcccacatcggcgtgggcatcagcggccaggagggcatgcaggccgtgatgagcagtgactacagctttgcccagttccgctacctgcagaggctgctgctggtgcacggccgctggagctacatccgcatgtgcaagttcctgcgctacttcttctacaagaactttgccttcaccctggtgcacttctggtacagcttcttcaacggctacagcgcccagacagcctatgaggactggttcatcaccctgtacaacgtgctgtacaccagcctgcctgtgctgctgatgggcctgctggaccaggatgtgtctgacaagctgagcctgcgcttccctggcctgtacatcgtgggccagagggacctgctcttcaactacaagcgcttctttgtgtccctgctgcatggagtgctgacctccatgatcctcttcttcatccccctgggcgcctacctgcagacagtgggccaggatggagaggcccccagcgactaccagagctttgctgtgaccatcgccagcgccctggtgatcaccgtgaacttccagatcggcctggacaccagctactggacctttgtgaatgccttcagcatcttcggcagcatcgccctgtacttcggcatcatgtttgacttccacagcgctggcatccacgtgctcttccccagcgccttccagttcaccggcacagccagcaatgccctgcggcagccctacatctggctgaccatcatcctggccgtggccgtgtgcctgctgcctgtggtggccatccgcttcctgtccatgaccatctggcccagcgagagtgacaagatccagaagcacaggaagaggctgaaggccgaggagcagtggcagaggcggcagcaggtgttcagaagaggagtgtccaccaggagaagtgcctatgccttcagccaccagaggggctacgccgacctgatcagcagcggccgcagcatcaggaagaagaggagccccctggatgccatcgtggctgatggaacagctgagtacagaagaactggagacagctag

SEQ ID NO: 3000 - DNA, 3756 bp, synthetic construct; identical to SEQ ID NO: 2999
  misc_feature 1..3756: note = source = /note="Description of Artificial Sequence: Synthetic coding sequence"
  source 1..3756: mol_type = other DNA

SEQ ID NO: 3001 - DNA, 4398 bp, synthetic construct
  misc_feature 1..4398: note = source = /note="Description of Artificial Sequence: Synthetic coding sequence"
  source 1..4398: mol_type = other DNA
atgcctgagcaggagcggcagatcacagcccgggagggcgccagcaggaagatcctgagcaagctgagcctgcccacccgggcctgggagcccgccatgaagaagagctttgcctttgacaacgtgggctatgagggcggcctggatggcctgggccccagcagccaggtggccaccagcacagtgcgcatcctgggcatgacctgccagagctgtgtgaagagcattgaagatcgcatcagcaacctgaagggcatcatctccatgaaggtgtccctggagcagggcagcgccaccgtgaagtatgtgcccagcgtggtgtgcctgcagcaggtgtgccaccagatcggggacatgggctttgaggccagcattgctgagggcaaggccgcctcctggcccagccgcagcctgcctgcccaggaggccgtggtgaagctgcgggtggagggcatgacctgccagagctgtgtgagcagcattgagggcaaggtgaggaagctgcagggcgtggtgcgggtgaaggtgtccctgagcaaccaggaggccgtcatcacctaccagccctacctgatccagcctgaggacctgcgggaccacgtgaatgacatgggctttgaggccgccatcaagagcaaggtggcccccctgagcctgggccccatcgacatcgagcggctgcagagcaccaaccccaagaggcccctgagcagcgccaaccagaacttcaacaacagcgagaccctgggccaccagggcagccacgtggtgaccctgcagctgagaattgatggcatgcactgcaagagctgtgtgctgaacattgaagaaaatattggccagctgctgggcgtgcagagcatccaggtgtccctggagaacaagacagcccaggtgaagtatgaccccagctgcaccagccctgtggccctgcagagggccatcgaggccctgcccccaggcaacttcaaggtgtccctgcctgatggagctgagggcagcggcacagaccacaggagcagcagcagccacagccctggcagccccccaagaaaccaggtgcagggcacctgcagcaccaccctgattgccatcgccggcatgacctgtgccagctgtgtgcacagcattgagggcatgatcagccagctggagggcgtgcagcagatctctgtgtccctggccgagggcacagccaccgtgctgtacaaccccagcgtcatcagccctgaggagctgcgggccgccatcgaggacatgggctttgaggcctctgtggtgtctgagagctgcagcaccaaccccctgggcaaccacagcgctggcaacagcatggtgcagaccacagatggcacccccacctctgtgcaggaggtggccccccacacaggccgcctgcctgccaaccacgccccagacatcctggccaagagcccccagagcaccagggctgtggccccccagaagtgcttcctgcagatcaagggcatgacctgtgccagctgtgtgagcaacatcgagaggaacctgcagaaggaggccggcgtgctgtctgtgctggtggccctgatggccggcaaggccgagatcaagtatgaccctgaggtgatccagcccctggagatcgcccagttcatccaggacctgggctttgaagctgctgtgatggaggactatgccggcagtgatggcaacatcgagctgaccatcaccggcatgacctgtgccagctgtgtgcacaacatcgagagcaagctgaccaggaccaacggcatcacctacgcctctgtggccctggccaccagcaaggccctggtgaagtttgatcctgagatcatcggcccccgggacatcatcaagatcatcgaggagatcggcttccacgccagcctggcccagaggaaccccaatgcccaccacctggaccacaagatggagatcaagcagtggaagaagagcttcctgtgcagcctggtgtttggcatccctgtgatggccctgatgatctacatgctgatccccagcaatgagccccaccagagcatggtgctggaccacaacatcatccctggcctgagcatcctgaacctgatcttcttcatcctgtgcacctttgtgcagctgctgggcggctggtacttctacgtgcaggcctacaagagcctgcggcacaggtctgccaacatggatgtgctgattgtgctggccaccagcatcgcctacgtgtacagcctggtgatcctggtggtggccgtggccgagaaggccgagaggagccctgtgaccttctttgacaccccacccatgctgtttgtgttcatcgccctgggccgctggctggagcacctggccaagagcaagaccagcgaggccctggccaagctgatgagcctgcaggccacagaggccaccgtggtgaccctgggggaggacaacctgatcatccgggaggagcaggtgcccatggagctggtgcagagaggagacatcgtgaaggtggtgcctgggggcaagtttcctgtggatggcaaggtgctggagggcaacaccatggctgatgagagcctcatcaccggggaggccatgcctgtgaccaagaagccaggcagcacagtgattgctggcagcatcaatgcccacggctctgtgctgatcaaggccacccacgtgggcaatgacaccaccctggcccagatcgtgaagctggtggaggaggcccagatgagcaaggcccccatccagcagctggccgaccgcttcagcggctactttgtgcccttcatcatcatcatgagcaccctgaccctggtggtgtggatcgtcatcggcttcatcgactttggagtggtgcagcgctacttccccaaccccaacaagcacatcagccagacagaggtgatcatccgctttgccttccagaccagcatcaccgtgctgtgcatcgcctgcccctgcagcctgggcctggccacccccacagctgtgatggtgggcactggagtggccgcccagaatggcatcctgatcaagggcggcaagcccctggagatggcccacaagatcaagacagtgatgtttgacaagacaggcaccatcacccacggcgtgccccgggtgatgagggtgctgctgctgggagatgtggccaccctgcccctgaggaaggtgctggccgtggtgggcacagctgaggccagcagcgagcaccccctgggcgtggccgtgaccaagtactgcaaggaggagctgggcacagagaccctgggctactgcacagacttccaggccgtgcccggctgcggcatcggctgcaaggtgtccaatgtggagggcatcctggcccacagcgagcggcccctgagcgccccagccagccacctgaatgaggccggcagcctgcctgctgagaaggatgctgtgccccagaccttctctgtgctgattggcaaccgggagtggctgcggagaaatggcctgaccatcagcagtgatgtgtctgatgccatgacagaccacgagatgaagggccagacagccatcctggtggccattgatggagtgctgtgtggcatgattgccatcgcagatgctgtgaagcaggaggccgccctggccgtgcacaccctgcagagcatgggcgtggatgtggtgctgatcaccggggacaacaggaagacagcccgggccatcgccacccaggtgggcatcaacaaggtgtttgctgaggtgctgcccagccacaaggtggccaaggtgcaggagctgcagaacaagggcaagaaggtggccatggtgggagatggagtgaatgacagccctgccctggcccaggccgacatgggcgtggccatcggcaccggcacagatgtggccatcgaggccgcagatgtggtgctgatcagaaatgacctgctggatgtggtggccagcatccacctgagcaagaggacagtgcggcgcatccgcatcaacctggtgctggccctgatctacaacctggtgggcatccccatcgccgccggggtcttcatgcccatcggcatcgtgctgcagccctggatgggcagcgctgccatggccgccagctctgtgtctgtggtgctgagcagcctgcagctgaagtgctacaagaagccagacctggagagatatgaggcccaggcccacggccacatgaagcccctgacagccagccaggtgtctgtgcacatcggcatggatgaccgctggagggacagcccccgggccaccccctgggaccaggtgtcctatgtgtcccaggtgtccctgagcagcctgaccagtgacaagcccagccgccacagcgctgctgctgatgatgatggagacaagtggagcctgctgctgaatggaagagatgaggagcagtacatctag

SEQ ID NO: 3002 - DNA, 3777 bp, synthetic construct
  misc_feature 1..3777: note = source = /note="Description of Artificial Sequence: Synthetic coding sequence"
  source 1..3777: mol_type = other DNA
atgcctgagcaggagcggcagatcacagcccgggagggcgccagcaggaagatcctgagcaagctgagcctgcccacccgggcctgggagcccgccatgaagaagagctttgcctttgacaacgtgggctatgagggcggcctggatggcctgggccccagcagccaggtggccaccagcacagtgcgcatcctgggcatgacctgccagagctgtgtgaagagcattgaagatcgcatcagcaacctgaagggcatcatctccatgaaggtgtccctggagcagggcagcgccaccgtgaagtatgtgcccagcgtggtgtgcctgcagcaggtgtgccaccagatcggggacatgggctttgaggccagcattgctgagggcaaggccgcctcctggcccagccgcagcctgcctgcccaggaggccgtggtgaagctgcgggtggagggcatgacctgccagagctgtgtgagcagcattgagggcaaggtgaggaagctgcagggcgtggtgcgggtgaaggtgtccctgagcaaccaggaggccgtcatcacctaccagccctacctgatccagcctgaggacctgcgggaccacgtgaatgacatgggctttgaggccgccatcaagagcaaggtggcccccctgagcctgggccccatcgacatcgagcggctgcagagcaccaaccccaagaggcccctgagcagcgccaaccagaacttcaacaacagcgagaccctgggccaccagggcagccacgtggtgaccctgcagctgagaattgatggcatgcactgcaagagctgtgtgctgaacattgaagaaaatattggccagctgctgggcgtgcagagcatccaggtgtccctggagaacaagacagcccaggtgaagtatgaccccagctgcaccagccctgtggccctgcagagggccatcgaggccctgcccccaggcaacttcaaggtgtccctgcctgatggagctgagggcagcggcacagaccacaggagcagcagcagccacagccctggcagccccccaagaaaccaggtgcagggcacctgcagcaccaccctgattgccatcgccggcatgacctgtgccagctgtgtgcacagcattgagggcatgatcagccagctggagggcgtgcagcagatctctgtgtccctggccgagggcacagccaccgtgctgtacaaccccagcgtcatcagccctgaggagctgcgggccgccatcgaggacatgggctttgaggcctctgtggtgtctgagagctgcagcaccaaccccctgggcaaccacagcgctggcaacagcatggtgcagaccacagatggcacccccacctctgtgcaggaggtggccccccacacaggccgcctgcctgccaaccacgccccagacatcctggccaagagcccccagagcaccagggctgtggccccccagaagtgcttcctgcagatcaagggcatgacctgtgccagctgtgtgagcaacatcgagaggaacctgcagaaggaggccggcgtgctgtctgtgctggtggccctgatggccggcaaggccgagatcaagtatgaccctgaggtgatccagcccctggagatcgcccagttcatccaggacctgggctttgaagctgctgtgatggaggactatgccggcagtgatggcaacatcgagctgaccatcaccggcatgacctgtgccagctgtgtgcacaacatcgagagcaagctgaccaggaccaacggcatcacctacgcctctgtggccctggccaccagcaaggccctggtgaagtttgatcctgagatcatcggcccccgggacatcatcaagatcatcgagagcaagaccagcgaggccctggccaagctgatgagcctgcaggccacagaggccaccgtggtgaccctgggggaggacaacctgatcatccgggaggagcaggtgcccatggagctggtgcagagaggagacatcgtgaaggtggtgcctgggggcaagtttcctgtggatggcaaggtgctggagggcaacaccatggctgatgagagcctcatcaccggggaggccatgcctgtgaccaagaagccaggcagcacagtgattgctggcagcatcaatgcccacggctctgtgctgatcaaggccacccacgtgggcaatgacaccaccctggcccagatcgtgaagctggtggaggaggcccagatgagcaagaaccccaacaagcacatcagccagacagaggtgatcatccgctttgccttccagaccagcatcaccgtgctgtgcatcgcctgcccctgcagcctgggcctggccacccccacagctgtgatggtgggcaccggggtggccgcccagaatggcatcctgatcaagggcggcaagcccctggagatggcccacaagatcaagacagtgatgtttgacaagacaggcaccatcacccatggagtgccccgggtgatgagggtgctgctgctgggagatgtggccaccctgcccctgaggaaggtgctggccgtggtgggcacagctgaggccagcagcgagcaccccctgggcgtggccgtgaccaagtactgcaaggaggagctgggcacagagaccctgggctactgcacagacttccaggccgtgcccggctgcggcatcggctgcaaggtgtccaatgtggagggcatcctggcccacagcgagcggcccctgagcgccccagccagccacctgaatgaagctggcagcctgcctgctgagaaggatgctgtgccccagaccttctctgtgctgattggcaaccgggagtggctgcggagaaatggcctgaccatcagcagtgatgtgtctgatgccatgacagaccacgagatgaagggccagacagccatcctggtggccattgatggagtgctgtgtggcatgattgccatcgcagatgctgtgaagcaggaggccgccctggccgtgcacaccctgcagagcatgggcgtggatgtggtgctgatcactggagacaacaggaagacagcccgggccatcgccacccaggtgggcatcaacaaggtgtttgctgaggtgctgcccagccacaaggtggccaaggtgcaggagctgcagaacaagggcaagaaggtggccatggtgggagatggagtgaatgacagccctgccctggcccaggccgacatgggcgtggccatcggcactggaacagatgtggccattgaagctgctgatgtggtgctgatcagaaatgacctgctggatgtggtggccagcatccacctgagcaagaggacagtgcggcgcatccgcatcaacctggtgctggccctgatctacaacctggtgggcatccccatcgctgctggggtcttcatgcccatcggcatcgtgctgcagccctggatgggcagcgctgccatggccgccagctctgtgtctgtggtgctgagcagcctgcagctgaagtgctacaagaagccagacctggagagatatgaggcccaggcccacggccacatgaagcccctgacagccagccaggtgtctgtgcacatcggcatggatgaccgctggagggacagcccccgggccaccccctgggaccaggtgtcctatgtgtcccaggtgtccctgagcagcctgaccagtgacaagcccagccgccacagcgctgctgctgatgatgatggagacaagtggagcctgctgctgaatggaagagatgaggagcagtacatctag

SEQ ID NO: 3003 - DNA, 4065 bp, synthetic construct
  misc_feature 1..4065: note = source = /note="Description of Artificial Sequence: Synthetic coding sequence"
  source 1..4065: mol_type = other DNA
atgcctgagcaggagcggcagatcacagcccgggagggcgccagcaggaagatcctgagcaagctgagcctgcccacccgggcctgggagcccgccatgaagaagagctttgcctttgacaacgtgggctatgagggcggcctggatggcctgggccccagcagccaggtggccaccagcacagtgcgcatcctgggcatgacctgccagagctgtgtgaagagcattgaagatcgcatcagcaacctgaagggcatcatctccatgaaggtgtccctggagcagggcagcgccaccgtgaagtatgtgcccagcgtggtgtgcctgcagcaggtgtgccaccagatcggggacatgggctttgaggccagcattgctgagggcaaggccgcctcctggcccagccgcagcctgcctgcccaggaggccgtggtgaagctgcgggtggagggcatgacctgccagagctgtgtgagcagcattgagggcaaggtgaggaagctgcagggcgtggtgcgggtgaaggtgtccctgagcaaccaggaggccgtcatcacctaccagccctacctgatccagcctgaggacctgcgggaccacgtgaatgacatgggctttgaggccgccatcaagagcaaggtggcccccctgagcctgggccccatcgacatcgagcggctgcagagcaccaaccccaagaggcccctgagcagcgccaaccagaacttcaacaacagcgagaccctgggccaccagggcagccacgtggtgaccctgcagctgagaattgatggcatgcactgcatgatcagccagctggagggcgtgcagcagatctctgtgtccctggccgagggcacagccaccgtgctgtacaaccccagcgtcatcagccctgaggagctgcgggccgccatcgaggacatgggctttgaggcctctgtggtgtctgagagctgcagcaccaaccccctgggcaaccacagcgctggcaacagcatggtgcagaccacagatggcacccccacctctgtgcaggaggtggccccccacacaggccgcctgcctgccaaccacgccccagacatcctggccaagagcccccagagcaccagggctgtggccccccagaagtgcttcctgcagatcaagggcatgacctgtgccagctgtgtgagcaacattgaaagaaacctgcagaaggaggccggcgtgctgtctgtgctggtggccctgatggccggcaaggccgagatcaagtatgaccctgaggtgatccagcccctggagatcgcccagttcatccaggacctgggctttgaggccgctgtgatggaggactatgccggcagtgatggcaacatcgagctgaccatcaccggcatgacctgtgccagctgtgtgcacaacatcgagagcaagctgaccaggaccaacggcatcacctacgcctctgtggccctggccaccagcaaggccctggtgaagtttgatcctgagatcatcggcccccgggacatcatcaagatcatcgaggagatcggcttccacgccagcctggcccagaggaaccccaatgcccaccacctggaccacaagatggagatcaagcagtggaagaagagcttcctgtgcagcctggtgtttggcatccctgtgatggccctgatgatctacatgctgatccccagcaatgagccccaccagagcatggtgctggaccacaacatcatccctggcctgagcatcctgaacctgatcttcttcatcctgtgcacctttgtgcagctgctgggcggctggtacttctacgtgcaggcctacaagagcctgcggcacaggtctgccaacatggatgtgctgattgtgctggccaccagcatcgcctacgtgtacagcctggtgatcctggtggtggccgtggccgagaaggccgagaggagccctgtgaccttctttgacaccccacccatgctgtttgtgttcatcgccctgggccgctggctggagcacctggccaagagcaagaccagcgaggccctggccaagctgatgagcctgcaggccacagaggccaccgtggtgaccctgggggaggacaacctgatcatccgggaggagcaggtgcccatggagctggtgcagagaggagacatcgtgaaggtggtgcctgggggcaagtttcctgtggatggcaaggtgctggagggcaacaccatggctgatgagagcctcatcactggagaggccatgcctgtgaccaagaagccaggcagcacagtgattgctggcagcatcaatgcccacggctctgtgctgatcaaggccacccacgtgggcaatgacaccaccctggcccagatcgtgaagctggtggaggaggcccagatgagcaaggcccccatccagcagctggccgaccgcttcagcggctactttgtgcccttcatcatcatcatgagcaccctgaccctggtggtgtggatcgtgattggcttcatcgactttggagtggtgcagcgctacttccccaaccccaacaagcacatcagccagacagaggtgatcatccgctttgccttccagaccagcatcaccgtgctgtgcatcgcctgcccctgcagcctgggcctggccacccccacagctgtgatggtgggcaccggggtggccgcccagaatggcatcctgatcaagggcggcaagcccctggagatggcccacaagatcaagacagtgatgtttgacaagacaggcaccatcacccatggagtgccccgggtgatgagggtgctgctgctgggagatgtggccaccctgcccctgaggaaggtgctggccgtggtgggcacagctgaggccagcagcgagcaccccctgggcgtggccgtgaccaagtactgcaaggaggagctgggcacagagaccctgggctactgcacagacttccaggccgtgcccggctgcggcatcggctgcaaggtgtccaatgtggagggcatcctggcccacagcgagcggcccctgagcgccccagccagccacctgaatgaagctggcagcctgcctgctgagaaggatgctgtgccccagaccttctctgtgctgattggcaaccgggagtggctgcggagaaatggcctgaccatcagcagtgatgtgtctgatgccatgacagaccacgagatgaagggccagacagccatcctggtggccattgatggagtgctgtgtggcatgattgccatcgcagatgctgtgaagcaggaggccgccctggccgtgcacaccctgcagagcatgggcgtggatgtggtgctgatcactggagacaacaggaagacagcccgggccatcgccacccaggtgggcatcaacaaggtgtttgctgaggtgctgcccagccacaaggtggccaaggtgcaggagctgcagaacaagggcaagaaggtggccatggtgggagatggagtgaatgacagccctgccctggcccaggccgacatgggcgtggccatcggcactggaacagatgtggccattgaagctgctgatgtggtgctgatcagaaatgacctgctggatgtggtggccagcatccacctgagcaagaggacagtgcggcgcatccgcatcaacctggtgctggccctgatctacaacctggtgggcatccccatcgctgctggggtcttcatgcccatcggcatcgtgctgcagccctggatgggcagcgctgccatggccgccagctctgtgtctgtggtgctgagcagcctgcagctgaagtgctacaagaagccagacctggagagatatgaggcccaggcccacggccacatgaagcccctgacagccagccaggtgtctgtgcacatcggcatggatgaccgctggagggacagcccccgggccaccccctgggaccaggtgtcctatgtgtcccaggtgtccctgagcagcctgaccagtgacaagcccagccgccacagcgctgctgctgatgatgatggagacaagtggagcctgctgctgaatggaagagatgaggagcagtacatctag

SEQ ID NO: 3004 - DNA, 3108 bp, synthetic construct
  misc_feature 1..3108: note = source = /note="Description of Artificial Sequence: Synthetic coding sequence"
  source 1..3108: mol_type = other DNA
atgcctgagcaggagcggcagatcacagcccgggagggcgccagcaggaagatcctgagcaagctgagcctgcccacccgggcctgggagcccgccatgaagaagagctttgcctttgacaacgtgggctatgagggcggcctggatggcctgggccccagcagccaggtggccaccagcacagtgcgcatcctgggcatgacctgccagagctgtgtgaagagcattgaagatcgcatcagcaacctgaagggcatcatctccatgaaggtgtccctggagcagggcagcgccaccgtgaagtatgtgcccagcgtggtgtgcctgcagcaggtgtgccaccagatcggggacatgggctttgaggccagcattgctgagggcaaggccgcctcctggcccagccgcagcctgcctgcccaggaggccgtggtgaagctgcgggtggagggcatgacctgccagagctgtgtgagcagcattgagggcaaggtgaggaagctgcagggcgtggtgcgggtgaaggtgtccctgagcaaccaggaggccgtcatcacctaccagccctacctgatccagcctgaggacctgcgggaccacgtgaatgacatgggctttgaggccgccatcaagagcaaggtggcccccctgagcctgggccccatcgacatcgagcggctgcagagcaccaaccccaagaggcccctgagcagcgccaaccagaacttcaacaacagcgagaccctgggccaccagggcagccacgtggtgaccctgcagctgagaattgatggcatgcactgcaagagctgtgtgctgaacattgaagaaaatattggccagctgctgggcgtgcagagcatccaggtgtccctggagaacaagacagcccaggtgaagtatgaccccagctgcaccagccctgtggccctgcagagggccatcgaggccctgcccccaggcaacttcaaggtgtccctgcctgatggagctgagggcagcggcacagaccacaggagcagcagcagccacagccctggcagccccccaagaaaccaggtgcagggcacctgcagcaccaccctgattgccatcgccggcatgacctgtgccagctgtgtgcacagcattgagggcatgatcagccagctggagggcgtgcagcagatctctgtgtccctggccgagggcacagccaccgtgctgtacaaccccagcgtcatcagccctgaggagctgcgggccgccatcgaggacatgggctttgaggcctctgtggtgtctggagaggccatgcctgtgaccaagaagccaggcagcacagtgattgctggcagcatcaatgcccacggctctgtgctgatcaaggccacccacgtgggcaatgacaccaccctggcccagatcgtgaagctggtggaggaggcccagatgagcaaggcccccatccagcagctggccgaccgcttcagcggctactttgtgcccttcatcatcatcatgagcaccctgaccctggtggtgtggatcgtcatcggcttcatcgactttggagtggtgcagcgctacttccccaaccccaacaagcacatcagccagacagaggtgatcatccgctttgccttccagaccagcatcaccgtgctgtgcatcgcctgcccctgcagcctgggcctggccacccccacagctgtgatggtgggcactggagtggccgcccagaatggcatcctgatcaagggcggcaagcccctggagatggcccacaagatcaagacagtgatgtttgacaagacaggcaccatcacccacggcgtgccccgggtgatgagggtgctgctgctgggagatgtggccaccctgcccctgaggaaggtgctggccgtggtgggcacagctgaggccagcagcgagcaccccctgggcgtggccgtgaccaagtactgcaaggaggagctgggcacagagaccctgggctactgcacagacttccaggccgtgcccggctgcggcatcggctgcaaggtgtccaatgtggagggcatcctggcccacagcgagcggcccctgagcgccccagccagccacctgaatgaggccggcagcctgcctgctgagaaggatgctgtgccccagaccttctctgtgctgattggcaaccgggagtggctgcggagaaatggcctgaccatcagcagtgatgtgtctgatgccatgacagaccacgagatgaagggccagacagccatcctggtggccattgatggagtgctgtgtggcatgattgccatcgcagatgctgtgaagcaggaggccgccctggccgtgcacaccctgcagagcatgggcgtggatgtggtgctgatcaccggggacaacaggaagacagcccgggccatcgccacccaggtgggcatcaacaaggtgtttgctgaggtgctgcccagccacaaggtggccaaggtgcaggagctgcagaacaagggcaagaaggtggccatggtgggagatggagtgaatgacagccctgccctggcccaggccgacatgggcgtggccatcggcaccggcacagatgtggccatcgaggccgcagatgtggtgctgatcagaaatgacctgctggatgtggtggccagcatccacctgagcaagaggacagtgcggcgcatccgcatcaacctggtgctggccctgatctacaacctggtgggcatccccatcgccgccggggtcttcatgcccatcggcatcgtgctgcagccctggatgggcagcgctgccatggccgccagctctgtgtctgtggtgctgagcagcctgcagctgaagtgctacaagaagccagacctggagagatatgaggcccaggcccacggccacatgaagcccctgacagccagccaggtgtctgtgcacatcggcatggatgaccgctggagggacagcccccgggccaccccctgggaccaggtgtcctatgtgtcccaggtgtccctgagcagcctgaccagtgacaagcccagccgccacagcgctgctgctgatgatgatggagacaagtggagcctgctgctgaatggaagagatgaggagcagtacatctag

SEQ ID NO: 3005 - DNA, 2031 bp, synthetic construct
  misc_feature 1..2031: note = source = /note="Description of Artificial Sequence: Synthetic coding sequence"
  source 1..2031: mol_type = other DNA
atggatgtgctgattgtgctggccaccagcatcgcctacgtgtacagcctggtgatcctggtggtggccgtggccgagaaggccgagaggagccctgtgaccttctttgacaccccacccatgctgtttgtgttcatcgccctgggccgctggctggagcacctggccaagagcaagaccagcgaggccctggccaagctgatgagcctgcaggccacagaggccaccgtggtgaccctgggggaggacaacctgatcatccgggaggagcaggtgcccatggagctggtgcagagaggagacatcgtgaaggtggtgcctgggggcaagtttcctgtggatggcaaggtgctggagggcaacaccatggctgatgagagcctcatcaccggggaggccatgcctgtgaccaagaagccaggcagcacagtgattgctggcagcatcaatgcccacggctctgtgctgatcaaggccacccacgtgggcaatgacaccaccctggcccagatcgtgaagctggtggaggaggcccagatgagcaaggcccccatccagcagctggccgaccgcttcagcggctactttgtgcccttcatcatcatcatgagcaccctgaccctggtggtgtggatcgtcatcggcttcatcgactttggagtggtgcagcgctacttccccaaccccaacaagcacatcagccagacagaggtgatcatccgctttgccttccagaccagcatcaccgtgctgtgcatcgcctgcccctgcagcctgggcctggccacccccacagctgtgatggtgggcactggagtggccgcccagaatggcatcctgatcaagggcggcaagcccctggagatggcccacaaggagctgggcacagagaccctgggctactgcacagacttccaggccgtgcccggctgcggcatcggctgcaaggtgtccaatgtggagggcatcctggcccacagcgagcggcccctgagcgccccagccagccacctgaatgaagctggcagcctgcctgctgagaaggatgctgtgccccagaccttctctgtgctgattggcaaccgggagtggctgcggagaaatggcctgaccatcagcagtgatgtgtctgatgccatgacagaccacgagatgaagggccagacagccatcctggtggccattgatggagtgctgtgtggcatgattgccatcgcagatgctgtgaagcaggaggccgccctggccgtgcacaccctgcagagcatgggcgtggatgtggtgctgatcactggagacaacaggaagacagcccgggccatcgccacccaggtgggcatcaacaaggtgtttgctgaggtgctgcccagccacaaggtggccaaggtgcaggagctgcagaacaagggcaagaaggtggccatggtgggagatggagtgaatgacagccctgccctggcccaggccgacatgggcgtggccatcggcactggaacagatgtggccattgaagctgctgatgtggtgctgatcagaaatgacctgctggatgtggtggccagcatccacctgagcaagaggacagtgcggcgcatccgcatcaacctggtgctggccctgatctacaacctggtgggcatccccatcgctgctggggtcttcatgcccatcggcatcgtgctgcagccctggatgggcagcgctgccatggccgccagctctgtgtctgtggtgctgagcagcctgcagctgaagtgctacaagaagccagacctggagagatatgaggcccaggcccacggccacatgaagcccctgacagccagccaggtgtctgtgcacatcggcatggatgaccgctggagggacagcccccgggccaccccctgggaccaggtgtcctatgtgtcccaggtgtccctgagcagcctgaccagtgacaagcccagccgccacagcgctgctgctgatgatgatggagacaagtggagcctgctgctgaatggaagagatgaggagcagtacatctag

SEQ ID NO: 3006 - DNA, 4203 bp, synthetic construct
  misc_feature 1..4203: note = source = /note="Description of Artificial Sequence: Synthetic coding sequence"
  source 1..4203: mol_type = other DNA
atgcctgagcaggagcggcagatcacagcccgggagggcgccagcaggaagatcctgagcaagctgagcctgcccacccgggcctgggagcccgccatgaagaagagctttgcctttgacaacgtgggctatgagggcggcctggatggcctgggccccagcagccaggtggccaccagcacagtgcgcatcctgggcatgacctgccagagctgtgtgaagagcattgaagatcgcatcagcaacctgaagggcatcatctccatgaaggtgtccctggagcagggcagcgccaccgtgaagtatgtgcccagcgtggtgtgcctgcagcaggtgtgccaccagatcggggacatgggctttgaggccagcattgctgagggcaaggccgcctcctggcccagccgcagcctgcctgcccaggaggccgtggtgaagctgcgggtggagggcatgacctgccagagctgtgtgagcagcattgagggcaaggtgaggaagctgcagggcgtggtgcgggtgaaggtgtccctgagcaaccaggaggccgtcatcacctaccagccctacctgatccagcctgaggacctgcgggaccacgtgaatgacatgggctttgaggccgccatcaagagcaaggtggcccccctgagcctgggccccatcgacatcgagcggctgcagagcaccaaccccaagaggcccctgagcagcgccaaccagaacttcaacaacagcgagaccctgggccaccagggcagccacgtggtgaccctgcagctgagaattgatggcatgcactgcaagagctgtgtgctgaacattgaagaaaatattggccagctgctgggcgtgcagagcatccaggtgtccctggagaacaagacagcccaggtgaagtatgaccccagctgcaccagccctgtggccctgcagagggccatcgaggccctgcccccaggcaacttcaaggtgtccctgcctgatggagctgagggcagcggcacagaccacaggagcagcagcagccacagccctggcagccccccaagaaaccaggtgcagggcacctgcagcaccaccctgattgccatcgccggcatgacctgtgccagctgtgtgcacagcattgagggcatgatcagccagctggagggcgtgcagcagatctctgtgtccctggccgagggcacagccaccgtgctgtacaaccccagcgtcatcagccctgaggagctgcgggccgccatcgaggacatgggctttgaggcctctgtggtgtctgagagctgcagcaccaaccccctgggcaaccacagcgctggcaacagcatggtgcagaccacagatggcacccccacctctgtgcaggaggtggccccccacacaggccgcctgcctgccaaccacgccccagacatcctggccaagagcccccagagcaccagggctgtggccccccagaagtgcttcctgcagatcaagggcatgacctgtgccagctgtgtgagcaacatcgagaggaacctgcagaaggaggccggcgtgctgtctgtgctggtggccctgatggccggcaaggccgagatcaagtatgaccctgaggtgatccagcccctggagatcgcccagttcatccaggacctgggctttgaagctgctgtgatggaggactatgccggcagtgatggcaacatcgagctgaccatcaccggcatgacctgtgccagctgtgtgcacaacatcgagagcaagctgaccaggaccaacggcatcacctacgcctctgtggccctggccaccagcaaggccctggtgaagtttgatcctgagatcatcggcccccgggacatcatcaagatcatcgaggagatcggcttccacgccagcctggcccagaggaaccccaatgcccaccacctggaccacaagatggagatcaagcagtggaagaagagcttcctgtgcagcctggtgtttggcatccctgtgatggccctgatgatctacatgctgatccccagcaatgagccccaccagagcatggtgctggaccacaacatcatccctggcctgagcatcctgaacctgatcttcttcatcctgtgcacctttgtgcagctgctgggcggctggtacttctacgtgcaggcctacaagagcctgcggcacaggtctgccaacatggatgtgctgattgtgctggccaccagcatcgcctacgtgtacagcctggtgatcctggtggtggccgtggccgagaaggccgagaggagccctgtgaccttctttgacaccccacccatgctgtttgtgttcatcgccctgggccgctggctggagcacctggccaagagcaagaccagcgaggccctggccaagctgatgagcctgcaggccacagaggccaccgtggtgaccctgggggaggacaacctgatcatccgggaggagcaggtgcccatggagctggtgcagagaggagacatcgtgaaggtggtgcctgggggcaagtttcctgtggatggcaaggtgctggagggcaacaccatggctgatgagagcctcatcaccggggaggccatgcctgtgaccaagaagccaggcagcacagtgattgctggcagcatcaatgcccacggctctgtgctgatcaaggccacccacgtgggcaatgacaccaccctggcccagatcgtgaagctggtggaggaggcccagatgagcaaggcccccatccagcagctggccgaccgcttcagcggctactttgtgcccttcatcatcatcatgagcaccctgaccctggtggtgtggatcgtcatcggcttcatcgactttggagtggtgcagcgctacttccccatcaagacagtgatgtttgacaagacaggcaccatcacccatggagtgccccgggtgatgagggtgctgctgctgggagatgtggccaccctgcccctgaggaaggtgctggccgtggtgggcacagctgaggccagcagcgagcaccccctgggcgtggccgtgaccaagtactgcaaggaggagctgggcacagagaccctgggctactgcacagacttccaggccgtgcccggctgcggcatcggctgcaaggtgtccaatgtggagggcatcctggcccacagcgagcggcccctgagcgccccagccagccacctgaatgaagctggcagcctgcctgctgagaaggatgctgtgccccagaccttctctgtgctgattggcaaccgggagtggctgcggagaaatggcctgaccatcagcagtgatgtgtctgatgccatgacagaccacgagatgaagggccagacagccatcctggtggccattgatggagtgctgtgtggcatgattgccatcgcagatgctgtgaagcaggaggccgccctggccgtgcacaccctgcagagcatgggcgtggatgtggtgctgatcactggagacaacaggaagacagcccgggccatcgccacccaggtgggcatcaacaaggtgtttgctgaggtgctgcccagccacaaggtggccaaggtgcaggagctgcagaacaagggcaagaaggtggccatggtgggagatggagtgaatgacagccctgccctggcccaggccgacatgggcgtggccatcggcactggaacagatgtggccattgaagctgctgatgtggtgctgatcagaaatgacctgctggatgtggtggccagcatccacctgagcaagaggacagtgcggcgcatccgcatcaacctggtgctggccctgatctacaacctggtgggcatccccatcgctgctggggtcttcatgcccatcggcatcgtgctgcagccctggatgggcagcgctgccatggccgccagctctgtgtctgtggtgctgagcagcctgcagctgaagtgctacaagaagccagacctggagagatatgaggcccaggcccacggccacatgaagcccctgacagccagccaggtgtctgtgcacatcggcatggatgaccgctggagggacagcccccgggccaccccctgggaccaggtgtcctatgtgtcccaggtgtccctgagcagcctgaccagtgacaagcccagccgccacagcgctgctgctgatgatgatggagacaagtggagcctgctgctgaatggaagagatgaggagcagtacatctag

SEQ ID NO: 3007 - DNA, 4164 bp, synthetic construct
  misc_feature 1..4164: note = source = /note="Description of Artificial Sequence: Synthetic coding sequence"
  source 1..4164: mol_type = other DNA
atgcctgagcaggagcggcagatcacagcccgggagggcgccagcaggaagatcctgagcaagctgagcctgcccacccgggcctgggagcccgccatgaagaagagctttgcctttgacaacgtgggctatgagggcggcctggatggcctgggccccagcagccaggtggccaccagcacagtgcgcatcctgggcatgacctgccagagctgtgtgaagagcattgaagatcgcatcagcaacctgaagggcatcatctccatgaaggtgtccctggagcagggcagcgccaccgtgaagtatgtgcccagcgtggtgtgcctgcagcaggtgtgccaccagatcggggacatgggctttgaggccagcattgctgagggcaaggccgcctcctggcccagccgcagcctgcctgcccaggaggccgtggtgaagctgcgggtggagggcatgacctgccagagctgtgtgagcagcattgagggcaaggtgaggaagctgcagggcgtggtgcgggtgaaggtgtccctgagcaaccaggaggccgtcatcacctaccagccctacctgatccagcctgaggacctgcgggaccacgtgaatgacatgggctttgaggccgccatcaagagcaaggtggcccccctgagcctgggccccatcgacatcgagcggctgcagagcaccaaccccaagaggcccctgagcagcgccaaccagaacttcaacaacagcgagaccctgggccaccagggcagccacgtggtgaccctgcagctgagaattgatggcatgcactgcaagagctgtgtgctgaacattgaagaaaatattggccagctgctgggcgtgcagagcatccaggtgtccctggagaacaagacagcccaggtgaagtatgaccccagctgcaccagccctgtggccctgcagagggccatcgaggccctgcccccaggcaacttcaaggtgtccctgcctgatggagctgagggcagcggcacagaccacaggagcagcagcagccacagccctggcagccccccaagaaaccaggtgcagggcacctgcagcaccaccctgattgccatcgccggcatgacctgtgccagctgtgtgcacagcattgagggcatgatcagccagctggagggcgtgcagcagatctctgtgtccctggccgagggcacagccaccgtgctgtacaaccccagcgtcatcagccctgaggagctgcgggccgccatcgaggacatgggctttgaggcctctgtggtgtctgagagctgcagcaccaaccccctgggcaaccacagcgctggcaacagcatggtgcagaccacagatggcacccccacctctgtgcaggaggtggccccccacacaggccgcctgcctgccaaccacgccccagacatcctggccaagagcccccagagcaccagggctgtggccccccagaagtgcttcctgcagatcaagggcatgacctgtgccagctgtgtgagcaacatcgagaggaacctgcagaaggaggccggcgtgctgtctgtgctggtggccctgatggccggcaaggccgagatcaagtatgaccctgaggtgatccagcccctggagatcgcccagttcatccaggacctgggctttgaagctgctgtgatggaggactatgccggcagtgatggcaacatcgagctgaccatcaccggcatgacctgtgccagctgtgtgcacaacatcgagagcaagctgaccaggaccaacggcatcacctacgcctctgtggccctggccaccagcaaggccctggtgaagtttgatcctgagatcatcggcccccgggacatcatcaagatcatcgaggagatcggcttccacgccagcctggcccagaggaaccccaatgcccaccacctggaccacaagatggagatcaagcagtggaagaagagcttcctgtgcagcctggtgtttggcatccctgtgatggccctgatgatctacatgctgatccccagcaatgagccccaccagagcatggtgctggaccacaacatcatccctggcctgagcatcctgaacctgatcttcttcatcctgtgcacctttgtgcagagcaagaccagcgaggccctggccaagctgatgagcctgcaggccacagaggccaccgtggtgaccctgggggaggacaacctgatcatccgggaggagcaggtgcccatggagctggtgcagagaggagacatcgtgaaggtggtgcctgggggcaagtttcctgtggatggcaaggtgctggagggcaacaccatggctgatgagagcctcatcaccggggaggccatgcctgtgaccaagaagccaggcagcacagtgattgctggcagcatcaatgcccacggctctgtgctgatcaaggccacccacgtgggcaatgacaccaccctggcccagatcgtgaagctggtggaggaggcccagatgagcaaggcccccatccagcagctggccgaccgcttcagcggctactttgtgcccttcatcatcatcatgagcaccctgaccctggtggtgtggatcgtcatcggcttcatcgactttggagtggtgcagcgctacttccccaaccccaacaagcacatcagccagacagaggtgatcatccgctttgccttccagaccagcatcaccgtgctgtgcatcgcctgcccctgcagcctgggcctggccacccccacagctgtgatggtgggcactggagtggccgcccagaatggcatcctgatcaagggcggcaagcccctggagatggcccacaagatcaagacagtgatgtttgacaagacaggcaccatcacccacggcgtgccccgggtgatgagggtgctgctgctgggagatgtggccaccctgcccctgaggaaggtgctggccgtggtgggcacagctgaggccagcagcgagcaccccctgggcgtggccgtgaccaagtactgcaaggaggagctgggcacagagaccctgggctactgcacagacttccaggccgtgcccggctgcggcatcggctgcaaggtgtccaatgtggagggcatcctggcccacagcgagcggcccctgagcgccccagccagccacctgaatgaggccggcagcctgcctgctgagaaggatgctgtgccccagaccttctctgtgctgattggcaaccgggagtggctgcggagaaatggcctgaccatcagcagtgatgtgtctgatgccatgacagaccacgagatgaagggccagacagccatcctggtggccattgatggagtgctgtgtggcatgattgccatcgcagatgctgtgaagcaggaggccgccctggccgtgcacaccctgcagagcatgggcgtggatgtggtgctgatcaccggggacaacaggaagacagcccgggccatcgccacccaggtgggcatcaacaaggtgtttgctgaggtgctgcccagccacaaggtggccaaggtgcaggagctgcagaacaagggcaagaaggtggccatggtgggagatggagtgaatgacagccctgccctggcccaggccgacatgggcgtggccatcggcaccggcacagatgtggccatcgaggccgcagatgtggtgctgatcagaaatgacctgctggatgtggtggccagcatccacctgagcaagaggacagtgcggcgcatccgcatcaacctggtgctggccctgatctacaacctggtgggcatccccatcgccgccggggtcttcatgcccatcggcatcgtgctgcagccctggatgggcagcgctgccatggccgccagctctgtgtctgtggtgctgagcagcctgcagctgaagtgctacaagaagccagacctggagagatatgaggcccaggcccacggccacatgaagcccctgacagccagccaggtgtctgtgcacatcggcatggatgaccgctggagggacagcccccgggccaccccctgggaccaggtgtcctatgtgtcccaggtgtccctgagcagcctgaccagtgacaagcccagccgccacagcgctgctgctgatgatgatggagacaagtggagcctgctgctgaatggaagagatgaggagcagtacatctag

SEQ ID NO: 3008 - DNA, 1587 bp, synthetic construct
  misc_feature 1..1587: note = source = /note="Description of Artificial Sequence: Synthetic coding sequence"
  source 1..1587: mol_type = other DNA
atgaagaagagctttgcctttgacaacgtgggctatgagggcggcctggatggcctgggccccagcagccaggtggccaccagcacagtgcgcatcctgggcatgacctgccagagctgtgtgaagagcattgaagatcgcatcagcaacctgaagggcatcatctccatgaaggtgtccctggagcagggcagcgccaccgtgaagtatgtgcccagcgtggtgtgcctgcagcaggtgtgccaccagatcggggacatgggctttgaggccagcattgctgagggcaaggccgcctcctggcccagccgcagcctgcctgcccaggaggccgtggtgaagctgcgggtggagggcatgacctgccagagctgtgtgagcagcattgagggcaaggtgaggaagctgcagggcgtggtgcgggtgaaggtgtccctgagcaaccaggaggccgtcatcacctaccagccctacctgatccagcctgaggacctgcgggaccacgtgaatgacatgggctttgaggccgccatcaagagcaaggtggcccccctgagcctgggccccatcgacatcgagcggctgcagagcaccaaccccaagaggcccctgagcagcgccaaccagaacttcaacaacagcgagaccctgggccaccagggcagccacgtggtgaccctgcagctgagaattgatggcatgcactgcaagagctgtgtgctgaacattgaagaaaatattggccagctgctgggcgtgcagagcatccaggtgtccctggagaacaagacagcccaggtgaagtatgaccccagctgcaccagccctgtggccctgcagagggccatcgaggccctgcccccaggcaacttcaaggtgtccctgcctgatggagctgagggcagcggcacagaccacaggagcagcagcagccacagccctggcagccccccaagaaaccaggtgcagggcacctgcagcaccaccctgattgccatcgccggcatgacctgtgccagctgtgtgcacagcattgagggcatgatcagccagctggagggcgtgcagcagatctctgtgtccctggccgagggcacagccaccgtgctgtacaaccccagcgtcatcagccctgaggagctgcgggccgccatcgaggacatgggctttgaggcctctgtggtgtctgagagctgcagcaccaaccccctgggcaaccacagcgctggcaacagcatggtgcagaccacagatggcacccccacctctgtgcaggaggtggccccccacacaggccgcctgcctgccaaccacgccccagacatcctggccaagagcccccagagcaccagggctgtggccccccagaagtgcttcctgcagatcaagggcatgacctgtgccagctgtgtgagcaacatcgagaggaacctgcagaaggaggccgccccccgctgggtggtgctgctgcggagcggcctgcagatcagcgagacccaggtgtcccagcacggccgggcccaccggcccggccacaagcactgcctgtgcctcttcagcggccaccctgggggctgctgcggctag

SEQ ID NO: 3009 - DNA, 3966 bp, synthetic construct
  misc_feature 1..3966: note = source = /note="Description of Artificial Sequence: Synthetic coding sequence"
  source 1..3966: mol_type = other DNA
atgtctgacagcgtcatcctgcggagcatcaagaagtttggagaggagaatgatggctttgaaagtgacaagagctacaacaatgacaagaagagccggctgcaggatgagaagaagggagatggagtgcgggtgggcttcttccagctgttccgcttcagcagcagcacagacatctggctgatgtttgtgggcagcctgtgtgccttcctgcacggcatcgcccagcccggggtgctgctgatcttcggcaccatgacagatgtgttcattgattatgatgtggagctgcaggagctgcagatccctgggaaggcctgtgtgaacaacaccatcgtgtggaccaacagcagcctgaaccagaacatgaccaacggcacccgctgtggcctgctgaacatcgagagcgagatgatcaagtttgccagctactatgccggcattgctgtggccgtgctgatcaccggctacatccagatctgcttctgggtgattgctgctgcccggcagatccagaagatgaggaagttctacttccgccgcatcatgaggatggagatcggctggtttgactgcaacagcgtgggggagctgaacacccgcttcagtgatgacatcaacaagatcaatgatgccatcgctgaccagatggccctcttcatccagaggatgaccagcaccatctgtggcttcctgctgggcttcttccggggctggaagctgaccctggtgatcatctctgtgagccccctcatcggcatcggggccgccaccatcggcctgtctgtgtccaagttcacagattatgagctgaaggcctatgccaaggccggcgtggtggctgatgaggtgatcagctccatgaggacagtggccgccttcggcggggagaagcgggaggtggagagatatgagaagaacctggtgtttgcccagcgctggggcatcaggaagggcatcgtgatgggcttcttcaccggctttgtgtggtgcctgatcttcctgtgctacgccctggccttctggtacggcagcaccctggtgctggatgaaggagagtacaccccaggcaccctggtgcagatcttcctgtctgtgattgtgggcgccctgaacctgggcaatgccagcccctgcctggaggcctttgccaccggccgggctgctgccaccagcatctttgagaccatcgacaggaagcccatcatcgactgcatgtctgaagatggctacaagctggaccgcatcaagggggagattgagttccacaacgtgaccttccactaccccagcaggcctgaggtgaagatcctgaatgacctgaacatggtgatcaagccaggagagatgacagccctggtgggccccagcggggccggcaagagcacagccctgcagctgatccagcgcttctatgacccctgtgagggcatggtgacagtggatggccatgacatccgcagcctgaacatccagtggctgcgggaccagatcggcatcgtggagcaggagcctgtgctcttcagcaccaccatcgccgagaacatccgctatggaagagaagatgccaccatggaggacatcgtgcaggccgccaaggaggccaatgcctacaacttcatcatggacctgccccagcagtttgacaccctggtgggggagggcggcggccagatgtctgggggccagaagcagagggtggccatcgcccgggccctgatccggaaccccaagatcctgctgctggacatggccaccagcgccctggacaatgaaagtgaggccatggtgcaggaggtgctgagcaagatccagcacggccacaccatcatctctgtggcccaccggctgagcacagtgcgggctgctgacaccatcattggatttgaacatggaacagctgtggagcggggcacccatgaggagctgctggagaggaaaggagtgtacttcaccctggtgaccctgcagagccagggcaaccaggccctgaatgaggaggacatcaaggatgccacagaagatgacatgctggcccggaccttcagccggggcagctaccaggacagcctgcgggccagcatccggcagaggagcaagagccagctgagctacctggtgcatgagccccccctggccgtggtggaccacaagagcacctatgaggaggacaggaaggacaaggacatccctgtgcaggaggaggtggagcccgcccctgtgcggcgcatcctgaagttcagcgcccctgagtggccctacatgctggtgggctctgtgggcgctgctgtgaatggaacagtgacccccctgtatgccttcctgttcagccagatcctgggcaccttcagcatcccagacaaggaggagcagaggagccagatcaacggggtgtgcctgctgtttgtggccatgggctgtgtgtccctcttcacccagttcctgcagggctacgcctttgccaagtctggagagctgctgaccaagaggctgaggaagtttggcttccgggccatgctgggccaggacatcgcctggtttgatgacctgaggaacagccctggggccctgaccacccggctggccacagatgccagccaggtgcagggcgccgccggcagccagatcggcatgattgtgaacagcttcaccaacgtgacagtggccatgatcatcgccttctccttctcctggaagctgagcctggtgatcctgtgcttcttccccttcctggccctgagcggggccacccagaccaggatgctgactggatttgccagccgggacaagcaggccctggagatggtgggccagatcaccaatgaggccctgagcaacatcagaacagtggccggcatcggcaaggagcggcgcttcatcgaggccctggagacagagctggagaagcccttcaagacagccatccagaaggccaacatctacggcttctgctttgcctttgcccagtgcatcatgttcatcgccaacagcgccagctaccgctatggaggctacctgatcagcaatgaaggcctgcacttctcctatgtgttccgggtcatctctgctgtggtgctgagcgccacagccctgggccgggccttctcctacacccccagctatgccaaggccaagatctctgctgcccgcttcttccagctgctggaccggcagccccccatctctgtgtacaacacagctggggagaagtgggacaacttccagggcaagattgactttgtggactgcaagttcacctaccccagcaggccagacagccaggtgctgaatggcctgtctgtgtccatcagccctggccagaccctggcctttgtgggcagcagcggctgcggcaagagcaccagcatccagctgctggagcgcttctatgaccctgaccagggcaaggtgatgattgatggccatgacagcaagaaggtgaatgtgcagttcctgcggagcaacatcggcatcgtgtcccaggagcctgtgctgtttgcctgcagcatcatggacaacatcaagtacggggacaacaccaaggagatccccatggagcgggtgattgctgctgccaagcaggcccagctgcatgactttgtgatgagcctgcctgagaagtatgagaccaacgtgggcagccagggcagccagctgagcagaggagagaagcagagaattgccatcgcccgggccatcgtgcgggaccccaagatcctgctgctggatgaggccaccagcgccctggacacagaaagtgagaagacagtgcaggtggccctggacaaggcccgggagggccgcacctgcatcgtgattgcccaccggctgagcaccatccagaatgctgacatcatcgctgtgatggcccagggcgtggtgattgagaagggcacccatgaggagctgatggcccagaagggggcctactacaagctggtgaccaccggcagccccatctcctag

SEQ ID NO: 3010 - DNA, 3861 bp, synthetic construct
  misc_feature 1..3861: note = source = /note="Description of Artificial Sequence: Synthetic coding sequence"
  source 1..3861: mol_type = other DNA
atggacctggaggccgccaagaatggaacagcctggaggcccaccagcgctgagggggactttgagctgggcatcagcagcaagcagaagaggaagaagaccaagacagtgaagatgattggagtgctgaccctcttccgctacagcgactggcaggacaagctgttcatgagcctgggcaccatcatggccatcgcccacggcagcggcctgcccctgatgatgattgtgtttggagagatgacagacaagtttgtggacacagctggcaacttctccttccctgtgaacttcagcctgagcctgctgaaccctgggaagatcctggaggaggagatgaccaggtatgcctactactacagcggcctgggcgccggcgtgctggtggccgcctacatccaggtgtccttctggaccctggccgccggccggcagatcaggaagatccggcagaagttcttccacgccatcctgcggcaggagatcggctggtttgacatcaatgacaccacagagctgaacacccggctgacagatgacatcagcaagatcagcgagggcatcggggacaaggtgggcatgttcttccaggccgtggccaccttctttgctggcttcatcgtgggcttcatccggggctggaagctgaccctggtgatcatggccatcagccccatcctgggcctgtctgctgctgtgtgggccaagatcctgagcgccttcagtgacaaggagctggccgcctatgccaaggccggggctgtggccgaggaggccctgggcgccatcagaacagtgattgcctttggaggccagaacaaggagctggagcgctaccagaagcacctggagaatgccaaggagatcggcatcaagaaggccatcagcgccaacatctccatgggcatcgccttcctgctgatctatgccagctatgccctggccttctggtacggcagcaccctggtgatcagcaaggagtacaccatcggaaatgccatgacagtgttcttcagcatcctgattggagccttctctgtgggccaggccgccccctgcattgatgcctttgccaatgcccggggagctgcctacgtgatctttgacatcatcgacaacaaccccaagattgacagcttcagcgagcggggccacaagccagacagcatcaagggcaacctggagttcaatgatgtgcacttctcctaccccagccgggccaacgtgaagatcctgaagggcctgaacctgaaggtgcagagcggccagacagtggccctggtgggcagcagcggctgcggcaagagcaccaccgtgcagctgatccagaggctgtatgaccctgatgagggcaccatcaacattgatggccaggacatccggaacttcaacgtgaactacctgcgggagatcatcggcgtggtgtcccaggagcctgtgctcttcagcaccaccatcgccgagaacatctgctacggcagaggaaatgtgaccatggatgagatcaagaaggctgtgaaggaggccaatgcctatgagttcatcatgaagctgccccagaagtttgacaccctggtgggggagcggggggcccagctgagcggcggccagaagcagagaattgccatcgcccgggccctggtgaggaaccccaagatcctgctgctggatgaggccaccagcgccctggacacagaaagtgaagctgaggtgcaggccgccctggacaaggcccgggagggccgcaccaccatcgtgattgcccaccggctgagcacagtgagaaatgctgatgtgattgctggctttgaagatggagtcatcgtggagcagggcagccacagcgagctgatgaagaaggagggcgtgtacttcaagctggtgaacatgcagaccagcggcagccagatccagagcgaggagtttgagctgaatgatgagaaggccgccaccaggatggcccccaacggctggaagagccgcctcttccgccacagcacccagaagaacctgaagaacagccagatgtgccagaagagcctggatgtggagacagatggcctggaggccaacgtgccccctgtgtccttcctgaaggtgctgaagctgaacaagacagagtggccctactttgtggtgggcaccgtgtgtgccatcgccaatggaggcctgcagcctgccttcagcgtcatcttcagcgagatcatcgccatctttggacctggagatgatgctgtgaagcagcagaagtgcaacatcttcagcctcatcttcctgttcctgggcatcatctccttcttcaccttcttcctgcagggcttcaccttcggcaaggccggggagatcctgacccggcggctgcgctccatggccttcaaggccatgctgcggcaggacatgtcctggtttgatgaccacaagaacagcactggagccctgagcacccggctggccacagatgctgcccaggtgcagggcgccaccggcacccggctggccctgattgcccagaacatcgccaacctgggcaccggcatcatcatctccttcatctacggctggcagctgaccctgctgctgctggccgtggtgcccatcatcgctgtgtctggcatcgtggagatgaagctgctggccggaaatgccaagagggacaagaaggagctggaggccgccggcaagatcgccacagaggccatcgagaacatcagaacagtggtgtccctgacccaggagaggaagtttgagagcatgtatgtggagaagctgtatggcccctacagaaacagcgtgcagaaggcccacatctacggcatcaccttcagcatcagccaggccttcatgtacttctcctatgccggctgcttccgctttggagcctacctgattgtgaatggccacatgaggttcagagatgtgatcctggtgttcagcgccatcgtgtttggagctgtggccctgggccacgccagcagctttgccccagactatgccaaggccaagctgtctgctgcccacctgttcatgctgtttgagcggcagcccctgattgacagctacagcgaggagggcctgaagccagacaagtttgagggcaacatcaccttcaatgaggtggtgttcaactaccccacccgggccaacgtgcctgtgctgcagggcctgagcctggaggtgaagaagggccagaccctggccctggtgggcagcagcggctgcggcaagagcacagtggtgcagctgctggagcgcttctatgaccccctggccggcaccgtgtttgtggactttggcttccagctgctggatggccaggaggccaagaagctgaatgtgcagtggctgcgggcccagctgggcatcgtgtcccaggagcccatcctgtttgactgcagcattgctgaaaatattgcctatggagacaacagccgggtggtgtcccaggatgaaattgtgtctgctgccaaggccgccaacatccaccccttcatcgagaccctgccccacaagtatgagaccagggtgggggacaagggcacccagctgagcggcggccagaagcagagaattgccatcgcccgggccctgatccggcagccccagatcctgctgctggatgaggccaccagcgccctggacacagagagcgagaaggtggtgcaggaggccctggacaaggcccgggagggccgcacctgcatcgtcatcgcccaccggctgagcaccatccagaatgctgacctgattgtggtgttccagaatggccgggtgaaggagcacggcacccaccagcagctgctggcccagaagggcatctacttctccatggtgtctgtgcaggccggcacccagaacctgtag

SEQ ID NO: 3011 - DNA, 3699 bp, synthetic construct
  misc_feature 1..3699: note = source = /note="Description of Artificial Sequence: Synthetic coding sequence"
  source 1..3699: mol_type = other DNA
atggacctggaggccgccaagaatggaacagcctggaggcccaccagcgctgagggggactttgagctgggcatcagcagcaagcagaagaggaagaagaccaagacagtgaagatgattggagtgctgaccctcttccgctacagcgactggcaggacaagctgttcatgagcctgggcaccatcatggccatcgcccacggcagcggcctgcccctgatgatgattgtgtttggagagatgacagacaagtttgtggacacagctggcaacttctccttccctgtgaacttcagcctgagcctgctgaaccctgggaagatcctggaggaggagatgaccaggtatgcctactactacagcggcctgggcgccggcgtgctggtggccgcctacatccaggtgtccttctggaccctggccgccggccggcagatcaggaagatccggcagaagttcttccacgccatcctgcggcaggagatcggctggtttgacatcaatgacaccacagagctgaacacccggctgacagatgacatcagcaagatcagcgagggcatcggggacaaggtgggcatgttcttccaggccgtggccaccttctttgctggcttcatcgtgggcttcatccggggctggaagctgaccctggtgatcatggccatcagccccatcctgggcctgtctgctgctgtgtgggccaagatcctgagcgccttcagtgacaaggagctggccgcctatgccaaggccggggctgtggccgaggaggccctgggcgccatcagaacagtgattgcctttggaggccagaacaaggagctggagcgctaccagaagcacctggagaatgccaaggagatcggcatcaagaaggccatcagcgccaacatctccatgggcatcgccttcctgctgatctatgccagctatgccctggccttctggtacggcagcaccctggtgatcagcaaggagtacaccatcggaaatgccatgacagtgttcttcagcatcctgattggagccttctctgtgggccaggccgccccctgcattgatgcctttgccaatgcccggggagctgcctacgtgatctttgacatcatcgacaacaaccccaagattgacagcttcagcgagcggggccacaagccagacagcatcaagggcaacctggagttcaatgatgtgcacttctcctaccccagccgggccaacgtgaagatcctgaagggcctgaacctgaaggtgcagagcggccagacagtggccctggtgggcagcagcggctgcggcaagagcaccaccgtgcagctgatccagaggctgtatgaccctgatgagggcaccatcaacattgatggccaggacatccggaacttcaacgtgaactacctgcgggagatcatcggcgtggtgtcccaggagcctgtgctcttcagcaccaccatcgccgagaacatctgctacggcagaggaaatgtgaccatggatgagatcaagaaggctgtgaaggaggccaatgcctatgagttcatcatgaagctgccccagaagtttgacaccctggtgggggagcggggggcccagctgagcggcggccagaagcagagaattgccatcgcccgggccctggtgaggaaccccaagatcctgctgctggatgaggccaccagcgccctggacacagaaagtgaagctgaggtgcaggccgccctggacaaggcccgggagggccgcaccaccatcgtgattgcccaccggctgagcacagtgagaaatgctgatgtgattgctggctttgaagatggagtcatcgtggagcagggcagccacagcgagctgatgaagaaggagggcgtgtacttcaagctggtgaacatgcagaccagcggcagccagatccagagcgaggagtttgagctgaatgatgagaaggccgccaccaggatggcccccaacggctggaagagccgcctcttccgccacagcacccagaagaacctgaagaacagccagatgtgccagaagagcctggatgtggagacagatggcctggaggccaacgtgccccctgtgtccttcctgaaggtgctgaagctgaacaagacagagtggccctactttgtggtgggcaccgtgtgtgccatcgccaatggaggcctgcagcctgccttcagcgtcatcttcagcgagatcatcgccatctttggacctggagatgatgctgtgaagcagcagaagtgcaacatcttcagcctcatcttcctgttcctgggcatcatctccttcttcaccttcttcctgcagggcttcaccttcggcaaggccggggagatcctgacccggcggctgcgctccatggccttcaaggccatgctgcggcaggacatgtcctggtttgatgaccacaagaacagcactggagccctgagcacccggctggccacagatgctgcccaggtgcagggcgccaccggcacccggctggccctgattgcccagaacatcgccaacctgggcaccggcatcatcatctccttcatctacggctggcagctgaccctgctgctgctggccgtggtgcccatcatcgctgtgtctggcatcgtggagatgaagctgctggccggaaatgccaagagggacaagaaggagctggaggccgccggcaagatcgccacagaggccatcgagaacatcagaacagtggtgtccctgacccaggagaggaagtttgagagcatgtatgtggagaagctgtatggcccctacagagtcttcagcgccatcgtgtttggagctgtggccctgggccacgccagcagctttgccccagactatgccaaggccaagctgtctgctgcccacctgttcatgctgtttgagcggcagcccctgattgacagctacagcgaggagggcctgaagccagacaagtttgagggcaacatcaccttcaatgaggtggtgttcaactaccccacccgggccaacgtgcctgtgctgcagggcctgagcctggaggtgaagaagggccagaccctggccctggtgggcagcagcggctgtgggaagagcacagtggtgcagctgctggagcgcttctatgaccccctggccggcaccgtgctgctggatggccaggaggccaagaagctgaatgtgcagtggctgcgggcccagctgggcatcgtgtcccaggagcccatcctgtttgactgcagcattgctgaaaatattgcctatggagacaacagccgggtggtgtcccaggatgaaattgtgtctgctgccaaggccgccaacatccaccccttcatcgagaccctgccccacaagtatgagaccagggtgggggacaagggcacccagctgagcggcggccagaagcagagaattgccatcgcccgggccctgatccggcagccccagatcctgctgctggatgaggccaccagcgccctggacacagagagcgagaaggtggtgcaggaggccctggacaaggcccgggagggccgcacctgcatcgtcatcgcccaccggctgagcaccatccagaatgctgacctgattgtggtgttccagaatggccgggtgaaggagcacggcacccaccagcagctgctggcccagaagggcatctacttctccatggtgtctgtgcaggccggcacccagaacctgtag

SEQ ID NO: 3012 - DNA, 3840 bp, synthetic construct
  misc_feature 1..3840: note = source = /note="Description of Artificial Sequence: Synthetic coding sequence"
  source 1..3840: mol_type = other DNA
atggacctggaggccgccaagaatggaacagcctggaggcccaccagcgctgagggggactttgagctgggcatcagcagcaagcagaagaggaagaagaccaagacagtgaagatgattggagtgctgaccctcttccgctacagcgactggcaggacaagctgttcatgagcctgggcaccatcatggccatcgcccacggcagcggcctgcccctgatgatgattgtgtttggagagatgacagacaagtttgtggacacagctggcaacttctccttccctgtgaacttcagcctgagcctgctgaaccctgggaagatcctggaggaggagatgaccaggtatgcctactactacagcggcctgggcgccggcgtgctggtggccgcctacatccaggtgtccttctggaccctggccgccggccggcagatcaggaagatccggcagaagttcttccacgccatcctgcggcaggagatcggctggtttgacatcaatgacaccacagagctgaacacccggctgacagatgacatcagcaagatcagcgagggcatcggggacaaggtgggcatgttcttccaggccgtggccaccttctttgctggcttcatcgtgggcttcatccggggctggaagctgaccctggtgatcatggccatcagccccatcctgggcctgtctgctgctgtgtgggccaagatcctgagcgccttcagtgacaaggagctggccgcctatgccaaggccggggctgtggccgaggaggccctgggcgccatcagaacagtgattgcctttggaggccagaacaaggagctggagcgctaccagaagcacctggagaatgccaaggagatcggcatcaagaaggccatcagcgccaacatctccatgggcatcgccttcctgctgatctatgccagctatgccctggccttctggtacggcagcaccctggtgatcagcaaggagtacaccatcggaaatgccatgacagtgttcttcagcatcctgattggagccttctctgtgggccaggccgccccctgcattgatgcctttgccaatgcccggggagctgcctacgtgatctttgacatcatcgacaacaaccccaagattgacagcttcagcgagcggggccacaagccagacagcatcaagggcaacctggagttcaatgatgtgcacttctcctaccccagccgggccaacgtgaagatcctgaagggcctgaacctgaaggtgcagagcggccagacagtggccctggtgggcagcagcggctgcggcaagagcaccaccgtgcagctgatccagaggctgtatgaccctgatgagggcaccatcaacattgatggccaggacatccggaacttcaacgtgaactacctgcgggagatcatcggcgtggtgtcccaggagcctgtgctcttcagcaccaccatcgccgagaacatctgctacggcagaggaaatgtgaccatggatgagatcaagaaggctgtgaaggaggccaatgcctatgagttcatcatgaagctgccccagaagtttgacaccctggtgggggagcggggggcccagctgagcggcggccagaagcagagaattgccatcgcccgggccctggtgaggaaccccaagatcctgctgctggatgaggccaccagcgccctggacacagaaagtgaagctgaggtgcaggccgccctggacaaggcccgggagggccgcaccaccatcgtgattgcccaccggctgagcacagtgagaaatgctgatgtgattgctggctttgaagatggagtcatcgtggagcagggcagccacagcgagctgatgaagaaggagggcgtgtacttcaagctggtgaacatgcagaccagcggcagccagatccagagcgaggagtttgagctgaatgatgagaaggccgccaccaggatggcccccaacggctggaagagccgcctcttccgccacagcacccagaagaacctgaagaacagccagatgtgccagaagagcctggatgtggagacagatggcctggaggccaacgtgccccctgtgtccttcctgaaggtgctgaagctgaacaagacagagtggccctactttgtggtgggcaccgtgtgtgccatcgccaatggaggcctgcagcctgccttcagcgtcatcttcagcgagatcatcgccatctttggacctggagatgatgctgtgaagcagcagaagtgcaacatcttcagcctcatcttcctgttcctgggcatcatctccttcttcaccttcttcctgcagggcttcaccttcggcaaggccggggagatcctgacccggcggctgcgctccatggccttcaaggccatgctgcggcaggacatgtcctggtttgatgaccacaagaacagcactggagccctgagcacccggctggccacagatgctgcccaggtgcagggcgccaccggcacccggctggccctgattgcccagaacatcgccaacctgggcaccggcatcatcatctccttcatctacggctggcagctgaccctgctgctgctggccgtggtgcccatcatcgctgtgtctggcatcgtggagatgaagctgctggccggaaatgccaagagggacaagaaggagctggaggccgccggcaagatcgccacagaggccatcgagaacatcagaacagtggtgtccctgacccaggagaggaagtttgagagcatgtatgtggagaagctgtatggcccctacagaaacagcgtgcagaaggcccacatctacggcatcaccttcagcatcagccaggccttcatgtacttctcctatgccggctgcttccgctttggagcctacctgattgtgaatggccacatgaggttcagagatgtgatcctggtgttcagcgccatcgtgtttggagctgtggccctgggccacgccagcagctttgccccagactatgccaaggccaagctgtctgctgcccacctgttcatgctgtttgagcggcagcccctgattgacagctacagcgaggagggcctgaagccagacaagtttgagggcaacatcaccttcaatgaggtggtgttcaactaccccacccgggccaacgtgcctgtgctgcagggcctgagcctggaggtgaagaagggccagaccctggccctggtgggcagcagcggctgcggcaagagcacagtggtgcagctgctggagcgcttctatgaccccctggccggcaccgtgctgctggatggccaggaggccaagaagctgaatgtgcagtggctgcgggcccagctgggcatcgtgtcccaggagcccatcctgtttgactgcagcattgctgagaacatcgcctacggggacaacagccgggtggtgtcccaggatgagatcgtgtctgctgccaaggccgccaacatccaccccttcatcgagaccctgccccacaagtatgagaccagggtgggggacaagggcacccagctgagcggcggccagaagcagagaattgccatcgcccgggccctgatccggcagccccagatcctgctgctggatgaggccaccagcgccctggacacagaaagtgagaaggtggtgcaggaggccctggacaaggcccgggagggccgcacctgcatcgtgattgcccaccggctgagcaccatccagaatgctgacctgattgtggtgttccagaatggccgggtgaaggagcacggcacccaccagcagctgctggcccagaagggcatctacttctccatggtgtctgtgcaggccggcacccagaacctgtag

SEQ ID NO: 3013 - DNA, 186 bp, synthetic construct
  misc_feature 1..186: note = source = /note="Description of Artificial Sequence: Synthetic coding sequence"
  source 1..186: mol_type = other DNA
atggacctggaggccgccaagaatggaacagcctggaggcccaccagcgctgagggggactttgagctgggcatcagcagcaagcagaagaggaagaagaccaagacagtgaagatgattggagtgctgaccctcttccgctacagcgactggcaggacaagctgttcatgagcctgggcacctag

SEQ ID NO: 3014 - DNA, 3699 bp, synthetic construct; identical to SEQ ID NO: 3011
  misc_feature 1..3699: note = source = /note="Description of Artificial Sequence: Synthetic coding sequence"
  source 1..3699: mol_type = other DNA

SEQ ID NO: 3015 - DNA, 3840 bp, synthetic construct; identical to SEQ ID NO: 3012
  misc_feature 1..3840: note = source = /note="Description of Artificial Sequence: Synthetic coding sequence"
  source 1..3840: mol_type = other DNA

SEQ ID NO: 3016 - DNA, 1464 bp, synthetic construct
  misc_feature 1..1464: note = source = /note="Description of Artificial Sequence: Synthetic coding sequence"
  source 1..1464: mol_type = other DNA
atgagggagaacatggcccggggcccctgcaatgccccccgctgggccagcctgatggtgctggtggccatcggcacagctgtgacagctgctgtgaaccctggggtggtggtgcgcatcagccagaagggcctggactatgccagccagcagggcacagctgccctgcagaaggagctgaagaggatcaagatcccagactacagcgacagcttcaagatcaagcacctgggcaagggccactacagcttctacagcatggacatccgggagttccagctgcccagcagccagatctccatggtgcccaacgtgggcctgaagttcagcatcagcaatgccaacatcaagatcagcggcaagtggaaggcccagaagcgcttcctgaagatgagcggcaactttgacctgagcattgagggcatgagcatctctgctgacctgaagctgggcagcaaccccaccagcggcaagcccaccatcacctgcagcagctgcagcagccacatcaacagcgtgcacgtgcacatcagcaagagcaaggtgggctggctgatccagctgttccacaagaagattgaaagtgccctgaggaacaagatgaacagccaggtgtgtgagaaggtgaccaacagcgtgtcctctgagctgcagccctacttccagaccctgcctgtgatgaccaagattgacagcgtggccggcatcaactacggcctggtggcccccccagccaccacagctgagaccctggatgtgcagatgaagggggagttctacagcgagaaccaccacaaccccccaccatttgcccctcctgtgatggagttccctgctgcccatgacaggatggtgtacctgggcctgagtgactacttcttcaacacagctggcctggtgtaccaggaggccggcgtgctgaagatgaccctgagagatgacatgatccccaaggagagcaagttccggctgaccaccaagttcttcggcaccttcctgcctgaggtggccaagaagttccccaacatgaagatccagatccacgtgtctgccagcaccccaccccacctgtctgtgcagcccaccggcctgaccttctacccagctgtggatgtgcaggcctttgctgtgctgcccaacagcagcctggccagcctcttcctgattggcatgcacaccaccggctccatggaggtgtctgctgagagcaaccggctggtgggggagctgaagctggaccggctgctgctggagctgaagcacagcaacatcggccccttccctgtggagctgctgcaggacatcatgaactacatcgtgcccatcctggtgctgccccgggtgaatgagaagctgcagaagggcttccccctgcccaccccagcccgggtgcagctgtacaacgtggtgctgcagccccaccagaacttcctgctgtttggagcagatgtggtgtacaagtag

SEQ ID NO: 3017 - DNA, 1449 bp, synthetic construct
  misc_feature 1..1449: note = source = /note="Description of Artificial Sequence: Synthetic coding sequence"
  source 1..1449: mol_type = other DNA
atggatgagggcatcccccacctgcaggagcggcagctgctggagcaccgggacttcatcggcctggactacagcagcctgtacatgtgcaagcccaagaggtccatgaagagagatgacaccaaggacacctacaagctgccccacaggctcatcgagaagaagaggcgggaccgcatcaatgaatgcatcgcccagctgaaggacctgctgcctgagcacctgaagctgaccaccctgggccacctggagaaggctgtggtgctggagctgaccctgaagcacctgaaggccctgacagccctgacagagcagcagcaccagaagatcatcgccctgcagaatggagagaggagcctgaagagccccatccagagcgacctggatgccttccacagcggcttccagacctgtgccaaggaggtgctgcagtacctgagcagatttgagagctggaccccccgggagccccgctgtgtgcagctgatcaaccacctgcatgctgtggccacccagttcctgcccaccccccagctgctgacccagcaggtgcccctgagcaagggcaccggggcccccagcgctgctggcagcgctgctgccccctgcctggagagagctggccagaagctggagcccctggcctactgtgtgcctgtgatccagaggacccagcccagcgctgagctggccgcagaaaatgacacagacacagacagcggctacggcggggaggccgaggcccggccagaccgggagaagggcaagggggccggggccagccgggtgaccatcaagcaggagcccccaggagaggacagccctgcccccaagaggatgaagctggacagccggggcggcggcagcggcggcggccctgggggcggcgctgctgctgctgctgctgccctgctgggccctgaccctgctgctgctgctgccctgctgcggccagatgctgccctgctgagcagcctggtggcctttggaggcggcggcggggcccccttcccccagcctgctgctgctgctgcccccttctgcctgcccttctgcttcctgagccccagcgctgctgctgcctacgtgcagcccttcctggacaagagcggcctggagaagtacctgtacccagctgctgctgctgcccccttccccctgctgtacccaggcatcccagccccagctgctgctgctgctgctgctgctgctgctgctgctgctgctgctgccttcccctgcctgagctctgtgctgagccccccacctgagaaggccggggctgctgctgccaccctgctgccccatgaggtggcccccctgggcgccccccacccccagcacccccacggccgcacccacctgccctttgctggcccccgggagcccggcaaccctgagagcagcgcccaggaggaccccagccagcccgggaaggaggccccctag

SEQ ID NO: 3018 - DNA, 1113 bp, synthetic construct
  misc_feature 1..1113: note = source = /note="Description of Artificial Sequence: Synthetic coding sequence"
  source 1..1113: mol_type = other DNA
atggatgagggcatcccccacctgcaggagcggcagctgctggagcaccgggacttcatcggcctggactacagcagcctgtacatgtgcaagcccaagaggtccatgaagagagatgacaccaaggacacctacaagctgccccacaggctcatcgagaagaagaggcgggaccgcatcaatgaatgcatcgcccagctgaaggacctgctgcctgagcacctgaagctgaccaccctgggccacctggagaaggctgtggtgctggagctgaccctgaagcacctgaaggccctgacagccctgacagagcagcagcaccagaagatcatcgccctgcagaatggagagaggagcctgaagagccccatccagagcgacctggatgccttccacagcggcttccagacctgtgccaaggaggtgctgcagtacctgagcagatttgagagctggaccccccgggagccccgctgtgtgcagctgatcaaccacctgcatgctgtggccacccagttcctgcccaccccccagctgctgacccagcaggtgcccctgagcaagggcaccggggcccccagcgctgctggcagcgctgctgccccctgcctggagagagctggccagaagctggagcccctggcctactgtgtgcctgtgatccagaggacccagcccagcgctgagctggccgcagaaaatgacacagacacagacagcggctacggcggggaggccgaggcccggccagaccgggagaagggcaagggggccggggccagccgggtgaccatcaagcaggagcccccaggagaggacagccccccacctccacccaggagccctgcctgcccccgctgctgccggcccctgccccggcggcgggcccccccaccccggcccagctgcaggacccgctggaggcccctgggccgccgcacccccagcaccaggacagctgcccccacctgccccagccctggccctgccagccggggcacccggcgggccctgctgaggaagatccccaggagccaggagaggaagctgcctgagagcctgcggcctgagggccgccgcttcaagcagagcgagaagctgaagtacccctag

SEQ ID NO: 3019 - DNA, 1191 bp, synthetic construct
  misc_feature 1..1191: note = source = /note="Description of Artificial Sequence: Synthetic coding sequence"
  source 1..1191: mol_type = other DNA
atggtggccggcacccgctgcctgctggccctgctgctgccccaggtgctgctgggcggggccgccggcctggtgcctgagctgggccgcaggaagtttgctgctgccagcagcggccggcccagcagccagcccagtgatgaggtgctgtctgaatttgagctgcggctgctgtccatgtttggcctgaagcagaggcccacccccagcagagatgctgtggtgcccccctacatgctggacctgtaccgccgccacagcggccagcccggcagccctgccccagaccaccggctggagcgggccgccagccgggccaacacagtgcgctccttccaccacgaggagagcctggaggagctgcctgagaccagcggcaagaccacccggcgcttcttcttcaacctgagcagcatccccacagaggagttcatcaccagcgctgagctgcaggtgttccgggagcagatgcaggatgccctgggcaacaacagcagcttccaccaccgcatcaacatctatgagatcatcaagccagccacagccaacagcaagtttcctgtgacccggctgctggacacccggctggtgaaccagaatgccagccgctgggagagctttgatgtgaccccagctgtgatgcgctggacagcccagggccacgccaaccacggctttgtggtggaggtggcccacctggaggagaagcagggcgtgtccaagagacatgtgcgcatcagccgcagcctgcaccaggatgagcacagctggagccagatccggcccctgctggtgacctttggacatgatggcaagggccaccccctgcacaagcgggagaagaggcaggccaagcacaagcagaggaagaggctgaagagcagctgcaagaggcaccccctgtatgtggacttcagtgatgtgggctggaatgactggatcgtggcccctcctggctaccacgccttctactgccacggggagtgccccttccccctggccgaccacctgaacagcaccaaccacgccatcgtgcagaccctggtgaacagcgtgaacagcaagatccccaaggcctgctgcgtgcccacagagctgagcgccatctccatgctgtacctggatgaaaatgagaaggtggtgctgaagaactaccaggacatggtggtggagggctgcggctgcaggtag

SEQ ID NO: 3020 - DNA, 1296 bp, synthetic construct
  misc_feature 1..1296: note = source = /note="Description of Artificial Sequence: Synthetic coding sequence"
  source 1..1296: mol_type = other DNA
atgcacgtgcgcagcctgcgggctgctgccccccacagctttgtggccctgtgggcccccctcttcctgctgcggagcgccctggccgacttcagcctggacaatgaggtgcacagcagcttcatccaccggcggctgcggagccaggagcggcgggagatgcagcgggagatcctgagcatcctgggcctgccccaccggccccggccccacctgcagggcaagcacaacagcgcccccatgttcatgctggacctgtacaatgccatggctgtggaggagggcggcggccctgggggccagggcttctcctacccctacaaggctgtgttcagcacccagggcccccccctggccagcctgcaggacagccacttcctgacagatgctgacatggtgatgagctttgtgaacctggtggagcatgacaaggagttcttccacccccgctaccaccaccgggagttccgctttgacctgagcaagatccctgagggggaggccgtgacagctgctgagttccgcatctacaaggactacatccgggagagatttgacaatgagaccttccgcatctctgtgtaccaggtgctgcaggagcacctgggccgggagagtgacctcttcctgctggacagcaggaccctgtgggccagcgaggagggctggctggtgtttgacatcacagccaccagcaaccactgggtggtgaaccccaggcacaacctgggcctgcagctgtctgtggagaccctggatggccagagcatcaaccccaagctggccggcctgattggccgccacggcccccagaacaagcagcccttcatggtggccttcttcaaggccacagaggtgcacttccgcagcatccgcagcacaggcagcaagcagaggagccagaacagaagcaagacccccaagaaccaggaggccctgaggatggccaacgtggccgagaacagcagcagtgaccagaggcaggcctgcaagaagcatgagctgtatgtgtccttccgggacctgggctggcaggactggatcatcgcccctgagggctatgctgcctactactgtgagggggagtgtgccttccccctgaacagctacatgaatgccaccaaccacgccatcgtgcagaccctggtgcacttcatcaaccctgagaccgtgcccaagccctgctgtgcccccacccagctgaatgccatctctgtgctgtactttgatgacagcagcaatgtcatcctgaagaagtacagaaacatggtggtgcgggcctgtggctgccactag

SEQ ID NO: 3021 - DNA, 1098 bp, synthetic construct
  misc_feature 1..1098: note = source = /note="Description of Artificial Sequence: Synthetic coding sequence"
  source 1..1098: mol_type = other DNA
atgcacgtgcgcagcctgcgggctgctgccccccacagctttgtggccctgtgggcccccctcttcctgctgcggagcgccctggccgacttcagcctggacaatgaggtgcacagcagcttcatccaccggcggctgcggagccaggagcggcgggagatgcagcgggagatcctgagcatcctgggcctgccccaccggccccggccccacctgcagggcaagcacaacagcgcccccatgttcatgctggacctgtacaatgccatggctgtggaggagggcggcggccctgggggccagggcttctcctacccctacaaggctgtgttcagcacccagggcccccccctggccagcctgcaggacagccacttcctgacagatgctgacatggtgatgagctttgtgaacctggtggagcatgacaaggagttcttccacccccgctaccaccaccgggagttccgctttgacctgagcaagatccctgagggggaggccgtgacagctgctgagttccgcatctacaaggactacatccgggagagatttgacaatgagaccttccgcatctctgtgtaccaggtgctgcaggagcacctgggccgggagagtgacctcttcctgctggacagcaggaccctgtgggccagcgaggagggctggctggtgtttgacatcacagccaccagcaaccactgggtggtgaaccccaggcacaacctgggcctgcagctgtctgtggagaccctggatgagaacagcagcagtgaccagaggcaggcctgcaagaagcatgagctgtatgtgtccttccgggacctgggctggcaggactggatcatcgcccctgagggctatgctgcctactactgtgagggggagtgtgccttccccctgaacagctacatgaatgccaccaaccacgccatcgtgcagaccctggtgcacttcatcaaccctgagaccgtgcccaagccctgctgtgcccccacccagctgaatgccatctctgtgctgtactttgatgacagcagcaatgtcatcctgaagaagtacagaaacatggtggtgcgggcctgtggctgccactag

SEQ ID NO: 3022 - DNA, 1656 bp, synthetic construct
  misc_feature 1..1656: note = source = /note="Description of Artificial Sequence: Synthetic coding sequence"
  source 1..1656: mol_type = other DNA
atggccggggacctgtctgctggcttcttcatggaggagctgaacacctaccggcagaagcagggcgtggtgctgaagtaccaggagctgcccaacagcggcccccctcatgaccggcgcttcaccttccaggtgatcattgatggccgggagttccctgagggggagggccgcagcaagaaggaggccaagaatgctgctgccaagctggccgtggagatcctgaacaaggagaagaaggctgtgagccccctgctgctgaccaccaccaacagcagcgagggcctgtccatgggcaactacatcggcctcatcaaccgcatcgcccagaagaagaggctgactgtgaactatgagcagtgtgccagcggcgtgcacggccctgagggcttccactacaagtgcaagatgggccagaaggagtacagcatcggcaccggcagcaccaagcaggaggccaagcagctggccgccaagctggcctacctgcagatcctgtctgaggagacctctgtgaagagtgactacctgagcagcggcagctttgccaccacctgtgagagccagagcaacagcctggtgaccagcaccctggccagcgagagcagcagcgagggggacttctctgctgacaccagcgagatcaacagcaacagcgacagcctgaacagcagcagcctgctgatgaatggcctgaggaacaaccagaggaaggccaagaggagcctggcccccaggtttgacctgcctgacatgaaggagaccaagtacacagtggacaagagatttggcatggacttcaaggagattgagctgattggcagcggcggcttcggccaggtgttcaaggccaagcacagaattgatggcaagacctacgtgatcaagagggtgaagtacaacaatgagaaggccgagcgggaggtgaaggccctggccaagctggaccacgtgaacatcgtgcactacaacggctgctgggatggctttgattatgaccctgagaccagtgatgacagcctggagagcagtgactatgaccctgagaacagcaagaacagcagccgcagcaagaccaagtgcctcttcatccagatggagttctgtgacaagggcaccctggagcagtggattgagaagagaagaggagagaagctggacaaggtgctggccctggagctgtttgagcagatcaccaagggcgtggactacatccacagcaagaagctgatccaccgggacctgaagcccagcaacatcttcctggtggacaccaagcaggtgaagatcggggactttggcctggtgaccagcctgaagaatgatggcaagaggaccaggagcaagggcaccctgcgctacatgagccctgagcagatcagcagccaggactatggcaaggaggtggacctgtatgccctgggcctcatcctggccgagctgctgcacgtgtgtgacacagcctttgagaccagcaagttcttcacagacctgagagatggcatcatcagtgacatctttgacaagaaggagaagaccctgctgcagaagctgctgagcaagaagccagaggaccggcccaacaccagcgagatcctgcggaccctgactgtgtggaagaagagccctgagaagaatgaaagacacacctgctag

SEQ ID NO: 3023 - DNA, 366 bp, synthetic construct
  misc_feature 1..366: note = source = /note="Description of Artificial Sequence: Synthetic coding sequence"
  source 1..366: mol_type = other DNA
atgacccgcatcctgacagccttcaaggtggtgaggaccctgaagacaggcttcggcttcaccaacgtgacagcccaccagaagtggaagttcagccggcccggcatccggctgctgtctgtgaaggcccagacagcccacatcgtgctggaggatggcaccaagatgaagggctacagctttggccaccccagctctgtggccggggaggtggtgttcaacacaggcctgggcggctacccagaggccatcacagatcctgcctacaagggccagatcctgaccatggccaaccccatcattggaaatggaggagccccagacaccacagccctggatgagctgggcctgagcaagtacctgtag

SEQ ID NO: 3024 - DNA, 4521 bp, synthetic construct
  misc_feature 1..4521: note = source = /note="Description of Artificial Sequence: Synthetic coding sequence"
  source 1..4521: mol_type = other DNA
atgccccagatcatcaagatgacccgcatcctgacagccttcaaggtggtgaggaccctgaagacaggcttcggcttcaccaacgtgacagcccaccagaagtggaagttcagccggcccggcatccggctgctgtctgtgaaggcccagacagcccacatcgtgctggaggatggcaccaagatgaagggctacagctttggccaccccagctctgtggccggggaggtggtgttcaacacaggcctgggcggctacccagaggccatcacagatcctgcctacaagggccagatcctgaccatggccaaccccatcattggaaatggaggagccccagacaccacagccctggatgagctgggcctgagcaagtacctggagagcaatggcatcaaggtgtctggcctgctggtgctggactacagcaaggactacaaccactggctggccaccaagagcctgggccagtggctgcaggaggagaaggtgcctgccatctacggcgtggacaccaggatgctgaccaagatcatccgggacaagggcaccatgctgggcaagattgaatttgagggccagcctgtggactttgtggaccccaacaagcagaacctgattgctgaggtgtccaccaaggatgtgaaggtgtatggcaagggcaaccccaccaaggtggtggccgtggactgtggcatcaagaacaacgtcatccggctgctggtgaagagaggagctgaggtgcacctggtgccctggaaccacgacttcaccaagatggagtatgatggcatcctgattgctgggggccctggcaacccagccctggccgagcccctcatccagaatgtgaggaagatcctggagagtgacaggaaggagcccctgtttggcatcagcactggaaacctgatcaccggcctggccgccggggccaagacctacaagatgtccatggccaacagaggccagaaccagcctgtgctgaacatcaccaacaagcaggccttcatcacagcccagaaccacggctacgccctggacaacaccctgcctgctggctggaagcccctgtttgtgaatgtgaatgaccagaccaatgaaggcatcatgcatgagagcaagcccttctttgctgtgcagttccaccctgaggtgaccccaggccccatcgacacagagtacctgtttgacagcttcttcagcctcatcaagaagggcaaggccaccaccatcacctctgtgctgcccaagccagccctggtggccagccgggtggaggtgtccaaggtgctgatcctgggcagcggcggcctgagcatcggccaggccggggagtttgactacagcggcagccaggccgtgaaggccatgaaggaggagaatgtgaagacagtgctgatgaaccccaacatcgcctctgtgcagaccaatgaggtgggcctgaagcaggccgacacagtgtacttcctgcccatcaccccccagtttgtgacagaggtgatcaaggccgagcagccagatggcctcatcctgggcatgggcggccagacagccctgaactgtggggtggagctgttcaagaggggcgtgctgaaggagtatggagtgaaggtgctgggcacctctgtggagagcatcatggccacagaagatcggcagctgttcagtgacaagctgaatgagatcaatgagaagatcgcccccagctttgctgtggagagcattgaagatgccctgaaggctgctgacaccatcggctaccctgtgatgatccgcagcgcctatgccctgggcggcctgggcagcggcatctgccccaaccgggagaccctgatggacctgagcaccaaggcctttgccatgaccaaccagatcctggtggagaagtctgtgacaggctggaaggagattgaatatgaggtggtgagagatgctgatgacaactgtgtgacagtgtgcaacatggagaatgtggatgccatgggcgtgcacactggagacagcgtggtggtggccccagcccagaccctgagcaatgctgagttccagatgctgcggaggaccagcatcaacgtggtgcgccacctgggcatcgtgggggagtgcaacatccagtttgccctgcaccccacctccatggagtactgcatcatcgaggtgaatgcccggctgagccgcagcagcgccctggccagcaaggccaccggctaccccctggccttcatcgccgccaagatcgccctgggcatccccctgcctgagatcaagaatgtggtgtctgggaagaccagcgcctgctttgagcccagcctggactacatggtgaccaagatcccccgctgggacctggaccgcttccacggcaccagcagccgcatcggcagctccatgaagtctgtgggggaggtgatggccatcggccgcacctttgaggagagcttccagaaggccctgaggatgtgccaccccagcattgagggcttcaccccccggctgcccatgaacaaggagtggcccagcaacctggacctgaggaaggagctgtctgagcccagcagcacccgcatctatgccatcgccaaggccattgatgacaacatgagcctggatgaaattgagaagctgacctacatcgacaagtggttcctgtacaagatgagggacatcctgaacatggagaagaccctgaagggcctgaacagcgagagcatgacagaggagaccctgaagagggccaaggagatcggcttcagtgacaagcagatcagcaagtgcctgggcctgacagaggcccagacccgggagctgcggctgaagaagaacatccacccctgggtgaagcagattgacaccctggccgctgagtaccccagcgtgaccaactacctgtatgtgacctacaacggccaggagcatgatgtgaactttgatgaccacggcatgatggtgctgggctgcggcccctaccacatcggcagctctgtggagtttgactggtgtgctgtgagcagcatccgcaccctgcggcagctgggcaagaagacagtggtggtgaactgcaaccctgagaccgtgtccacagactttgatgaatgtgacaagctgtactttgaggagctgagcctggagcgcatcctggacatctaccaccaggaggcctgtggcggctgcatcatctctgtgggcggccagatccccaacaacctggccgtgcccctgtacaagaatggagtgaagatcatgggcaccagccccctgcagattgacagagcagaagatagaagcatcttctctgctgtgctggatgagctgaaggtggcccaggccccctggaaggctgtgaacaccctgaatgaggccctggagtttgccaagtctgtggactacccctgcctgctgcggcccagctatgtgctgagcggcagcgccatgaatgtggtgttttctgaagatgagatgaagaagttcctggaggaggccaccagggtgtcccaggagcaccctgtggtgctgaccaagtttgtggagggcgcccgggaggtggagatggatgctgtgggcaaggatggccgggtcatcagccacgccatcagcgagcacgtggaggatgctggggtgcacagcggagatgccaccctgatgctgcccacccagaccatcagccagggcgccatcgagaaggtgaaggatgccaccaggaagatcgccaaggcctttgccatcagcggccccttcaacgtgcagttcctggtgaagggaaatgatgtgctggtgattgagtgcaacctgcgggccagccgctccttcccctttgtgtccaagaccctgggcgtggacttcattgatgtggccaccaaggtgatgattggagaaaatgtggatgagaagcacctgcccaccctggaccaccccatcatcccagctgactatgtggccatcaaggcccccatgttctcctggccccggctgagagatgctgaccccatcctgcgctgtgagatggccagcactggagaggtggcctgcttcggggagggcatccacacagccttcctgaaggccatgctgagcacaggcttcaagatcccccagaagggcatcctgattggcatccagcagagcttccggccccgcttcctgggcgtggccgagcagctgcacaatgaaggcttcaagctgtttgccacagaggccaccagtgactggctgaatgccaacaacgtgcctgccacccctgtggcctggcccagccaggagggccagaaccccagcctgagcagcatcaggaagctgatcagagatggcagcattgacctggtgatcaacctgcccaacaacaacaccaagtttgtgcatgacaactacgtgatcagaagaacagctgtggacagcggcatccccctgctgaccaacttccaggtgaccaagctgtttgctgaggccgtgcagaagagcaggaaggtggacagcaagagcctcttccactaccggcagtacagcgctgggaaggccgcctag

SEQ ID NO: 3025 - DNA, 3150 bp, synthetic construct
  misc_feature 1..3150: note = source = /note="Description of Artificial Sequence: Synthetic coding sequence"
  source 1..3150: mol_type = other DNA
atgaaggaggagaatgtgaagacagtgctgatgaaccccaacatcgcctctgtgcagaccaatgaggtgggcctgaagcaggccgacacagtgtacttcctgcccatcaccccccagtttgtgacagaggtgatcaaggccgagcagccagatggcctcatcctgggcatgggcggccagacagccctgaactgtggggtggagctgttcaagaggggcgtgctgaaggagtatggagtgaaggtgctgggcacctctgtggagagcatcatggccacagaggaccggcagctgttcagtgacaagctgaatgagatcaatgagaagatcgcccccagctttgctgtggagagcattgaagatgccctgaaggctgctgacaccatcggctaccctgtgatgatccgcagcgcctatgccctgggcggcctgggcagcggcatctgccccaaccgggagaccctgatggacctgagcaccaaggcctttgccatgaccaaccagatcctggtggagaagtctgtgacaggctggaaggagattgaatatgaggtggtgagagatgctgatgacaactgtgtgacagtgtgcaacatggagaatgtggatgccatgggcgtgcacactggagacagcgtggtggtggccccagcccagaccctgagcaatgctgagttccagatgctgcggaggaccagcatcaacgtggtgcgccacctgggcatcgtgggggagtgcaacatccagtttgccctgcaccccacctccatggagtactgcatcatcgaggtgaatgcccggctgagccgcagcagcgccctggccagcaaggccaccggctaccccctggccttcatcgccgccaagatcgccctgggcatccccctgcctgagatcaagaatgtggtgtctgggaagaccagcgcctgctttgagcccagcctggactacatggtgaccaagatcccccgctgggacctggaccgcttccacggcaccagcagcagaattggcagctccatgaagtctgtgggggaggtgatggccatcggccgcacctttgaggagagcttccagaaggccctgaggatgtgccaccccagcattgagggcttcaccccccggctgcccatgaacaaggagtggcccagcaacctggacctgaggaaggagctgtctgagcccagcagcacccgcatctatgccatcgccaaggccattgatgacaacatgagcctggatgaaattgagaagctgacctacatcgacaagtggttcctgtacaagatgagggacatcctgaacatggagaagaccctgaagggcctgaacagcgagagcatgacagaggagaccctgaagagggccaaggagatcggcttcagtgacaagcagatcagcaagtgcctgggcctgacagaggcccagacccgggagctgcggctgaagaagaacatccacccctgggtgaagcagattgacaccctggccgctgagtaccccagcgtgaccaactacctgtatgtgacctacaacggccaggagcatgatgtgaactttgatgaccacggcatgatggtgctgggctgcggcccctaccacatcggcagctctgtggagtttgactggtgtgctgtgagcagcatccgcaccctgcggcagctgggcaagaagacagtggtggtgaactgcaaccctgagaccgtgtccacagactttgatgaatgtgacaagctgtactttgaggagctgagcctggagcgcatcctggacatctaccaccaggaggcctgtggcggctgcatcatctctgtgggcggccagatccccaacaacctggccgtgcccctgtacaagaatggagtgaagatcatgggcaccagccccctgcagattgacagagctgaggacaggagcatcttctctgctgtgctggatgagctgaaggtggcccaggccccctggaaggctgtgaacaccctgaatgaggccctggagtttgccaagtctgtggactacccctgcctgctgcggcccagctatgtgctgagcggcagcgccatgaatgtggtgttttctgaagatgagatgaagaagttcctggaggaggccaccagggtgtcccaggagcaccctgtggtgctgaccaagtttgtggagggcgcccgggaggtggagatggatgctgtgggcaaggatggccgggtcatcagccacgccatcagcgagcacgtggaggatgctggggtgcacagcggagatgccaccctgatgctgcccacccagaccatcagccagggcgccatcgagaaggtgaaggatgccaccaggaagatcgccaaggcctttgccatcagcggccccttcaacgtgcagttcctggtgaagggaaatgatgtgctggtgattgagtgcaacctgcgggccagccgctccttcccctttgtgtccaagaccctgggcgtggacttcattgatgtggccaccaaggtgatgattggagaaaatgtggatgagaagcacctgcccaccctggaccaccccatcatcccagctgactatgtggccatcaaggcccccatgttctcctggccccggctgagagatgctgaccccatcctgcgctgtgagatggccagcactggagaggtggcctgctttggagagggcatccacacagccttcctgaaggccatgctgagcacaggcttcaagatcccccagaagggcatcctgattggcatccagcagagcttccggccccgcttcctgggcgtggccgagcagctgcacaatgaaggcttcaagctgtttgccacagaggccaccagtgactggctgaatgccaacaacgtgcctgccacccctgtggcctggcccagccaggagggccagaaccccagcctgagcagcatcaggaagctgatcagagatggcagcattgacctggtgatcaacctgcccaacaacaacaccaagtttgtgcatgacaactacgtgatccggaggacagctgtggacagcggcatccccctgctgaccaacttccaggtgaccaagctgtttgctgaggccgtgcagaagagcaggaaggtggacagcaagagcctcttccactaccggcagtacagcgctgggaaggccgcctag

SEQ ID NO: 3026 - DNA, 366 bp, synthetic construct; identical to SEQ ID NO: 3023
  misc_feature 1..366: note = source = /note="Description of Artificial Sequence: Synthetic coding sequence"
  source 1..366: mol_type = other DNA

SEQ ID NO: 3027 - DNA, 1542 bp, synthetic construct
  misc_feature 1..1542: note = source = /note="Description of Artificial Sequence: Synthetic coding sequence"
  source 1..1542: mol_type = other DNA
atgacccgcatcctgacagccttcaaggtggtgaggaccctgaagacaggcttcggcttcaccaacgtgacagcccaccagaagtggaagttcagccggcccggcatccggctgctgtctgtgaaggcccagacagcccacatcgtgctggaggatggcaccaagatgaagggctacagctttggccaccccagctctgtggccggggaggtggtgttcaacacaggcctgggcggctacccagaggccatcacagatcctgcctacaagggccagatcctgaccatggccaaccccatcattggaaatggaggagccccagacaccacagccctggatgagctgggcctgagcaagtacctggagagcaatggcatcaaggtgtctggcctgctggtgctggactacagcaaggactacaaccactggctggccaccaagagcctgggccagtggctgcaggaggagaaggtgcctgccatctacggcgtggacaccaggatgctgaccaagatcatccgggacaagggcaccatgctgggcaagattgaatttgagggccagcctgtggactttgtggaccccaacaagcagaacctgattgctgaggtgtccaccaaggatgtgaaggtgtatggcaagggcaaccccaccaaggtggtggccgtggactgtggcatcaagaacaacgtcatccggctgctggtgaagagaggagctgaggtgcacctggtgccctggaaccacgacttcaccaagatggagtatgatggcatcctgattgctgggggccctggcaacccagccctggccgagcccctcatccagaatgtgaggaagatcctggagagtgacaggaaggagcccctgtttggcatcagcactggaaacctgatcaccggcctggccgccggggccaagacctacaagatgtccatggccaacagaggccagaaccagcctgtgctgaacatcaccaacaagcaggccttcatcacagcccagaaccacggctacgccctggacaacaccctgcctgctggctggaagcccctgtttgtgaatgtgaatgaccagaccaatgaaggcatcatgcatgagagcaagcccttctttgctgtgcagttccaccctgaggtgaccccaggccccatcgacacagagtacctgtttgacagcttcttcagcctcatcaagaagggcaaggccaccaccatcacctctgtgctgcccaagccagccctggtggccagccgggtggaggtgtccaaggtgctgatcctgggcagcggcggcctgagcatcggccaggccggggagtttgactacagcggcagccaggccgtgaaggccatgaaggaggagaatgtgaagacagtgctgatgaaccccaacatcgcctctgtgcagaccaatgaggtgggcctgaagcaggccgacacagtgtacttcctgcccatcaccccccagtttgtgacagaggtgatcaaggccgagcagccagatggcctcatcctgggcatgggcgcccggcagctgtag

SEQ ID NO: 3028 - DNA, 4527 bp, synthetic construct
  misc_feature 1..4527: note = source = /note="Description of Artificial Sequence: Synthetic coding sequence"
  source 1..4527: mol_type = other DNA
cggccccggccccagatcatcaagatgacccgcatcctgacagccttcaaggtggtgaggaccctgaagacaggcttcggcttcaccaacgtgacagcccaccagaagtggaagttcagccggcccggcatccggctgctgtctgtgaaggcccagacagcccacatcgtgctggaggatggcaccaagatgaagggctacagctttggccaccccagctctgtggccggggaggtggtgttcaacacaggcctgggcggctacccagaggccatcacagatcctgcctacaagggccagatcctgaccatggccaaccccatcattggaaatggaggagccccagacaccacagccctggatgagctgggcctgagcaagtacctggagagcaatggcatcaaggtgtctggcctgctggtgctggactacagcaaggactacaaccactggctggccaccaagagcctgggccagtggctgcaggaggagaaggtgcctgccatctacggcgtggacaccaggatgctgaccaagatcatccgggacaagggcaccatgctgggcaagattgaatttgagggccagcctgtggactttgtggaccccaacaagcagaacctgattgctgaggtgtccaccaaggatgtgaaggtgtatggcaagggcaaccccaccaaggtggtggccgtggactgtggcatcaagaacaacgtcatccggctgctggtgaagagaggagctgaggtgcacctggtgccctggaaccacgacttcaccaagatggagtatgatggcatcctgattgctgggggccctggcaacccagccctggccgagcccctcatccagaatgtgaggaagatcctggagagtgacaggaaggagcccctgtttggcatcagcactggaaacctgatcaccggcctggccgccggggccaagacctacaagatgtccatggccaacagaggccagaaccagcctgtgctgaacatcaccaacaagcaggccttcatcacagcccagaaccacggctacgccctggacaacaccctgcctgctggctggaagcccctgtttgtgaatgtgaatgaccagaccaatgaaggcatcatgcatgagagcaagcccttctttgctgtgcagttccaccctgaggtgaccccaggccccatcgacacagagtacctgtttgacagcttcttcagcctcatcaagaagggcaaggccaccaccatcacctctgtgctgcccaagccagccctggtggccagccgggtggaggtgtccaaggtgctgatcctgggcagcggcggcctgagcatcggccaggccggggagtttgactacagcggcagccaggccgtgaaggccatgaaggaggagaatgtgaagacagtgctgatgaaccccaacatcgcctctgtgcagaccaatgaggtgggcctgaagcaggccgacacagtgtacttcctgcccatcaccccccagtttgtgacagaggtgatcaaggccgagcagccagatggcctcatcctgggcatgggcggccagacagccctgaactgtggggtggagctgttcaagaggggcgtgctgaaggagtatggagtgaaggtgctgggcacctctgtggagagcatcatggccacagaagatcggcagctgttcagtgacaagctgaatgagatcaatgagaagatcgcccccagctttgctgtggagagcattgaagatgccctgaaggctgctgacaccatcggctaccctgtgatgatccgcagcgcctatgccctgggcggcctgggcagcggcatctgccccaaccgggagaccctgatggacctgagcaccaaggcctttgccatgaccaaccagatcctggtggagaagtctgtgacaggctggaaggagattgaatatgaggtggtgagagatgctgatgacaactgtgtgacagtgtgcaacatggagaatgtggatgccatgggcgtgcacactggagacagcgtggtggtggccccagcccagaccctgagcaatgctgagttccagatgctgcggaggaccagcatcaacgtggtgcgccacctgggcatcgtgggggagtgcaacatccagtttgccctgcaccccacctccatggagtactgcatcatcgaggtgaatgcccggctgagccgcagcagcgccctggccagcaaggccaccggctaccccctggccttcatcgccgccaagatcgccctgggcatccccctgcctgagatcaagaatgtggtgtctgggaagaccagcgcctgctttgagcccagcctggactacatggtgaccaagatcccccgctgggacctggaccgcttccacggcaccagcagccgcatcggcagctccatgaagtctgtgggggaggtgatggccatcggccgcacctttgaggagagcttccagaaggccctgaggatgtgccaccccagcattgagggcttcaccccccggctgcccatgaacaaggagtggcccagcaacctggacctgaggaaggagctgtctgagcccagcagcacccgcatctatgccatcgccaaggccattgatgacaacatgagcctggatgaaattgagaagctgacctacatcgacaagtggttcctgtacaagatgagggacatcctgaacatggagaagaccctgaagggcctgaacagcgagagcatgacagaggagaccctgaagagggccaaggagatcggcttcagtgacaagcagatcagcaagtgcctgggcctgacagaggcccagacccgggagctgcggctgaagaagaacatccacccctgggtgaagcagattgacaccctggccgctgagtaccccagcgtgaccaactacctgtatgtgacctacaacggccaggagcatgatgtgaactttgatgaccacggcatgatggtgctgggctgcggcccctaccacatcggcagctctgtggagtttgactggtgtgctgtgagcagcatccgcaccctgcggcagctgggcaagaagacagtggtggtgaactgcaaccctgagaccgtgtccacagactttgatgaatgtgacaagctgtactttgaggagctgagcctggagcgcatcctggacatctaccaccaggaggcctgtggcggctgcatcatctctgtgggcggccagatccccaacaacctggccgtgcccctgtacaagaatggagtgaagatcatgggcaccagccccctgcagattgacagagcagaagatagaagcatcttctctgctgtgctggatgagctgaaggtggcccaggccccctggaaggctgtgaacaccctgaatgaggccctggagtttgccaagtctgtggactacccctgcctgctgcggcccagctatgtgctgagcggcagcgccatgaatgtggtgttttctgaagatgagatgaagaagttcctggaggaggccaccagggtgtcccaggagcaccctgtggtgctgaccaagtttgtggagggcgcccgggaggtggagatggatgctgtgggcaaggatggccgggtcatcagccacgccatcagcgagcacgtggaggatgctggggtgcacagcggagatgccaccctgatgctgcccacccagaccatcagccagggcgccatcgagaaggtgaaggatgccaccaggaagatcgccaaggcctttgccatcagcggccccttcaacgtgcagttcctggtgaagggaaatgatgtgctggtgattgagtgcaacctgcgggccagccgctccttcccctttgtgtccaagaccctgggcgtggacttcattgatgtggccaccaaggtgatgattggagaaaatgtggatgagaagcacctgcccaccctggaccaccccatcatcccagctgactatgtggccatcaaggcccccatgttctcctggccccggctgagagatgctgaccccatcctgcgctgtgagatggccagcactggagaggtggcctgcttcggggagggcatccacacagccttcctgaaggccatgctgagcacaggcttcaagatcccccagaagggcatcctgattggcatccagcagagcttccggccccgcttcctgggcgtggccgagcagctgcacaatgaaggcttcaagctgtttgccacagaggccaccagtgactggctgaatgccaacaacgtgcctgccacccctgtggcctggcccagccaggagggccagaaccccagcctgagcagcatcaggaagctgatcagagatggcagcattgacctggtgatcaacctgcccaacaacaacaccaagtttgtgcatgacaactacgtgatcagaagaacagctgtggacagcggcatccccctgctgaccaacttccaggtgaccaagctgtttgctgaggccgtgcagaagagcaggaaggtggacagcaagagcctcttccactaccggcagtacagcgctgggaaggccgcctag

SEQ ID NO: 3029 - DNA, 213 bp, synthetic construct
  misc_feature 1..213: note = source = /note="Description of Artificial Sequence: Synthetic coding sequence"
  source 1..213: mol_type = other DNA
atgacccgcatcctgacagccttcaaggtggtgaggaccctgaagacaggcttcggcttcaccaacgtgacagcccaccagaagtggaagttcagccggcccggcatccggctgctgtctgtgaaggcccagacagcccacatcgtgctggaggacagagatgctgacaccccagcccccctgctgaaccagcctgagccccacgtgatctag

SEQ ID NO: 3030 - DNA, 606 bp, synthetic construct
  misc_feature 1..606: note = source = /note="Description of Artificial Sequence: Synthetic coding sequence"
  source 1..606: mol_type = other DNA
atgagcagaagagagggcagcctggaggacccccagacagacagctctgtgtccctgctgccccacctggaggccaagatccggcagacccacagcctggcccacctgctgaccaagtatgcagagcagctgctgcaggagtatgtgcagctgcagggcgaccccttcggcctgcccagcttcagccccccccggctgcctgtggccggcctgagcgccccagcccccagccatgctggcctgcctgtgcatgagcggctgcggctggatgctgctgccctggccgccctgccccccctgctggatgctgtgtgccggcggcaggccgagctgaacccccgggccccccggctgctgcggcggctggaggatgctgcccggcaggcccgggccctgggcgctgctgtggaggccctgctggccgccctgggcgccgccaacagaggccccagggctgagcccccagctgccacagccagcgctgccagcgccactggagtcttccctgccaaggtgctgggcctgcgggtgtgtggcctgtaccgggagtggctgagcaggacagaaggagacctgggccagctgctgcccggcggcagcgcctag

SEQ ID NO: 3031 - DNA, 603 bp, synthetic construct
  misc_feature 1..603: note = source = /note="Description of Artificial Sequence: Synthetic coding sequence"
  source 1..603: mol_type = other DNA
atgagcagaagagagggcagcctggacccccagacagacagctctgtgtccctgctgccccacctggaggccaagatccggcagacccacagcctggcccacctgctgaccaagtatgcagagcagctgctgcaggagtatgtgcagctgcagggcgaccccttcggcctgcccagcttcagccccccccggctgcctgtggccggcctgagcgccccagcccccagccacgccggcctgcctgtgcatgagcggctgcggctggatgctgctgccctggccgccctgccccccctgctggatgctgtgtgccggcggcaggccgagctgaacccccgggccccccggctgctgcggcggctggaggatgctgcccggcaggcccgggccctgggcgctgctgtggaggccctgctggccgccctgggcgccgccaacagaggccccagggctgagcccccagctgccacagccagcgctgccagcgccaccggggtcttccctgccaaggtgctgggcctgcgggtgtgtggcctgtaccgggagtggctgagcaggacagaaggagacctgggccagctgctgcccggcggcagcgcctag

SEQ ID NO: 3032 - DNA, 513 bp, synthetic construct
  misc_feature 1..513: note = source = /note="Description of Artificial Sequence: Synthetic coding sequence"
  source 1..513: mol_type = other DNA
atgaagacccagagagatggccacagcctgggccgctggagcctggtgctgctgctgctgggcctggtgatgcccctggccatcatcgcccaggtgctgagctacaaggaggccgtgctgcgggccattgatggcatcaaccagaggagcagtgatgccaacctgtaccgcctgctggacctggacccccggcccaccatggatggagaccctgacacccccaagcctgtgtccttcaccgtgaaggagaccgtgtgccccaggaccacccagcagagccctgaggactgtgacttcaagaaggatggcctggtgaagcgctgcatgggcaccgtgaccctgaaccaggcccggggcagctttgacatcagctgtgacaaggacaacaagagatttgccctgctgggggacttcttcaggaagagcaaggagaagattggcaaggagttcaagagaattgtgcagaggatcaaggacttcctgaggaacctggtgcccaggacagagagctag

SEQ ID NO: 3033 - DNA, 1692 bp, synthetic construct
  misc_feature 1..1692: note = source = /note="Description of Artificial Sequence: Synthetic coding sequence"
  source 1..1692: mol_type = other DNA
gcctgctgctgcggcggcggctgcacctgctgcggctgcacctgcaccaccggctgctgcaccacctgcacctgctgtgcctgtgcctgcaccaccggcaccaccaccggggccggggcctgctgcacaggaggctgtgccgccggcggcaccggctgcggcggggccggctgctgctgcacctgctgtgccggggctgctggcaccggctgcggcggcacctgtgccgccggctgcggcggctgtgccggctgcggcggggccggggcctgtggcggctgtggggccggctgctgtgccggcggggccgcctgctgcacctgctgctgctgctgctgcggctgcggcacctgctgctgctgtgccggctgcaccacctgctgctgtgccggctgcggcaccggcggctgcggcggctgcggcggggccgcctgctgctgctgctgcggcggggccggggctgctgctggggccgccacagctgctgctggggcctgcacaggaggagccacagcctgtgccggcggcacctgctgtgccaccacagcctgtggcacctgtgccaccacctgcaccggctgtgccggcggctgctgtgccgccaccaccacagccaccggggccggcggggccgccacctgctgtgccgccggggccaccggggccgccaccaccaccggcggggccggctgtgccggcggggccggggccggcggctgctgcggcaccaccaccggcacctgcaccggctgtgccggcaccggctgctgctgctgtgccggcggctgcaccggctgcacctgctgctgtgccggctgcggctgcaccacctgctgctgtgccgcctgtgccggggccggcggggcctgctgtgccacctgcacaggagccaccggggccaccacctgtgccacagctgggggctgtgcctgtgccgccgcctgtgccactggagctgctgccaccggggcctgcaccaccaccggggctgctggcaccaccacctgctgcaccacctgtgccgccacagctgctgctgctgcctgtgccggggcctgtgccgccacagccaccggcaccacagccacctgtgccggggccacctgtgccgccgcctgcacctgctgcggggcctgctgctgctgtgccgcctgtggggccggggccaccacctgctgcaccggggctgctggagctgcctgcaccggctgtggggccggcggggccggcggcaccggcggcggctgctgcacctgcaccacctgtgccggctgtggggccggctgcaccggcggggcctgcaccggctgcacctgctgctgcaccggcggggccggctgtgcctgtggggccggcaccacctgtgccggcggggccgccggcggctgcacctgtgccggcggggccgccggggccggcggggccggggccggctgtgccggctgtgccgccggctgcggcggggccgccacagccacctgcacctgtggggccaccggctgtgccacagctgccaccggctgtgccggcaccaccggcggcactggaggcggcggctgctgtgccactggagcctgtggcggcggcggctgctgctgcggcggggccgcctgcacctgtgcctgctgtgccggctgcaccacagctggctgtgccggctgcggctgcacctgtggcggctgcaccggctag

SEQ ID NO: 3034 - DNA, 555 bp, synthetic construct
  misc_feature 1..555: note = source = /note="Description of Artificial Sequence: Synthetic coding sequence"
  source 1..555: mol_type = other DNA
atggctgaccacctgatgctggccgagggctaccgcctggtgcagaggcctccttctgctgctgctgcccacggcccccacgccctgcggaccctgcccccctatgccggccctggcctggacagcggcctgcggcccaggggggcccccctgggccccccaccaccccggcagcccggggccctggcctacggggcctttggaccacccagcagcttccagcccttccctgctgtgcccccacctgctgctggcatcgcccacctgcagcctgtggccaccccctacccaggccgggctgctgcccccccaaatgcccctgggggccccccaggcccccagcctgcccccagcgctgctgcccctcctcctccagcccacgccctgggcggcatggatgctgagctgattgatgaggaggccctgaccagcctggagctggagctgggcctgcaccgggtgcgggagctgcctgagctgttcctgggccagagcgagtttgactgcttcagtgacctgggcagcgcccctcctgctggctctgtgtcctgctag

SEQ ID NO: 3035 - DNA, 3198 bp, synthetic construct
  misc_feature 1..3198: note = source = /note="Description of Artificial Sequence: Synthetic coding sequence"
  source 1..3198: mol_type = other DNA
atgaagatcctgatcctgggcatcttcctgttcctgtgcagcaccccagcctgggccaaggagaagcactactacatcggcatcatcgagaccacctgggactatgccagtgaccatggagagaagaagctgatctctgtggacacagagcacagcaacatctacctgcagaatggaccagacagaattggccgcctgtacaagaaggccctgtacctgcagtacacagatgagaccttccgcaccaccatcgagaagcctgtgtggctgggcttcctgggccccatcatcaaggccgagactggagacaaggtgtatgtgcacctgaagaacctggccagccggccctacaccttccacagccacggcatcacctactacaaggagcacgagggcgccatctacccagacaacaccacagacttccagagagcagatgacaaggtgtacccaggagagcagtacacctacatgctgctggccacagaggagcagagccctggagaaggagatggcaactgtgtgacccgcatctaccacagccacattgatgcccccaaggacatcgccagcggcctcatcggccccctcatcatctgcaagaaggacagcctggacaaggagaaggagaagcacatcgaccgggagtttgtggtgatgttttctgtggtggatgagaacttctcctggtacctggaggacaacatcaagacctactgcagcgagcctgagaaggtggacaaggacaatgaagacttccaggagagcaacaggatgtacagcgtgaatggctacaccttcggcagcctgcccggcctgtccatgtgtgccgaggacagagtgaagtggtacctgtttggcatgggaaatgaggtggatgtgcacgccgccttcttccacggccaggccctgaccaacaagaactacagaattgacaccatcaacctcttccctgccaccctgtttgatgcctacatggtggcccagaaccctggagagtggatgctgagctgccagaacctgaaccacctgaaggccggcctgcaggccttcttccaggtgcaggagtgcaacaagagcagcagcaaggacaacatccggggcaagcacgtgcgccactactacatcgctgctgaggagatcatctggaactatgcccccagcggcatcgacatcttcaccaaggagaacctgacagcccctggcagtgacagcgctgtgttctttgagcagggcaccacccgcatcggcggcagctacaagaagctggtgtaccgggagtacacagatgccagcttcaccaacaggaaggagcggggccctgaggaggagcacctgggcatcctgggccctgtgatctgggccgaggtgggggacaccatccgggtgaccttccacaacaagggggcctaccccctgagcattgagcccatcggcgtgcgcttcaacaagaacaatgaaggcacctactacagccccaactacaacccccagagccgctctgtgcccccatctgccagccacgtggcccccacagagaccttcacctatgagtggacagtgcccaaggaggtgggccccaccaatgctgaccctgtgtgcctggccaagatgtactacagcgctgtggagcccaccaaggacatcttcaccggcctcatcggccccatgaagatctgcaagaagggcagcctgcacgccaacggccggcagaaggatgtggacaaggagttctacctgttccccaccgtgtttgatgaaaatgaaagcctgctgctggaggacaacatccgcatgttcaccacagccccagaccaggtggacaaggaggatgaggacttccaggagagcaacaagatgcacagcatgaatggcttcatgtatggcaaccagcccggcctgaccatgtgcaagggggacagcgtggtgtggtacctgttctctgctggaaatgaagcagatgtgcacggcatctacttcagcggcaacacctacctgtggagaggagagcggcgggacacagccaacctcttcccccagaccagcctgaccctgcacatgtggccagacacagagggcaccttcaacgtggagtgcctgaccacagaccactacacaggaggcatgaagcagaagtacacagtgaaccagtgccggcggcagagcgaggacagcaccttctacctgggggagaggacctactacatcgctgctgtggaggtggagtgggactacagcccccagcgggagtgggagaaggagctgcaccacctgcaggagcagaatgtgtccaatgccttcctggacaagggggagttctacatcggcagcaagtacaagaaggtggtgtaccggcagtacacagacagcaccttccgggtgcctgtggagaggaaggccgaggaggagcacctgggcatcctgggcccccagctgcacgcagatgtgggggacaaggtgaagatcatcttcaagaacatggccacccggccctacagcatccacgcccatggagtgcagacagagagcagcacagtgacccccaccctgcctggagagaccctgacctacgtgtggaagatccctgagaggtctggagctggaacagaggacagcgcctgcatcccctgggcctactacagcacagtggaccaggtgaaggacctgtacagcggcctcatcggccccctcatcgtgtgcagaagaccctacctgaaggtgttcaaccccaggaggaagctggagtttgccctgctcttcctggtgtttgatgaaaatgaatcctggtacctggatgacaacatcaagacctacagcgaccaccctgagaaggtgaacaaggatgatgaggagttcatcgagagcaacaagatgcacgccatcaatggccgcatgtttggaaacctgcagggcctgaccatgcacgtgggagatgaggtgaactggtacctgatgggcatgggaaatgaaattgacctgcacacagtgcacttccacggccacagcttccagtacaagcacagaggagtgtacagcagtgatgtgtttgacatcttccctggcacctaccagaccctggagatgttccccaggaccccaggcatctggctgctgcactgccacgtgacagaccacatccacgccggcatggagaccacctacacagtgctgcagaatgaagacaccaagagcggctag

SEQ ID NO: 3036 - DNA, 603 bp, synthetic construct
  misc_feature 1..603: note = source = /note="Description of Artificial Sequence: Synthetic coding sequence"
  source 1..603: mol_type = other DNA
atggccttcacagagcacagccccctgaccccccacagaagagacctgtgcagccgcagcatctggctggccaggaagatccgcagtgacctgacagccctgacagagagctatgtgaagcaccagggcctgaacaagaacatcaacctggacagcgcagatggcatgcctgtggccagcacagaccagtggagcgagctgacagaggccgagcggctgcaggagaacctgcaggcctaccgcaccttccacgtgctgctggcccggctgctggaggaccagcaggtgcacttcacccccacagaaggagacttccaccaggccatccacaccctgctgctgcaggtggccgcctttgcctaccagatcgaggagctgatgatcctgctggagtacaagatccccagaaatgaagcagatggcatgcccatcaacgtgggagatggcggcctgtttgagaagaagctgtggggcctgaaggtgctgcaggagctgagccagtggacagtgcgcagcatccatgacctgcgcttcatcagcagccaccagacaggcatcccagcccggggcagccactacatcgccaacaacaagaagatgtag

SEQ ID NO: 3037 - DNA, 1869 bp, synthetic construct
  misc_feature 1..1869: note = source = /note="Description of Artificial Sequence: Synthetic coding sequence"
  source 1..1869: mol_type = other DNA
atggcccacgtgcggggcctgcagctgcccggctgcctggccctggccgccctgtgcagcctggtgcacagccagcacgtgttcctggccccccagcaggcccggagcctgctgcagagggtgcggcgggccaacaccttcctggaggaggtgaggaaaggaaacctggagagagaatgtgtggaggagacctgcagctatgaggaggcctttgaggccctggagagcagcacagccacagatgtgttctgggccaagtacacagcctgtgaaacagcccggaccccccgggacaagctggccgcctgcctggagggcaactgtgccgagggcctgggcaccaactaccggggccacgtgaacatcaccaggtctggaattgagtgccagctgtggaggagccgctacccccacaagccagagatcaacagcaccacccaccctggagctgacctgcaggagaacttctgcaggaacccagacagcagcaccaccggcccctggtgctacaccacagaccccaccgtgcggcggcaggagtgcagcatccctgtgtgtggccaggaccaggtgacagtggccatgacccccaggtctgagggcagctctgtgaacctgagcccccccctggagcagtgtgtgcctgaccggggccagcagtaccagggccgcctggccgtgaccacccacggcctgccctgcctggcctgggccagcgcccaggccaaggccctgagcaagcaccaggacttcaacagcgctgtgcagctggtggagaacttctgcagaaatccagatggagatgaggagggcgtgtggtgctacgtggccggcaagccaggggactttggctactgtgacctgaactactgtgaggaggccgtggaggaggagactggagatggcctggatgaagattctgaccgggccatcgagggccgcacagccaccagcgagtaccagaccttcttcaaccccaggacctttggaagtggagaggccgactgtggcctgcggcccctgtttgagaagaagagcctggaggacaagacagagcgggagctgctggagagctacattgatggccgcatcgtggagggcagtgatgctgagatcggcatgagcccctggcaggtgatgctgttcaggaagagcccccaggagctgctgtgtggggccagcctcatcagtgaccgctgggtgctgacagctgcccactgcctgctgtacccaccctgggacaagaacttcacagaaaatgacctgctggtgcgcatcggcaagcacagcaggaccaggtatgaaagaaacatcgagaagatctccatgctggagaagatctacatccacccccgctacaactggagggagaacctggaccgggacatcgccctgatgaagctgaagaagcctgtggccttcagtgactacatccaccctgtgtgcctgcctgaccgggagacagctgccagcctgctgcaggccggctacaagggccgggtgacaggctggggcaacctgaaggagacctggacagccaacgtgggcaagggccagcccagcgtgctgcaggtggtgaacctgcccatcgtggagaggcctgtgtgcaaggacagcacccgcatccgcatcacagacaacatgttctgtgccggctacaagccagatgagggcaagagaggagatgcctgtgagggggacagcggcggcccctttgtgatgaagagccccttcaacaaccgctggtaccagatgggcatcgtgtcctggggcgagggctgtgacagagatggcaagtatggcttctacacccacgtgttccggctgaagaagtggatccagaaggtgattgaccagtttggagagtag

SEQ ID NO: 3038 - DNA, 195 bp, synthetic construct
  misc_feature 1..195: note = source = /note="Description of Artificial Sequence: Synthetic coding sequence"
  source 1..195: mol_type = other DNA
ctgcagggcgagttcctgccccagccccggcagcagcaccacggcaccctggtgctgcactaccggccccaccgggaggaggccggcatgcagcacccctgcctgtggccaggcagcagccactgcagtgatgacagcaccctgcggcggctgcagtgtgagagcgtgaccagcattggagctgtgtgcccctag

SEQ ID NO: 3039 - DNA, 1752 bp, synthetic construct
  misc_feature 1..1752: note = source = /note="Description of Artificial Sequence: Synthetic coding sequence"
  source 1..1752: mol_type = other DNA
atggcccacgtgcggggcctgcagctgcccggctgcctggccctggccgccctgtgcagcctggtgcacagccagcacgtgttcctggccccccagcaggcccggagcctgctgcagagggtgcggcgggccaacaccttcctggaggaggtgaggaaaggaaacctggagagagaatgtgtggaggagacctgcagctatgaggaggcctttgaggccctggagagcagcacagccacagatgtgttctgggccaagtacacagcctgtgaaacagcccggaccccccgggacaagctggccgcctgcctggagggcaactgtgccgagggcctgggcaccaactaccggggccacgtgaacatcaccaggtctggaattgagtgccagctgtggaggagccgctacccccacaagccagagatcaacagcaccacccaccctggagctgacctgcaggagaacttctgcaggaacccagacagcagcaccaccggcccctggtgctacaccacagaccccaccgtgcggcggcaggagtgcagcatccctgtgtgtggccaggaccaggtgacagtggccatgacccccaggtctgagggcagctctgtgaacctgagcccccccctggagcagtgtgtgcctgaccggggccagcagtaccagggccgcctggccgtgaccacccacggcctgccctgcctggcctgggccagcgcccaggccaaggccctgagcaagcaccaggacttcaacagcgctgtgcagctggtggagaacttctgcagaaatccagatggagatgaggagggcgtgtggtgctacgtggccggcaagccaggggactttggctactgtgacctgaactactgtgaggaggccgtggaggaggagactggagatggcctggatgaagattctgaccgggccatcgagggccgcacagccaccagcgagtaccagaccttcttcaaccccaggacctttggaagtggagaggccgactgtggcctgcggcccctgtttgagaagaagagcctggaggacaagacagagcgggagctgctggagagctacattgatggccgcatcgtggagggcagtgatgctgagatcggcatgagcccctggcaggtgatgctgttcaggaagagcccccaggagctgctgtgtggggccagcctcatcagtgaccgctgggtgctgacagctgcccactgcctgctgtacccaccctgggacaagaacttcacagaaaatgacctgctggtgcgcatcggcaagcacagcaggaccaggtatgaaagaaacatcgagaagatctccatgctggagaagatctacatccaccccagcctgctgcaggccggctacaagggccgggtgacaggctggggcaacctgaaggagacctggacagccaacgtgggcaagggccagcccagcgtgctgcaggtggtgaacctgcccatcgtggagaggcctgtgtgcaaggacagcacccgcatccgcatcacagacaacatgttctgtgccggctacaagccagatgagggcaagagaggagatgcctgtgagggggacagcggcggcccctttgtgatgaagagccccttcaacaaccgctggtaccagatgggcatcgtgtcctggggcgagggctgtgacagagatggcaagtatggcttctacacccacgtgttccggctgaagaagtggatccagaaggtgattgaccagtttggagagtag

SEQ ID NO: 3040 - DNA, 888 bp, synthetic construct
  misc_feature 1..888: note = source = /note="Description of Artificial Sequence: Synthetic coding sequence"
  source 1..888: mol_type = other DNA
atggagaccccagcctggccccgggtgcccaggcctgagacagctgtggcccggaccctgctgctgggctgggtgtttgcccaggtggccggggccagcggcaccaccaacacagtggccgcctacaacctgacctggaagagcaccaacttcaagaccatcctggagtgggagcccaagcctgtgaaccaggtgtacacagtgcagatcagcaccaagagcggggactggaagagcaagtgcttctacaccacagacacagaatgtgacctgacagatgaaattgtgaaggatgtgaagcagacctacctggcccgggtcttctcctacccagctggaaatgtggagagcacaggcagcgctggggagcccctgtatgagaacagccctgagttcaccccctacctggagaccaacctgggccagcccaccatccagagctttgagcaggtgggcaccaaggtgaatgtgacagtggaggatgagaggaccctggtgagaagaaacaacaccttcctgagcctgagagatgtgtttgggaaggacctgatctacaccctgtactactggaagagcagcagcagcggcaagaagacagccaagaccaacaccaatgagttcctgattgatgtggacaagggggagaactactgcttctctgtgcaggccgtcatccccagcaggacagtgaacaggaagagcacagacagccctgtggagtgcatgggccaggagaagggggagttccgggagatcttctacatcatcggggctgtggtgtttgtggtgatcatcctggtgatcatcctggccatcagcctgcacaagtgcaggaaggccggcgtgggccagagctggaaggagaacagccccctgaatgtgtcctag

SEQ ID NO: 3041 - DNA, 717 bp, synthetic construct
  misc_feature 1..717: note = source = /note="Description of Artificial Sequence: Synthetic coding sequence"
  source 1..717: mol_type = other DNA
atggagaccccagcctggccccgggtgcccaggcctgagacagctgtggcccggaccctgctgctgggctgggtgtttgcccaggtggccggggccagcggcaccaccaacacagtggccgcctacaacctgacctggaagagcaccaacttcaagaccatcctggagtgggagcccaagcctgtgaaccaggtgtacacagtgcagatcagcaccaagagcggggactggaagagcaagtgcttctacaccacagacacagaatgtgacctgacagatgaaattgtgaaggatgtgaagcagacctacctggcccgggtcttctcctacccagctggaaatgtggagagcacaggcagcgctggggagcccctgtatgagaacagccctgagttcaccccctacctggagaccaacctgggccagcccaccatccagagctttgagcaggtgggcaccaaggtgaatgtgacagtggaggatgagaggaccctggtgagaagaaacaacaccttcctgagcctgagagatgtgtttgggaaggacctgatctacaccctgtactactggaagagcagcagcagcggcaagaagtacagcaccagcctggagctgtggtacctgtggagcagcagcctgagcagctcctggctgtacctgtacacctctgtggagcggcaggagtggggccgggccggccgccgcaccccccactag

SEQ ID NO: 3042 - DNA, 3807 bp, synthetic construct
  misc_feature 1..3807: note = source = /note="Description of Artificial Sequence: Synthetic coding sequence"
  source 1..3807: mol_type = other DNA
atgattgctgcccctgagatccccacagacttcaacctgctgcaggagagcgagacccacttcagcagtgacacagactttgaggacatcgagggcaagaaccagaagcagggcaagggcaagacctgcaagaagggcaagaagggccctgctgagaagggcaaaggaggaaatggaggcggcaagcccccatctggccccaacaggatgaatggccaccaccagcagaatggagtggagaacatgatgctgtttgaggtggtgaagatgggcaagagcgccatgcagagcgtggtggatgactggattgagagctacaagcatgaccgggacatcgccctgctggacctgatcaacttcttcatccagtgcagcggctgcaagggcgtggtgacagctgagatgttccgccacatgcagaacagcgagatcatcaggaagatgacagaggagtttgatgaggacagcggggactaccccctgaccatggccggcccccagtggaagaagttcaagagcagcttctgtgagttcatcggcgtgctggtgcggcagtgccagtacagcatcatctatgatgagtacatgatggacaccgtcatcagcctgctgaccggcctgagtgacagccaggtgcgggccttccgccacaccagcaccctggccgccatgaagctgatgacagccctggtgaatgtggccctgaacctgagcatcaacatggacaacacccagaggcagtatgaggccgagaggaacaagatgattggcaagagggccaatgaaaggctggagctgctgctgcagaagaggaaggagctgcaggagaaccaggatgaaattgagaacatgatgaatgccatcttcaagggcgtgtttgtgcaccgctacagagatgccatcgccgagatccgggccatctgcatcgaggagatcggcatctggatgaagatgtacagtgatgccttcctgaatgacagctacctgaagtatgtgggctggaccatgcatgacaagcagggcgaggtgcggctgaagtgcctgacagccctgcagggcctgtactacaacaaggagctgaacagcaagctggagctgttcaccagccgcttcaaggacagaattgtgtccatgaccctggacaaggagtatgatgtggccgtgcaggccatcaagctgctgaccctggtgctgcagagcagcgaggaggtgctgacagctgaggactgtgaaaatgtgtaccacctggtgtacagcgcccacaggcctgtggccgtggccgccggggagttcctgtacaagaagctgttcagcagaagagatcctgaggaggatggcatgatgaagaggcggggccggcagggccccaatgccaacctggtgaagaccctggtgttcttcttcctggagagcgagctgcacgagcacgccgcctacctggtggacagcatgtgggactgtgccacagagctgctgaaggactgggagtgcatgaacagcctgctgctggaggagcccctgagcggggaggaggccctgacagaccggcaggagagcgccctgattgagatcatgctgtgcaccatccggcaggccgctgagtgccacccccctgtgggccggggcaccgggaagagggtgctgacagccaaggagaagaagacccagctggatgacaggaccaagatcacagagctgtttgctgtggccctgccccagctgctggccaagtacagcgtggatgctgagaaggtgaccaacctgctgcagctgccccagtactttgacctggagatctacaccaccggccgcctggagaagcacctggatgccctgctgcggcagatcagaaatattgtggagaagcacacagacacagatgtgctggaggcctgcagcaagacctaccacgccctgtgcaatgaggagttcaccatcttcaacagagtggacatcagccgcagccagctgattgatgagctggccgacaagttcaaccggctgctggaggacttcctgcaggagggggaggagccagatgaagatgatgcctaccaggtgctgagcaccctgaagaggatcacagccttccacaatgcccatgacctgagcaagtgggacctgtttgcctgcaactacaagctgctgaagacaggaattgaaaatggagacatgcctgagcagatcgtcatccacgccctgcagtgcacccactacgtgatcctgtggcagctggccaagatcacagagagcagcagcaccaaggaggacctgctgcggctgaagaagcagatgagggtcttctgccagatctgccagcactacctgaccaacgtgaacaccaccgtgaaggagcaggccttcaccatcctgtgtgacatcctgatgatcttcagccaccagatcatgtctgggggccgggacatgctggagcccctggtgtacaccccagacagcagcctgcagagcgagctgctgtccttcatcctggaccacgtgttcatcgagcaggatgatgacaacaacagcgcagatggccagcaggaggatgaggccagcaagattgaggccctgcacaagagaagaaacctgctggccgccttctgcaagctgattgtgtacacagtggtggagatgaacacagctgctgacatcttcaagcagtacatgaagtactacaatgactatggagacatcatcaaggagaccatgagcaagacccggcagattgacaagatccagtgtgccaagaccctcatcctgagcctgcagcagctgttcaatgagatgatccaggagaatggctacaactttgacaggagcagcagcaccttcagcggcatcaaggagctggccaggagatttgccctgaccttcggcctggaccagctgaagacccgggaggccatcgccatgctgcacaaggatggcatcgagtttgccttcaaggagcccaacccccagggcgagagccacccccccctgaacctggccttcctggacatcctgtctgagttcagcagcaagctgctgcggcaggacaagaggacagtgtatgtgtacctggagaagttcatgaccttccagatgagcctgcggagagaagatgtgtggctgcccctgatgagctacagaaacagcctgctggccggaggagatgatgacaccatgtctgtcatcagcggcatcagcagccggggcagcacagtgcgcagcaagaagagcaagcccagcacaggcaagaggaaggtggtggagggcatgcagctgagcctgacagaggagagcagcagcagtgacagcatgtggctgagccgggagcagaccctgcacacccctgtgatgatgcagaccccccagctgaccagcaccatcatgagggagcccaagaggctgcggccagaagattccttcatgtctgtgtaccccatgcagacagagcaccaccagacccccctggactacaacacccaggtgacctggatgctggcccagaggcagcaggaggaggcccggcagcagcaggagcgggccgccatgtcctatgtgaagctgcggaccaacctgcagcacgccatccggcggggcaccagcctgatggaggatgatgaggagcccatcgtggaggatgtgatgatgagcagcgagggcagaattgaggacctgaatgaaggcatggactttgacaccatggacatcgacctgccccccagcaagaacagaagagagaggacagagctgaagccagacttctttgatcctgccagcatcatggatgaatctgtgctgggcgtgtccatgttttag

SEQ ID NO: 3043 - DNA, 1272 bp, synthetic construct
  misc_feature 1..1272: note = source = /note="Description of Artificial Sequence: Synthetic coding sequence"
  source 1..1272: mol_type = other DNA
atgcagagggtgaacatgatcatggccgagagccctggcctcatcaccatctgcctgctgggctacctgctgtctgcagaatgtactgtgttcctggaccatgaaaatgccaacaagatcctgaaccggcccaagcgctacaacagcggcaagctggaggagtttgtgcagggcaacctggagcgggagtgcatggaggagaagtgcagctttgaggaggcccgggaggtgtttgaaaatacagagaggaccacagagttctggaagcagtatgtggatgtgacctgcaacatcaagaatggccgctgtgagcagttctgcaagaacagcgctgacaacaaggtggtgtgcagctgcacagagggctaccgcctggccgagaaccagaagagctgtgagcctgctgtgcccttcccctgtggccgggtgtctgtgtcccagaccagcaagctgaccagggctgagaccgtcttcccagatgtggactatgtgaacagcacagaagctgagaccatcctggacaacatcacccagagcacccagagcttcaatgacttcaccagggtggtgggcggagaagatgccaagccaggccagttcccctggcaggtggtgctgaatggcaaggtggatgccttctgtggcggcagcatcgtgaatgagaagtggatcgtgacagctgcccactgtgtggagactggagtgaagatcaccgtggtggccggggagcacaacatcgaggagacagagcacacagagcagaagagaaatgtcatccgcatcatcccccaccacaactacaatgctgccatcaacaagtacaaccacgacatcgccctgctggagctggatgagcccctggtgctgaacagctatgtgacccccatctgcatcgctgacaaggagtacaccaacatcttcctgaagtttggcagcggctacgtgtctggctggggccgggtcttccacaagggccgcagcgccctggtgctgcagtacctgcgggtgcccctggtggaccgggccacctgcctgcggagcaccaagttcaccatctacaacaacatgttctgtgccggcttccacgagggcggccgggacagctgccagggcgacagcggcggcccccacgtgacagaggtggagggcaccagcttcctgaccggcatcatctcctggggcgaggagtgtgccatgaagggcaagtatggcatctacaccaaggtgagccgctacgtgaactggatcaaggagaagaccaagctgacctag

SEQ ID NO: 3044 - DNA, 6690 bp, synthetic construct
  misc_feature 1..6690: note = source = /note="Description of Artificial Sequence: Synthetic coding sequence"
  source 1..6690: mol_type = other DNA
atgtttcctggctgcccccggctgtgggtgctggtggtgctgggcacctcctgggtgggctggggcagccagggcacagaggccgcccagctgcggcagttctacgtggccgcccagggcatctcctggagctacagacctgagcccaccaacagcagcctgaacctgtctgtgaccagcttcaagaagatcgtgtaccgggagtatgagccctacttcaagaaggagaagccccagagcaccatcagcggcctgctgggccccaccctgtatgcagaggtgggggacatcatcaaggtgcacttcaagaacaaggctgacaagcccctgagcatccacccccagggcatccgctacagcaagctgtctgagggcgccagctacctggaccacaccttccctgctgagaagatggatgatgctgtggcccctggccgggagtacacctatgagtggagcatcagcgaggacagcggccccacccatgatgatcctccctgcctgacccacatctactacagccatgagaacctgattgaggacttcaacagcggcctgattggccccctgctgatctgcaagaagggcaccctgacagaaggaggcacccagaagacctttgacaagcagatcgtgctgctgtttgctgtgtttgatgagagcaagtcctggagccagagcagcagcctgatgtacacagtgaatggctacgtgaatggcaccatgccagacatcaccgtgtgtgcccatgaccacatctcctggcacctgctgggcatgagcagcggccctgagctgttcagcatccacttcaacggccaggtgctggagcagaaccaccacaaggtgtctgccatcaccctggtgtctgccaccagcaccacagccaacatgacagtgggccctgagggcaagtggatcatcagcagcctgacccccaagcacctgcaggccggcatgcaggcctacatcgacatcaagaactgccccaagaagaccaggaacctgaagaagatcacccgggagcagaggaggcacatgaagcgctgggagtacttcatcgctgctgaggaggtgatctgggactatgcccctgtgatcccagccaacatggacaagaagtaccgcagccagcacctggacaacttcagcaaccagatcggcaagcactacaagaaggtgatgtacacccagtatgaagatgagagcttcaccaagcacacagtgaaccccaacatgaaggaggatggcatcctgggccccatcatccgggcccaggtgcgggacaccctgaagatcgtgttcaagaacatggccagccggccctacagcatctacccccacggcgtgaccttcagcccctatgaagatgaggtgaacagcagcttcaccagcggcaggaacaacaccatgatccgggctgtgcagcctggagagacctacacctacaagtggaacatcctggagtttgatgagcccacagaaaatgatgcccagtgcctgacccggccctactacagtgatgtggacatcatgagggacatcgccagcggcctcatcggcctgctgctgatctgcaagagccgcagcctggaccggcagggcatccagagagctgctgacatcgagcagcaggccgtgtttgctgtgtttgatgagaacaagtcctggtacctggaggacaacatcaacaagttctgtgagaacccagatgaggtgaagagagatgaccccaagttctatgagagcaacatcatgagcaacttcaccctgagcgccatcaatggctacgtgcctgagagcatcaccaccctgggcttctgctttgatgacacagtgcagtggcacttctgcagcgtgggcacccagaatgagatcctgaccatccacttcaccggccacagcttcatctacggcaagagacatgaggacaccctgaccctcttccccatgagaggagagagcgtgacagtgaccatggacaacgtgggcacctggatgctgacctccatgaacagcagccccaggagcaagaagctgcggctgaagttcagagatgtgaagtgcatcccagatgatgatgaagattcctatgagatctttgagcccccagagagcacagtgatggccaccaggaagatgcatgaccggctggagccagaagatgaggagagtgatgctgactatgactaccagaaccggctggccgccgccctgggcatccgctccttcaggaacagcagcctgaaccaggaggaggaggagttcaacctgacagccctggccctggagaatggaacagaatttgtgagcagcaacacagacatcatcgtgggcagcaactacagcagccccagcaacatcagcaagttcaccgtgaacaacctggccgagccccagaaggcccccagccaccagcaggccaccacagctggcagccccctgcggcacctgattggcaagaacagcgtgctgaacagcagcacagctgagcacagcagcccctacagcgaggaccccatcgaggaccccctgcagccagatgtgacaggcatccggctgctgagcctgggcgctggggagttcaagagccaggagcacgccaagcacaagggccccaaggtggagcgggaccaggccgccaagcaccgcttctcctggatgaagctgctggcccacaaggtgggccgccacctgagccaggacaccggcagccccagcggcatgaggccctgggaggacctgcccagccaggacaccggcagccccagcaggatgaggccctggaaggacccccccagcgacctgctgctgctgaagcagagcaacagcagcaagatcctggtgggccgctggcacctggccagcgagaagggcagctatgagatcatccaggacacagatgaggacacagctgtgaacaactggctgatcagcccccagaatgccagccgggcctggggcgagagcacccccctggccaacaagccaggcaagcagagcggccaccccaagttcccccgggtgcgccacaagagcctgcaggtgcggcaggacggcggcaagagccggctgaagaagagccagttcctgatcaagaccaggaagaagaagaaggagaagcacacccaccacgcccccctgagccccaggaccttccaccccctgcggtctgaggcctacaacaccttcagcgagcggcggctgaagcacagcctggtgctgcacaagagcaatgagaccagcctgcccacagacctgaaccagaccctgcccagcatggactttggctggatcgccagcctgcctgaccacaaccagaacagcagcaatgacaccggccaggccagctgccccccaggcctgtaccagacagtgcccccagaggagcactaccagaccttccccatccaggaccctgaccagatgcacagcaccagtgaccccagccacaggagcagcagccctgagctgtctgagatgctggagtatgacaggagccacaagagcttccccacagacatcagccagatgagccccagcagcgagcacgaggtgtggcagaccgtcatcagcccagacctgagccaggtgaccctgagccctgagctgagccagaccaacctgagcccagacctgagccacaccaccctgagccctgagctgatccagaggaacctgagccctgccctgggccagatgcccatcagcccagacctgagccacaccaccctgagcccagacctgagccacaccaccctgagcctggacctgagccagaccaacctgagccctgagctgagccagaccaacctgagccctgccctgggccagatgcccctgagcccagacctgagccacaccaccctgagcctggacttcagccagaccaacctgagccctgagctgagccacatgaccctgagccctgagctgagccagaccaacctgagccctgccctgggccagatgcccatcagcccagacctgagccacaccaccctgagcctggacttcagccagaccaacctgagccctgagctgagccagaccaacctgagccctgccctgggccagatgcccctgagcccagaccccagccacaccaccctgagcctggacctgagccagaccaacctgagccctgagctgagccagaccaacctgagcccagacctgtctgagatgcccctgtttgctgacctgagccagatccccctgaccccagacctggaccagatgaccctgagcccagacctgggggagacagacctgagccccaactttggccagatgagcctgagcccagacctgagccaggtgaccctgagcccagacatcagtgacaccaccctgctgcctgacctgagccagatcagccccccaccagacctggaccagatcttctaccccagcgagagcagccagagcctgctgctgcaggagttcaatgaaagcttcccctacccagacctgggccagatgcccagccccagcagccccaccctgaatgacaccttcctgagcaaggagttcaaccccctggtgattgtgggcctgagcaaggatggaacagactacatcgagatcatccccaaggaggaggtgcagagcagtgaagatgattatgcagaaattgattatgtgccctatgatgacccctacaagacagatgtgaggaccaacatcaacagcagccgggaccctgacaacattgctgcctggtacctgcggagcaacaatggaaacagaagaaactactacatcgctgctgaggagatctcctgggactacagcgagtttgtgcagcgggagacagacattgaagattctgatgacatccctgaggacaccacctacaagaaggtggtgttcaggaagtacctggacagcaccttcaccaagagggaccccagaggagaatatgaggagcacctgggcatcctgggccccatcatccgggcagaggtggatgatgtgatccaggtgcgcttcaagaacctggccagccggccctacagcctgcacgcccacggcctgtcctatgagaagagcagcgagggcaagacctatgaagatgacagccctgagtggttcaaggaggacaatgctgtgcagcccaacagcagctacacctacgtgtggcacgccacagagaggagcggccctgagagccctggcagcgcctgccgggcctgggcctactacagcgctgtgaaccctgagaaggacatccacagcggcctcatcggccccctgctgatctgccagaagggcatcctgcacaaggacagcaacatgcccatggacatgagggagtttgtgctgctcttcatgacctttgatgagaagaagtcctggtactatgagaagaagagccgcagctcctggaggctgaccagcagcgagatgaagaagagccatgagttccacgccatcaatggcatgatctacagcctgcccggcctgaagatgtatgagcaggagtgggtgcggctgcacctgctgaacatcggcggcagccaggacatccacgtggtgcacttccacggccagaccctgctggagaatggaaacaagcagcaccagctgggcgtgtggcccctgctgcccggcagcttcaagaccctggagatgaaggccagcaagccaggctggtggctgctgaacacagaggtgggggagaaccagagagctggcatgcagacccccttcctgatcatggaccgggactgcaggatgcccatgggcctgagcacaggcatcatcagtgacagccagatcaaggccagcgagttcctgggctactgggagccccggctggcccggctgaacaacggcggcagctacaatgcctggagcgtggagaagctggccgctgagtttgccagcaagccctggatccaggtggacatgcagaaggaggtgatcatcaccggcatccagacccagggcgccaagcactacctgaagagctgctacaccacagagttctacgtggcctacagcagcaaccagatcaactggcagatcttcaagggcaacagcaccagaaatgtgatgtacttcaacggcaacagtgatgccagcaccatcaaggagaaccagtttgatcctcccatcgtggcccgctacatccgcatcagccccacccgggcctacaaccggcccaccctgcggctggagctgcagggctgtgaggtgaatggctgcagcacccccctgggcatggagaatggcaagattgagaacaagcagatcacagccagcagcttcaagaagtcctggtggggagactactgggagcccttccgggcccggctgaatgcccagggccgggtgaatgcctggcaggccaaggccaacaacaacaagcagtggctggagattgacctgctgaagatcaagaagatcacagccatcatcacccagggctgcaagagcctgagcagcgagatgtatgtgaagagctacaccatccactacagcgagcagggcgtggagtggaagccctaccgcctgaagagctccatggtggacaagatctttgagggcaacaccaacaccaagggccacgtgaagaacttcttcaacccccccatcatcagccgcttcatccgggtcatccccaagacctggaaccagagcatcgccctgcggctggagctgtttggctgtgacatctactag

SEQ ID NO: 3045 - DNA, 6675 bp, synthetic construct
  misc_feature 1..6675: note = source = /note="Description of Artificial Sequence: Synthetic coding sequence"
  source 1..6675: mol_type = other DNA
atgtttcctggctgcccccggctgtgggtgctggtggtgctgggcacctcctgggtgggctggggcagccagggcacagaggccgcccagctgcggcagttctacgtggccgcccagggcatctcctggagctacagacctgagcccaccaacagcagcctgaacctgtctgtgaccagcttcaagaagatcgtgtaccgggagtatgagccctacttcaagaaggagaagccccagagcaccatcagcggcctgctgggccccaccctgtatgcagaggtgggggacatcatcaaggtgcacttcaagaacaaggctgacaagcccctgagcatccacccccagggcatccgctacagcaagctgtctgagggcgccagctacctggaccacaccttccctgctgagaagatggatgatgctgtggcccctggccgggagtacacctatgagtggagcatcagcgaggacagcggccccacccatgatgatcctccctgcctgacccacatctactacagccatgagaacctgattgaggacttcaacagcggcctgattggccccctgctgatctgcaagaagggcaccctgacagaaggaggcacccagaagacctttgacaagcagatcgtgctgctgtttgctgtgtttgatgagagcaagtcctggagccagagcagcagcctgatgtacacagtgaatggctacgtgaatggcaccatgccagacatcaccgtgtgtgcccatgaccacatctcctggcacctgctgggcatgagcagcggccctgagctgttcagcatccacttcaacggccaggtgctggagcagaaccaccacaaggtgtctgccatcaccctggtgtctgccaccagcaccacagccaacatgacagtgggccctgagggcaagtggatcatcagcagcctgacccccaagcacctgcaggccggcatgcaggcctacatcgacatcaagaactgccccaagaagaccaggaacctgaagaagatcacccgggagcagaggaggcacatgaagcgctgggagtacttcatcgctgctgaggaggtgatctgggactatgcccctgtgatcccagccaacatggacaagaagtaccgcagccagcacctggacaacttcagcaaccagatcggcaagcactacaagaaggtgatgtacacccagtatgaagatgagagcttcaccaagcacacagtgaaccccaacatgaaggaggatggcatcctgggccccatcatccgggcccaggtgcgggacaccctgaagatcgtgttcaagaacatggccagccggccctacagcatctacccccacggcgtgaccttcagcccctatgaagatgaggtgaacagcagcttcaccagcggcaggaacaacaccatgatccgggctgtgcagcctggagagacctacacctacaagtggaacatcctggagtttgatgagcccacagaaaatgatgcccagtgcctgacccggccctactacagtgatgtggacatcatgagggacatcgccagcggcctcatcggcctgctgctgatctgcaagagccgcagcctggaccggcagggcatccagagagctgctgacatcgagcagcaggccgtgtttgctgtgtttgatgagaacaagtcctggtacctggaggacaacatcaacaagttctgtgagaacccagatgaggtgaagagagatgaccccaagttctatgagagcaacatcatgagcaccatcaatggctacgtgcctgagagcatcaccaccctgggcttctgctttgatgacacagtgcagtggcacttctgcagcgtgggcacccagaatgagatcctgaccatccacttcaccggccacagcttcatctacggcaagagacatgaggacaccctgaccctcttccccatgagaggagagagcgtgacagtgaccatggacaacgtgggcacctggatgctgacctccatgaacagcagccccaggagcaagaagctgcggctgaagttcagagatgtgaagtgcatcccagatgatgatgaggacagctatgagatctttgagcccccagagagcacagtgatggccaccaggaagatgcatgaccggctggagccagaagatgaggagagtgatgctgactatgactaccagaaccggctggccgccgccctgggcatccgctccttcaggaacagcagcctgaaccaggaggaggaggagttcaacctgacagccctggccctggagaatggaacagaatttgtgagcagcaacacagacatcatcgtgggcagcaactacagcagccccagcaacatcagcaagttcaccgtgaacaacctggccgagccccagaaggcccccagccaccagcaggccaccacagctggcagccccctgcggcacctgattggcaagaacagcgtgctgaacagcagcacagctgagcacagcagcccctacagcgaggaccccatcgaggaccccctgcagccagatgtgacaggcatccggctgctgagcctgggcgctggggagttcaagagccaggagcacgccaagcacaagggccccaaggtggagcgggaccaggccgccaagcaccgcttctcctggatgaagctgctggcccacaaggtgggccgccacctgagccaggacaccggcagccccagcggcatgaggccctgggaggacctgcccagccaggacaccggcagccccagcaggatgaggccctggaaggaccccccaagtgacctgctgctgctgaagcagagcaacagcagcaagatcctggtgggccgctggcacctggccagcgagaagggcagctatgagatcatccaggacacagatgaggacacagctgtgaacaactggctgatcagcccccagaatgccagccgggcctggggcgagagcacccccctggccaacaagccaggcaagcagagcggccaccccaagttcccccgggtgcgccacaagagcctgcaggtgcggcaggacggcggcaagagccggctgaagaagagccagttcctgatcaagaccaggaagaagaagaaggagaagcacacccaccacgcccccctgagccccaggaccttccaccccctgcggtctgaggcctacaacaccttcagcgagcggcggctgaagcacagcctggtgctgcacaagagcaatgagaccagcctgcccacagacctgaaccagaccctgcccagcatggactttggctggatcgccagcctgcctgaccacaaccagaacagcagcaatgacaccggccaggccagctgccccccaggcctgtaccagacagtgcccccagaggagcactaccagaccttccccatccaggaccctgaccagatgcacagcaccagtgaccccagccacaggagcagcagccctgagctgtctgagatgctggagtatgacaggagccacaagagcttccccacagacatcagccagatgagccccagcagcgagcacgaggtgtggcagaccgtcatcagcccagacctgagccaggtgaccctgagccctgagctgagccagaccaacctgagcccagacctgagccacaccaccctgagccctgagctgatccagaggaacctgagccctgccctgggccagatgcccatcagcccagacctgagccacaccaccctgagcccagacctgagccacaccaccctgagcctggacctgagccagaccaacctgagccctgagctgagccagaccaacctgagccctgccctgggccagatgcccctgagcccagacctgagccacaccaccctgagcctggacttcagccagaccaacctgagccctgagctgagccacatgaccctgagccctgagctgagccagaccaacctgagccctgccctgggccagatgcccatcagcccagacctgagccacaccaccctgagcctggacttcagccagaccaacctgagccctgagctgagccagaccaacctgagccctgccctgggccagatgcccctgagcccagaccccagccacaccaccctgagcctggacctgagccagaccaacctgagccctgagctgagccagaccaacctgagcccagacctgtctgagatgcccctgtttgctgacctgagccagatccccctgaccccagacctggaccagatgaccctgagcccagacctgggggagacagacctgagccccaactttggccagatgagcctgagcccagacctgagccaggtgaccctgagcccagacatcagtgacaccaccctgctgcctgacctgagccagatcagccccccaccagacctggaccagatcttctaccccagcgagagcagccagagcctgctgctgcaggagttcaatgaaagcttcccctacccagacctgggccagatgcccagccccagcagccccaccctgaatgacaccttcctgagcaaggagttcaaccccctggtgattgtgggcctgagcaaggatggaacagactacatcgagatcatccccaaggaggaggtgcagagcagtgaagatgattatgcagaaattgattatgtgccctatgatgacccctacaagacagatgtgaggaccaacatcaacagcagccgggaccctgacaacattgctgcctggtacctgcggagcaacaacggcaacagaagaaactactacatcgctgctgaggagatctcctgggactacagcgagtttgtgcagcgggagacagacatcgaggacagtgatgacatccctgaggacaccacctacaagaaggtggtgttcaggaagtacctggacagcaccttcaccaagagggaccccagaggagaatatgaggagcacctgggcatcctgggccccatcatccgggcagaggtggatgatgtgatccaggtgcgcttcaagaacctggccagccggccctacagcctgcacgcccacggcctgtcctatgagaagagcagcgagggcaagacctatgaagatgacagccctgagtggttcaaggaggacaatgctgtgcagcccaacagcagctacacctacgtgtggcacgccacagagaggagcggccctgagagccctggcagcgcctgccgggcctgggcctactacagcgctgtgaaccctgagaaggacatccacagcggcctgattggccccctgctgatctgccagaagggcatcctgcacaaggacagcaacatgcccatggacatgagggagtttgtgctgctcttcatgacctttgatgagaagaagtcctggtactatgagaagaagagccgcagctcctggaggctgaccagcagcgagatgaagaagagccatgagttccacgccatcaatggcatgatctacagcctgcccggcctgaagatgtatgagcaggagtgggtgcggctgcacctgctgaacattggaggcagccaggacatccacgtggtgcacttccacggccagaccctgctggagaatggaaacaagcagcaccagctgggcgtgtggcccctgctgcccggcagcttcaagaccctggagatgaaggccagcaagccaggctggtggctgctgaacacagaggtgggggagaaccagagagctggcatgcagacccccttcctgatcatggaccgggactgcaggatgcccatgggcctgagcacaggcatcatcagtgacagccagatcaaggccagcgagttcctgggctactgggagccccggctggcccggctgaacaatggaggcagctacaatgcctggagcgtggagaagctggccgctgagtttgccagcaagccctggatccaggtggacatgcagaaggaggtgatcatcaccggcatccagacccagggcgccaagcactacctgaagagctgctacaccacagagttctacgtggcctacagcagcaaccagatcaactggcagatcttcaagggcaacagcaccagaaatgtgatgtacttcaatggaaacagtgatgccagcaccatcaaggagaaccagtttgacccccccatcgtggcccgctacatccgcatcagccccacccgggcctacaaccggcccaccctgcggctggagctgcagggctgtgaggtgaatggctgcagcacccccctgggcatggagaatggcaagattgagaacaagcagatcacagccagcagcttcaagaagtcctggtggggagactactgggagcccttccgggcccggctgaatgcccagggccgggtgaatgcctggcaggccaaggccaacaacaacaagcagtggctggagattgacctgctgaagatcaagaagatcacagccatcatcacccagggctgcaagagcctgagcagcgagatgtatgtgaagagctacaccatccactacagcgagcagggcgtggagtggaagccctaccgcctgaagagctccatggtggacaagatctttgagggcaacaccaacaccaagggccacgtgaagaacttcttcaacccccccatcatcagccgcttcatccgggtcatccccaagacctggaaccagagcatcgccctgcggctggagctgtttggctgtgacatctactag

SEQ ID NO: 3046 - DNA, 999 bp, synthetic construct
  misc_feature 1..999: note = source = /note="Description of Artificial Sequence: Synthetic coding sequence"
  source 1..999: mol_type = other DNA
atggatgatgctgtggcccctggccgggagtacacctatgagtggagcatcagtgaagattctggccccacccatgatgaccccccctgcctgacccacatctactacagccatgagaacctgattgaggacttcaacagcggcctcatcggccccctgctgatctgcaagaagggcaccctgacagagggcggcacccagaagacctttgacaagcagatcgtgctgctgtttgctgtgtttgatgagagcaagtcctggagccagagcagcagcctgatgtacacagtgaatggctacgtgaatggcaccatgccagacatcaccgtgtgtgcccatgaccacatctcctggcacctgctgggcatgagcagcggccctgagctgttcagcatccacttcaacggccaggtgctggagcagaaccaccacaaggtgtctgccatcaccctggtgtctgccaccagcaccacagccaacatgacagtgggccctgagggcaagtggatcatcagcagcctgacccccaagcacctgcaggccggcatgcaggcctacatcgacatcaagaactgccccaagaagaccaggaacctgaagaagatcacccgggagcagaggaggcacatgaagcgctgggagtacttcatcgctgctgaggaggtgatctgggactatgcccctgtgatcccagccaacatggacaagaagtaccgcagccagcacctggacaacttcagcaaccagatcggcaagcactacaagaaggtgatgtacacccagtatgaagatgagagcttcaccaagcacacagtgaaccccaacatgaaggaggatggcatcctgggccccatcatccgggcccaggtgcgggacaccctgaagatcgtgttcaagaacatggccagccggccctacagcatctacccccatggagtgaccttcagcccctatgaagatgaggtgaacagcagcttcaccagcggcaccaccccctag

SEQ ID NO: 3047 - DNA, 1335 bp, synthetic construct
  misc_feature 1..1335: note = source = /note="Description of Artificial Sequence: Synthetic coding sequence"
  source 1..1335: mol_type = other DNA
atggtgtcccaggccctgcggctgctgtgcctgctgctgggcctgcagggctgcctggccgctgtgtttgtgacccaggaggaggcccacggcgtgctgcacagaagaagaagagccaatgccttcctggaggagctgcggcccggcagcctggagcgggagtgcaaggaggagcagtgcagctttgaggaggcccgggagatcttcaaggatgctgagaggaccaagctgttctggatctcctacagtgatggagaccagtgtgccagcagcccctgccagaatggaggcagctgcaaggaccagctgcagagctacatctgcttctgcctgcctgcctttgagggcaggaactgtgagacccacaaggatgaccagctgatctgtgtgaatgaaaatggaggctgtgagcagtactgcagcgaccacacaggcaccaagaggagctgccgctgccacgagggctacagcctgctggctgatggagtgtcctgcacccccaccgtggagtacccctgtgggaagatccccatcctggagaagagaaatgccagcaagccccagggcagaattgtgggcggcaaggtgtgccccaagggagaatgtccctggcaggtgctgctgctggtgaatggagcccagctgtgtggcggcaccctcatcaacaccatctgggtggtgtctgctgcccactgctttgacaagatcaagaactggaggaacctgattgctgtgctgggggagcatgacctgtctgaacatgatggagatgagcagagcagaagagtggcccaggtgatcatccccagcacctacgtgcccggcaccaccaaccacgacatcgccctgctgcggctgcaccagcctgtggtgctgacagaccacgtggtgcccctgtgcctgcctgagaggaccttcagcgagaggaccctggcctttgtgcgcttcagcctggtgtctggctggggccagctgctggacagaggagccacagccctggagctgatggtgctgaatgtgccccggctgatgacccaggactgcctgcagcagagcaggaaggtgggggacagccccaacatcacagagtacatgttctgtgccggctacagtgatggcagcaaggacagctgcaagggggacagcggcggcccccacgccacccactaccggggcacctggtacctgactggaattgtgtcctggggccagggctgtgccaccgtgggccactttggagtgtacaccagggtgtcccagtacatcgagtggctgcagaagctgatgaggtctgagcccaggcctggggtgctgctgcgggcccccttcccctag

SEQ ID NO: 3048 - DNA, 1401 bp, synthetic construct
  misc_feature 1..1401: note = source = /note="Description of Artificial Sequence: Synthetic coding sequence"
  source 1..1401: mol_type = other DNA
atggtgtcccaggccctgcggctgctgtgcctgctgctgggcctgcagggctgcctggccgccggcggcgtggccaaggccagcggcggggagacccgggacatgccctggaagccaggcccccaccgggtgtttgtgacccaggaggaggcccacggcgtgctgcacagaagaagaagagccaatgccttcctggaggagctgcggcccggcagcctggagcgggagtgcaaggaggagcagtgcagctttgaggaggcccgggagatcttcaaggatgctgagaggaccaagctgttctggatctcctacagtgatggagaccagtgtgccagcagcccctgccagaatggaggcagctgcaaggaccagctgcagagctacatctgcttctgcctgcctgcctttgagggcaggaactgtgagacccacaaggatgaccagctgatctgtgtgaatgaaaatggaggctgtgagcagtactgcagcgaccacacaggcaccaagaggagctgccgctgccacgagggctacagcctgctggctgatggagtgtcctgcacccccaccgtggagtacccctgtgggaagatccccatcctggagaagagaaatgccagcaagccccagggcagaattgtgggcggcaaggtgtgccccaagggagaatgtccctggcaggtgctgctgctggtgaatggagcccagctgtgtggcggcaccctcatcaacaccatctgggtggtgtctgctgcccactgctttgacaagatcaagaactggaggaacctgattgctgtgctgggggagcatgacctgtctgaacatgatggagatgagcagagcagaagagtggcccaggtgatcatccccagcacctacgtgcccggcaccaccaaccacgacatcgccctgctgcggctgcaccagcctgtggtgctgacagaccacgtggtgcccctgtgcctgcctgagaggaccttcagcgagaggaccctggcctttgtgcgcttcagcctggtgtctggctggggccagctgctggacagaggagccacagccctggagctgatggtgctgaatgtgccccggctgatgacccaggactgcctgcagcagagcaggaaggtgggggacagccccaacatcacagagtacatgttctgtgccggctacagtgatggcagcaaggacagctgcaagggggacagcggcggcccccacgccacccactaccggggcacctggtacctgactggaattgtgtcctggggccagggctgtgccaccgtgggccactttggagtgtacaccagggtgtcccagtacatcgagtggctgcagaagctgatgaggtctgagcccaggcctggggtgctgctgcgggcccccttcccctag

SEQ ID NO: 3049 - DNA, 1194 bp, synthetic construct
  misc_feature 1..1194: note = source = /note="Description of Artificial Sequence: Synthetic coding sequence"
  source 1..1194: mol_type = other DNA
atgggaaatgtgaaccggcagggccagcactgccgggacttcatcatggtgtcccaggccctgcggctgctgtgcctgctgctgggcctgcagggctgcctggccgcagatggagaccagtgtgccagcagcccctgccagaatggaggcagctgcaaggaccagctgcagagctacatctgcttctgcctgcctgcctttgagggcaggaactgtgagacccacaaggatgaccagctgatctgtgtgaatgaaaatggaggctgtgagcagtactgcagcgaccacacaggcaccaagaggagctgccgctgccacgagggctacagcctgctggctgatggagtgtcctgcacccccaccgtggagtacccctgtgggaagatccccatcctggagaagagaaatgccagcaagccccagggccgcatcgtgggcggcaaggtgtgccccaagggggagtgcccctggcaggtgctgctgctggtgaatggagcccagctgtgtggcggcaccctcatcaacaccatctgggtggtgtctgctgcccactgctttgacaagatcaagaactggaggaacctgattgctgtgctgggggagcatgacctgtctgaacatgatggagatgagcagagccggcgggtggcccaggtgatcatccccagcacctacgtgcccggcaccaccaaccacgacatcgccctgctgcggctgcaccagcctgtggtgctgacagaccacgtggtgcccctgtgcctgcctgagaggaccttcagcgagaggaccctggcctttgtgcgcttcagcctggtgtctggctggggccagctgctggacagaggagccacagccctggagctgatggtgctgaatgtgccccggctgatgacccaggactgcctgcagcagagcaggaaggtgggggacagccccaacatcacagagtacatgttctgtgccggctacagtgatggcagcaaggacagctgcaagggggacagcggcggcccccacgccacccactaccggggcacctggtacctgaccggcatcgtgtcctggggccagggctgtgccaccgtgggccactttggagtgtacaccagggtgtcccagtacatcgagtggctgcagaagctgatgaggtctgagcccaggcctggggtgctgctgcgggcccccttcccctag

SEQ ID NO: 3050 - DNA, 651 bp, synthetic construct
  misc_feature 1..651: note = source = /note="Description of Artificial Sequence: Synthetic coding sequence"
  source 1..651: mol_type = other DNA
atgaggatccaggaccccgggaaggtgttctttggaaatgtggacagcagcggcatcaagcacaacatcttcaacccccccatcatcgcccgctacatccggctgcaccccacccactacagcatccgcagcaccctgaggatggagctgatgggctgtgacctgaacagctgcagcatgcccctgggcatggagagcaaggccatcagtgatgcccagatcacagccagcagctacttcaccaacatgtttgccacctggagccccagcaaggcccggctgcacctgcagggccgcagcaatgcctggaggccccaggtgaacaaccccaaggagtggctgcaggtggacttccagaagaccatgaaggtgactggagtgaccacccagggcgtgaagagcctgctgacctccatgtatgtgaaggagttcctgatcagcagcagccaggacggccaccagtggaccctcttcttccagaatggcaaggtgaaggtgttccagggcaaccaggacagcttcacccctgtggtgaacagcctggacccccccctgctgacccgctacctgcgcatccacccccagagctgggtgcaccagatcgccctgaggatggaggtgctgggctgtgaggcccaggacctgtactag

SEQ ID NO: 3051 - DNA, 7056 bp, synthetic construct
  misc_feature 1..7056: note = source = /note="Description of Artificial Sequence: Synthetic coding sequence"
  source 1..7056: mol_type = other DNA
atgcagatcgagctgagcacctgcttcttcctgtgcctgctgcgcttctgcttcagcgccacccggcgctactacctgggcgctgtggagctgtcctgggactacatgcagagcgacctgggggagctgcctgtggatgcccgcttccccccccgggtgcccaagagcttccccttcaacacctctgtggtgtacaagaagaccctgtttgtggagttcacagaccacctgttcaacatcgccaagcccaggcctccctggatgggcctgctgggccccaccatccaggccgaggtgtatgacacagtggtgatcaccctgaagaacatggccagccaccctgtgtccctgcatgctgtgggcgtgtcctactggaaggccagcgagggcgcagaatatgatgaccagaccagccagcgggagaaggaggatgacaaggtgtttcctgggggcagccacacctacgtgtggcaggtgctgaaggaaaatggccccatggccagtgaccccctgtgcctgacctacagctacctgagccacgtggacctggtgaaggacctgaacagcggcctcatcggggccctgctggtgtgccgggagggcagcctggccaaggagaagacccagaccctgcacaagttcatcctgctgtttgctgtgtttgatgagggcaagtcctggcacagcgagaccaagaacagcctgatgcaggacagagatgctgccagcgcccgggcctggcccaagatgcacacagtgaatggctacgtgaacagaagcctgcccggcctgattggctgccacaggaagtctgtgtactggcacgtgattggcatgggcaccaccccagaggtgcacagcatcttcctggagggccacaccttcctggtgaggaaccaccggcaggccagcctggagatcagccccatcaccttcctgacagcccagaccctgctgatggacctgggccagttcctgctcttctgccacatcagcagccaccagcatgatggcatggaggcctacgtgaaggtggacagctgcccagaggagccccagctgaggatgaagaacaatgaggaggctgaagattatgatgatgacctgacagacagcgagatggatgtggtgcgctttgatgatgacaacagccccagcttcatccagatccgctctgtggccaagaagcaccccaagacctgggtgcactacatcgctgctgaggaggaggactgggactatgcccccctggtgctggccccagatgacaggagctacaagagccagtacctgaacaacggcccccagagaattggaaggaagtacaagaaggtgcgcttcatggcctacacagatgagaccttcaagacccgggaggccatccagcatgaaagtggcatcctgggccccctgctgtatggagaggtgggggacaccctgctgatcatcttcaagaaccaggccagccggccctacaacatctacccccacggcatcacagatgtgcggcccctgtacagccggcggctgcccaagggcgtgaagcacctgaaggacttccccatcctgcccggggagatcttcaagtacaagtggacagtgacagtggaggatggccccaccaagagtgacccccgctgcctgacccgctactacagcagctttgtgaacatggagcgggacctggccagcggcctgattggccccctgctgatctgctacaaggagagcgtggaccagaggggcaaccagatcatgtctgacaagagaaatgtcatcctcttctctgtgtttgatgagaacagatcctggtacctgacagagaacatccagcgcttcctgcccaacccagctggggtgcagctggaggaccctgagttccaggccagcaacatcatgcacagcatcaatggctacgtgtttgacagcctgcagctgtctgtgtgcctgcacgaggtggcctactggtacatcctgagcattggagcccagacagacttcctgtctgtgttcttcagcggctacaccttcaagcacaagatggtgtatgaggacaccctgaccctcttccccttctctggagagaccgtcttcatgtccatggagaaccctggcctgtggatcctgggctgccacaacagcgacttcaggaacagaggcatgacagccctgctgaaggtgagcagctgtgacaagaacacaggagactactatgaagattcctatgaggacatcagcgcctacctgctgagcaagaacaatgccatcgagcccaggagcttcagccagaacagccgccaccccagcacccggcagaagcagttcaatgccaccaccatcccagaaaatgacatcgagaagacagacccctggtttgcccacaggacccccatgcccaagatccagaatgtgagcagcagtgacctgctgatgctgctgcggcagagccccaccccccacggcctgagcctgagtgacctgcaggaggccaagtatgagaccttcagtgatgaccccagccctggggccatcgacagcaacaacagcctgtctgagatgacccacttccggccccagctgcaccacagcggggacatggtgttcaccccagagagcggcctgcagctgcggctgaatgagaagctgggcaccacagctgccacagagctgaagaagctggacttcaaggtgagcagcaccagcaacaacctgatcagcaccatccccagcgacaacctggccgccggcacagacaacaccagcagcctgggccccccatccatgcctgtgcactatgacagccagctggacaccaccctgtttgggaagaagagcagccccctgacagaaagtggcggccccctgagcctgtctgaggagaacaatgacagcaagctgctggagagcggcctgatgaacagccaggagagctcctggggcaagaatgtgagcagcacagagagcggccgcctcttcaagggcaagagggcccacggccctgccctgctgaccaaggacaatgccctcttcaaggtgtccatcagcctgctgaagaccaacaagaccagcaacaacagcgccaccaacaggaagacccacattgatggccccagcctgctgattgagaacagccccagcgtgtggcagaacatcctggagagtgacacagagttcaagaaggtgacccccctcatccatgacaggatgctgatggacaagaatgccacagccctgcggctgaaccacatgagcaacaagaccaccagcagcaagaacatggagatggtgcagcagaagaaggagggccccatccccccagatgcccagaacccagacatgtccttcttcaagatgctgttcctgcctgagagcgcccgctggatccagaggacccacggcaagaacagcctgaacagcggccagggccccagccccaagcagctggtgtccctgggccctgagaagtctgtggagggccagaacttcctgtctgagaagaacaaggtggtggtgggcaaaggagagttcaccaaggatgtgggcctgaaggagatggtgttccccagcagcaggaacctcttcctgaccaacctggacaacctgcacgagaacaacacccacaaccaggagaagaagatccaggaggagattgagaagaaggagaccctcatccaggagaatgtggtgctgccccagatccacacagtgacaggcaccaagaacttcatgaagaacctcttcctgctgagcacccggcagaatgtggagggcagctatgatggagcctatgcccctgtgctgcaggacttccgcagcctgaatgacagcaccaacagaaccaagaagcacacagcccacttcagcaagaagggggaggaggagaacctggagggcctgggcaaccagaccaagcagatcgtggagaagtatgcctgcaccacccgcatcagccccaacaccagccagcagaactttgtgacccagaggagcaagagggccctgaagcagttccggctgcccctggaggagacagagctggagaagaggatcatcgtggatgacaccagcacccagtggagcaagaacatgaagcacctgacccccagcaccctgacccagattgactacaatgagaaggagaagggggccatcacccagagccccctgagtgactgcctgaccaggagccacagcatcccccaggccaacagaagccccctgcccatcgccaaggtgagcagcttccccagcatccggcccatctacctgaccagggtgctcttccaggacaacagcagccacctgcctgctgccagctacaggaagaaggacagcggcgtgcaggagagcagccacttcctgcagggcgccaagaagaacaacctgagcctggccatcctgaccctggagatgaccggggaccagcgggaggtgggcagcctgggcaccagcgccaccaacagcgtgacctacaagaaggtggagaacacagtgctgcccaagccagacctgcccaagaccagcggcaaggtggagctgctgcccaaggtgcacatctaccagaaggacctcttccccacagagaccagcaatggcagccctggccacctggacctggtggagggcagcctgctgcagggcacagagggcgccatcaagtggaatgaggccaacagacctgggaaggtgcccttcctgcgggtggccacagagagcagcgccaagacccccagcaagctgctggaccccctggcctgggacaaccactacggcacccagatccccaaggaggagtggaagagccaggagaagagccctgagaagacagccttcaagaagaaggacaccatcctgagcctgaatgcctgtgagagcaaccacgccatcgccgccatcaatgaaggccagaacaagccagaaattgaggtgacctgggccaagcagggccgcacagagcggctgtgcagccagaacccccctgtgctgaagaggcaccagcgggagatcaccaggaccaccctgcagagcgaccaggaggagattgattatgatgacaccatctctgtggagatgaagaaggaggactttgacatctatgatgaagatgagaaccagagccccaggagcttccagaagaagaccaggcactacttcatcgctgctgtggagcggctgtgggactatggcatgagcagcagcccccacgtgctgaggaacagagcccagagcggctctgtgccccagttcaagaaggtggtgttccaggagttcacagatggcagcttcacccagcccctgtacagaggagagctgaatgagcacctgggcctgctgggcccctacatccgggcagaggtggaggacaacatcatggtgaccttcaggaaccaggccagccggccctacagcttctacagcagcctcatctcctatgaggaggaccagaggcagggcgctgagcccaggaagaactttgtgaagcccaatgagaccaagacctacttctggaaggtgcagcaccacatggcccccaccaaggatgaatttgactgcaaggcctgggcctacttcagtgatgtggacctggagaaggatgtgcacagcggcctgattggccccctgctggtgtgccacaccaacaccctgaacccagcccacggccggcaggtgacagtgcaggagtttgccctcttcttcaccatctttgatgagaccaagtcctggtacttcacagagaacatggagaggaactgccgggccccctgcaacatccagatggaggaccccaccttcaaggagaactaccgcttccacgccatcaatggctacatcatggacaccctgcccggcctggtgatggcccaggaccagaggatccgctggtacctgctgtccatgggcagcaatgaaaacatccacagcatccacttcagcggccacgtgttcaccgtgaggaagaaggaggagtacaagatggccctgtacaacctgtacccaggagtgtttgagaccgtggagatgctgcccagcaaggccggcatctggagggtggagtgcctgattggagagcacctgcatgctggcatgagcaccctcttcctggtgtacagcaacaagtgccagacccccctgggcatggccagcggccacatccgggacttccagatcacagccagcggccagtatggccagtgggcccccaagctggcccggctgcactacagcggcagcatcaatgcctggagcaccaaggagcccttctcctggatcaaggtggacctgctggcccccatgatcatccacggcatcaagacccagggcgcccggcagaagttcagcagcctgtacatcagccagttcatcatcatgtacagcctggatggcaagaagtggcagacctaccggggcaacagcacaggcaccctgatggtgttctttggaaatgtggacagcagcggcatcaagcacaacatcttcaacccccccatcatcgcccgctacatccggctgcaccccacccactacagcatccgcagcaccctgaggatggagctgatgggctgtgacctgaacagctgcagcatgcccctgggcatggagagcaaggccatcagtgatgcccagatcacagccagcagctacttcaccaacatgtttgccacctggagccccagcaaggcccggctgcacctgcagggccgcagcaatgcctggaggccccaggtgaacaaccccaaggagtggctgcaggtggacttccagaagaccatgaaggtgactggagtgaccacccagggcgtgaagagcctgctgacctccatgtatgtgaaggagttcctgatcagcagcagccaggacggccaccagtggaccctcttcttccagaatggcaaggtgaaggtgttccagggcaaccaggacagcttcacccctgtggtgaacagcctggacccccccctgctgacccgctacctgcgcatccacccccagagctgggtgcaccagatcgccctgaggatggaggtgctgggctgtgaggcccaggacctgtactag

SEQ ID NO: 3052 - DNA, 999 bp, synthetic construct
  misc_feature 1..999: note = source = /note="Description of Artificial Sequence: Synthetic coding sequence"
  source 1..999: mol_type = other DNA
atgggccggcccctgcacctggtgctgctgagcgccagcctggccggcctgctgctgctgggggagagcctcttcatcagaagagagcaggccaacaacatcctggcccgggtgacccgggccaacagcttcctggaggagatgaagaagggccacctggagcgggagtgcatggaggagacctgcagctatgaggaggcccgggaggtgtttgaggacagcgacaagaccaatgagttctggaacaagtacaaggatggagaccagtgtgagaccagcccctgccagaaccagggcaagtgcaaggatggcctgggggagtacacctgcacctgcctggagggctttgagggcaagaactgtgagctgttcaccaggaagctgtgcagcctggacaatggagactgtgaccagttctgccacgaggagcagaacagcgtggtgtgcagctgtgcccggggctacaccctggccgacaacgggaaggcctgcatccccaccggcccctacccctgtgggaagcagaccctggagaggaggaagaggtctgtggcccaggccaccagcagcagtggagaggccccagacagcatcacctggaagccctatgatgctgctgacctggaccccacagagaacccctttgacctgctggacttcaaccagacccagcctgagcggggggacaacaacctgaccagaattgtgggcggccaggagtgcaaggatggagaatgtccctggcaggccctgctgatcaatgaggagaatgaaggcttctgtggcggcaccatcctgtctgagttctacatcctgacagctgcccactgcctgtaccaggccaagcgcttcaagggcaccggcaccaggagcagaagaagagctgtgcggcgctgcacccgctggcgctggagcagcagcaccaccggcagccagaggcggcccatgaccagcaccagcccctgcagcggcagcaggcctcccagccccagcgcctag

SEQ ID NO: 3053 - DNA, 1467 bp, synthetic construct
  misc_feature 1..1467: note = source = /note="Description of Artificial Sequence: Synthetic coding sequence"
  source 1..1467: mol_type = other DNA
atgggccggcccctgcacctggtgctgctgagcgccagcctggccggcctgctgctgctgggggagagcctcttcatcagaagagagcaggccaacaacatcctggcccgggtgacccgggccaacagcttcctggaggagatgaagaagggccacctggagcgggagtgcatggaggagacctgcagctatgaggaggcccgggaggtgtttgaggacagcgacaagaccaatgagttctggaacaagtacaaggatggagaccagtgtgagaccagcccctgccagaaccagggcaagtgcaaggatggcctgggggagtacacctgcacctgcctggagggctttgagggcaagaactgtgagctgttcaccaggaagctgtgcagcctggacaatggagactgtgaccagttctgccacgaggagcagaacagcgtggtgtgcagctgtgcccggggctacaccctggccgacaacgggaaggcctgcatccccaccggcccctacccctgtgggaagcagaccctggagaggaggaagaggtctgtggcccaggccaccagcagcagtggagaggccccagacagcatcacctggaagccctatgatgctgctgacctggaccccacagagaacccctttgacctgctggacttcaaccagacccagcctgagcggggggacaacaacctgaccagaattgtgggcggccaggagtgcaaggatggagaatgtccctggcaggccctgctgatcaatgaggagaatgaaggcttctgtggcggcaccatcctgtctgagttctacatcctgacagctgcccactgcctgtaccaggccaagcgcttcaaggtgcgggtgggggacaggaacacagagcaggaggagggcggggaggccgtgcatgaggtggaggtggtgatcaagcacaaccgcttcaccaaggagacctatgactttgatattgctgtgctgcggctgaagacccccatcaccttcaggatgaatgtggccccagcctgcctgcctgagcgggactgggccgagagcaccctgatgacccagaagacaggcatcgtgtctggcttcggccgcacccatgagaagggccggcagagcacccggctgaagatgctggaggtgccctacgtggacaggaacagctgcaagctgagcagcagcttcatcatcacccagaacatgttctgtgccggctatgacaccaagcaggaggatgcctgccagggcgacagcggcggcccccacgtgacccgcttcaaggacacctactttgtgacaggcatcgtgtcctggggcgagggctgtgccaggaagggcaagtatggcatctacaccaaggtgacagccttcctgaagtggattgaccgctccatgaagacccggggcctgcccaaggccaagagccacgcccctgaggtgatcaccagcagccccctgaagtag

SEQ ID NO: 3054 - DNA, 1005 bp, synthetic construct
  misc_feature 1..1005: note = source = /note="Description of Artificial Sequence: Synthetic coding sequence"
  source 1..1005: mol_type = other DNA
atgggccggcccctgcacctggtgctgctgagcgccagcctggccggcctgctgctgctgggggagagcctcttcatcagaagagagcaggccaacaacatcctggcccgggtgacccgggccaacagcttcctggaggagatgaagaagggccacctggagcgggagtgcatggaggagacctgcagctatgaggaggcccgggaggtgtttgaggacagcgacaagaccaatgagttctggaacaagtacaaggatggagaccagtgtgagaccagcccctgccagaaccagggcaagtgcaaggatggcctgggggagtacacctgcacctgcctggagggctttgagggcaagaactgtgagctgttcaccaggaagctgtgcagcctggacaatggagactgtgaccagttctgccacgaggagcagaacagcgtggtgtgcagctgtgcccggggctacaccctggccgacaacgggaaggcctgcatccccaccggcccctacccctgtgggaagcagaccctggagaggaggaagaggtctgtggcccaggccaccagcagcagtggagaggccccagacagcatcacctggaagccctatgatgctgctgacctggaccccacagagaacccctttgacctgctggacttcaaccagacccagcctgagcggggggacaacaacctgaccagaattgtgggcggccaggagtgcaaggatggagaatgtccctggcaggccctgctgatcaatgaggagaatgaaggcttctgtggcggcaccatcctgtctgagttctacatcctgacagctgcccactgcctgtaccaggccaagcgcttcaaggtgcggggcaccggcaccaggagcagaagaagagctgtgcggcgctgcacccgctggcgctggagcagcagcaccaccggcagccagaggcggcccatgaccagcaccagcccctgcagcggcagcaggcctcccagccccagcgcctag

SEQ ID NO: 3055 - DNA, 1722 bp, synthetic construct
  misc_feature 1..1722: note = source = /note="Description of Artificial Sequence: Synthetic coding sequence"
  source 1..1722: mol_type = other DNA
atgatcttcctgtaccaggtggtgcacttcatcctcttcacctctgtgtctggagaatgtgtgacccagctgctgaaggacacctgctttgagggcggggacatcaccaccgtcttcacccccagcgccaagtactgccaggtggtgtgcacctaccacccccgctgcctgctcttcaccttcaccgctgagagccccagcgaggaccccacccgctggttcacctgtgtgctgaaggacagcgtgacagagaccctgccccgggtgaacagaacagctgccatcagcggctacagcttcaagcagtgcagccaccagatctctgtgaacaacatctgcctgctgaagcacacccagacaggcacccccacccgcatcaccaagctggacaaggtggtgtctggcttcagcctgaagagctgtgccctgagcaacctggcctgcatccgggacatcttccccaacacagtgtttgctgacagcaacattgattctgtgatggccccagatgcctttgtgtgtggccgcatctgcacccaccaccctggctgcctcttcttcaccttcttcagccaggagtggcccaaggagagccagaggaacctgtgcctgctgaagaccagcgagagcggcctgcccagcacccgcatcaagaagagcaaggccctgagcggcttcagcctgcagagctgccgccacagcatccctgtgttctgccacagcagcttctaccatgacacagacttcctgggggaggagctggacatcgtggccgccaagagccatgaggcctgccagaagctgtgcaccaatgctgtgcgctgccagttcttcacctacaccccagcccaggccagctgcaatgaaggcaagggcaagtgctacctgaagctgagcagcaatggcagccccaccaagatcctgcacggccggggcggcatcagcggctacaccctgcggctgtgcaagatggacaatgaatgtaccaccaagatcaagccccgcatcgtgggcggcacagcctctgtgcggggggagtggccctggcaggtgaccctgcacaccaccagccccacccagaggcacctgtgtggcggcagcatcatcggcaaccagtggatcctgacagctgcccactgcttctacggcgtggagagccccaagatcctgcgggtgtacagcggcatcctgaaccagagcgagatcaaggaggacaccagcttctttggagtgcaggagatcatcatccatgaccagtacaagatggccgagagcggctatgacatcgccctgctgaagctggagaccaccgtgaactacacagacagccagaggcccatctgcctgcccagcaagggggacagaaatgtcatctacacagactgctgggtgacaggctggggctacaggaagctgcgggacaagatccagaacaccctgcagaaggccaagatccccctggtgaccaatgaggagtgccagaagcgctaccggggccacaagatcacccacaagatgatctgtgccggctaccgggagggcggcaaggatgcctgcaagggggacagcggcggccccctgagctgcaagcacaatgaggtgtggcacctggtgggcatcacctcctggggcgagggctgtgcccagcgggagaggcctggggtgtacaccaacgtggtggagtatgtggactggatcctggagaagacccaggccgtgtag

SEQ ID NO: 3056 - DNA, 1878 bp, synthetic construct
  misc_feature 1..1878: note = source = /note="Description of Artificial Sequence: Synthetic coding sequence"
  source 1..1878: mol_type = other DNA
atgatcttcctgtaccaggtggtgcacttcatcctcttcacctctgtgtctggagaatgtgtgacccagctgctgaaggacacctgctttgagggcggggacatcaccaccgtcttcacccccagcgccaagtactgccaggtggtgtgcacctaccacccccgctgcctgctcttcaccttcaccgctgagagccccagcgaggaccccacccgctggttcacctgtgtgctgaaggacagcgtgacagagaccctgccccgggtgaacagaacagctgccatcagcggctacagcttcaagcagtgcagccaccagatcagcgcctgcaacaaggacatctacgtggacctggacatgaagggcatcaactacaacagctctgtggccaagagcgcccaggagtgccaggagcgctgcacagatgatgtgcactgccacttcttcacctacgccacccggcagttccccagcctggagcacaggaacatctgcctgctgaagcacacccagacaggcacccccacccgcatcaccaagctggacaaggtggtgtctggcttcagcctgaagagctgtgccctgagcaacctggcctgcatccgggacatcttccccaacacagtgtttgctgacagcaacattgattctgtgatggccccagatgcctttgtgtgtggccgcatctgcacccaccaccctggctgcctcttcttcaccttcttcagccaggagtggcccaaggagagccagaggaacctgtgcctgctgaagaccagcgagagcggcctgcccagcacccgcatcaagaagagcaaggccctgagcggcttcagcctgcagagctgccgccacagcatccctgtgttctgccacagcagcttctaccatgacacagacttcctgggggaggagctggacatcgtggccgccaagagccatgaggcctgccagaagctgtgcaccaatgctgtgcgctgccagttcttcacctacaccccagcccaggccagctgcaatgaaggcaagggcaagtgctacctgaagctgagcagcaatggcagccccaccaagatcctgcacggccggggcggcatcagcggctacaccctgcggctgtgcaagatggacaatgaatgtaccaccaagatcaagccccgcatcgtgggcggcacagcctctgtgcggggggagtggccctggcaggtgaccctgcacaccaccagccccacccagaggcacctgtgtggcggcagcatcatcggcaaccagtggatcctgacagctgcccactgcttctacggcgtggagagccccaagatcctgcgggtgtacagcggcatcctgaaccagagcgagatcaaggaggacaccagcttctttggagtgcaggagatcatcatccatgaccagtacaagatggccgagagcggctatgacatcgccctgctgaagctggagaccaccgtgaactacacagacagccagaggcccatctgcctgcccagcaagggggacagaaatgtcatctacacagactgctgggtgacaggctggggctacaggaagctgcgggacaagatccagaacaccctgcagaaggccaagatccccctggtgaccaatgaggagtgccagaagcgctaccggggccacaagatcacccacaagatgatctgtgccggctaccgggagggcggcaaggatgcctgcaagggggacagcggcggccccctgagctgcaagcacaatgaggtgtggcacctggtgggcatcacctcctggggcgagggctgtgcccagcgggagaggcctggggtgtacaccaacgtggtggagtatgtggactggatcctggagaagacccaggccgtgtag

SEQ ID NO: 3057 - DNA, 633 bp, synthetic construct
  misc_feature 1..633: note = source = /note="Description of Artificial Sequence: Synthetic coding sequence"
  source 1..633: mol_type = other DNA
tgaagcggcttcagcctgaagagctgtgccctgagcaacctggcctgcatccgggacatcttccccaacacagtgtttgctgacagcaacattgattctgtgatggccccagatgcctttgtgtgtggccgcatctgcacccaccaccctggctgcctcttcttcaccttcttcagccaggagtggcccaaggagagccagaggaacctgtgcctgctgaagaccagcgagagcggcctgcccagcacccgcatcaagaagagcaaggccctgagcggcttcagcctgcagagctgccgccacagcatccctgtgttctgccacagcagcttctaccatgacacagacttcctgggggaggagctggacatcgtggccgccaagagccatgaggcctgccagaagctgtgcaccaatgctgtgcgctgccagttcttcacctacaccccagcccaggccagctgcaatgaaggcaagggcaagtgctacctgaagctgagcagcaatggcagccccaccaagatcctgcacggccggggcggcatcagcggctacaccctgcggctgtgcaagatggacaatgagctgcggggggcccccatgaagatcagcggctggctgaagaccagctag

SEQ ID NO: 3058 - DNA, 2199 bp, synthetic construct
  misc_feature 1..2199: note = source = /note="Description of Artificial Sequence: Synthetic coding sequence"
  source 1..2199: mol_type = other DNA
atgtctgagaccagcaggacagcctttggaggccggcgggctgtgccccccaacaacagcaatgctgctgaagatgacctgcccaccgtggagctgcagggcgtggtgccccggggcgtgaacctgcaggagttcctgaatgtgacctctgtgcacctgttcaaggagcgctgggacaccaacaaggtggaccaccacacagacaagtatgagaacaacaagctgattgtgcggcggggccagagcttctacgtgcagattgacttcagccggccctatgacccccggcgggacctcttccgggtggagtatgtgattggccgctacccccaggagaacaagggcacctacatccctgtgcccatcgtgtctgagctgcagagcggcaagtggggcgccaagatcgtgatgagagaagatagatctgtgcggctgagcatccagagcagccccaagtgcatcgtgggcaagttcaggatgtatgtggccgtgtggaccccctacggcgtgctgcggaccagcagaaatcctgagacagacacctacatcctcttcaacccctggtgtgaagatgatgctgtgtacctggacaatgagaaggagcgggaggagtatgtgctgaatgacatcggggtcatcttctatggagaggtgaatgacatcaagaccaggtcctggagctatggccagtttgaagatggcatcctggacacctgcctgtatgtgatggaccgggcccagatggacctgagcggccggggcaaccccatcaaggtgtcccgggtgggcagcgccatggtgaatgccaaggatgatgagggcgtgctggtgggctcctgggacaacatctatgcctacggcgtgcccccatctgcctggacaggctctgtggacatcctgctggagtaccgcagcagtgaaaatcctgtgcgctatggccagtgctgggtgtttgctggggtcttcaacaccttcctgcgctgcctgggcatcccagccagaattgtgaccaactacttcagcgcccatgacaatgatgccaacctgcagatggacatcttcctggaggaggatggaaatgtgaacagcaagctgaccaaggacagcgtgtggaactaccactgctggaatgaggcctggatgaccaggccagacctgcctgtgggctttggaggctggcaggccgtggacagcaccccccaggagaacagtgatggcatgtaccgctgtggccctgcctctgtgcaggccatcaagcacggccacgtgtgcttccagtttgatgccccctttgtgtttgctgaggtgaacagcgacctgatctacatcacagccaagaaggatggcacccacgtggtggagaatgtggatgccacccacatcggcaagctgattgtgaccaagcagattggaggagatggcatgatggacatcacagacacctacaagttccaggagggccaggaggaggagcggctggccctggagacagccctgatgtatggagccaagaagcccctgaacacagaaggagtgatgaagagccgcagcaatgtggacatggactttgaggtggagaatgctgtgctgggcaaggacttcaagctgagcatcaccttcaggaacaacagccacaaccgctacaccatcacagcctacctgagcgccaacatcaccttctacacaggagtgcccaaggccgagttcaagaaggagacctttgatgtgaccctggagcccctgtccttcaagaaggaggccgtgctgatccaggccggggagtacatgggccagctgctggagcaggccagcctgcacttctttgtgacagcccgcatcaatgagaccagagatgtgctggccaagcagaagagcacagtgctgaccatccctgagatcatcatcaaggtgcggggcacccaggtggtgggcagtgacatgacagtgacagtggagttcaccaaccccctgaaggagaccctgagaaatgtgtgggtgcacctggatggccctggggtgacccggcccatgaagaagatgttccgggagatccggcccaacagcacagtgcagtgggaggaggtgtgccggccctgggtgtctggccacaggaagctgattgcctccatgagcagtgacagcctgcggcacgtgtatggagagctggatgtgcagatccagaggcggcccagcatgtag

SEQ ID NO: 3059 - DNA, 417 bp, synthetic construct
  misc_feature 1..417: note = source = /note="Description of Artificial Sequence: Synthetic coding sequence"
  source 1..417: mol_type = other DNA
atgtctgagaccagcaggacagcctttggaggccggcgggctgtgccccccaacaacagcaatgctgctgaagatgacctgcccaccgtggagctgcagggcgtggtgccccggggcgtgaacctgcaggagttcctgaatgtgacctctgtgcacctgttcaaggagcgctgggacaccaacaaggtggaccaccacacagacaagtatgagaacaacaagctgattgtgcggcggggccagagcttctacgtgcagattgacttcagccggccctatgacccccggcgggacctcttccgggtggagtatgtgattggccgctacccccaggagaacaagggcacctacatccctgtgcccatcgtgtctgagctgcagagcggcaagtggggcgccaagatcgtgatgaggtag

SEQ ID NO: 3060 - DNA, 1881 bp, synthetic construct
  misc_feature 1..1881: note = source = /note="Description of Artificial Sequence: Synthetic coding sequence"
  source 1..1881: mol_type = other DNA
atgtctgagaccagcaggacagcctttggaggccggcgggctgtgccccccaacaacagcaatgctgctgaagatgacctgcccaccgtggagctgcagggcgtggtgccccggggcgtgaacctgcagggccgctacccccaggagaacaagggcacctacatccctgtgcccatcgtgtctgagctgcagagcggcaagtggggcgccaagatcgtgatgagggaggacagatctgtgcggctgagcatccagagcagccccaagtgcatcgtgggcaagttcaggatgtatgtggccgtgtggaccccctatggagtgctgcggaccagcaggaaccctgagacagacacctacatcctcttcaacccctggtgtgaagatgatgctgtgtacctggacaatgagaaggagcgggaggagtatgtgctgaatgacattggagtcatcttctacggggaggtgaatgacatcaagaccaggtcctggagctatggccagtttgaagatggcatcctggacacctgcctgtatgtgatggaccgggcccagatggacctgagcggccggggcaaccccatcaaggtgtcccgggtgggcagcgccatggtgaatgccaaggatgatgaaggagtgctggtgggctcctgggacaacatctatgcctatggagtgccccccagcgcctggacaggctctgtggacatcctgctggagtaccgcagcagcgagaaccctgtgcgctatggccagtgctgggtgtttgctggggtcttcaacaccttcctgcgctgcctgggcatcccagcccgcatcgtgaccaactacttcagcgcccatgacaatgatgccaacctgcagatggacatcttcctggaggaggatggaaatgtgaacagcaagctgaccaaggacagcgtgtggaactaccactgctggaatgaggcctggatgaccaggccagacctgcctgtgggctttggaggctggcaggccgtggacagcaccccccaggagaacagtgatggcatgtaccgctgtggccctgcctctgtgcaggccatcaagcacggccacgtgtgcttccagtttgatgccccctttgtgtttgctgaggtgaacagcgacctgatctacatcacagccaagaaggatggcacccacgtggtggagaatgtggatgccacccacatcggcaagctgattgtgaccaagcagattggaggagatggcatgatggacatcacagacacctacaagttccaggagggccaggaggaggagcggctggccctggagacagccctgatgtacggggccaagaagcccctgaacacagagggcgtgatgaagagccgcagcaatgtggacatggactttgaggtggagaatgctgtgctgggcaaggacttcaagctgagcatcaccttcaggaacaacagccacaaccgctacaccatcacagcctacctgagcgccaacatcaccttctacacaggagtgcccaaggccgagttcaagaaggagacctttgatgtgaccctggagcccctgtccttcaagaaggaggccgtgctgatccaggccggggagtacatgggccagctgctggagcaggccagcctgcacttctttgtgacagcccgcatcaatgagaccagagatgtgctggccaagcagaagagcacagtgctgaccatccctgagatcatcatcaaggtgcggggcacccaggtggtgggcagtgacatgacagtgacagaggtgtgccggccctgggtgtctggccacaggaagctgattgcctccatgagcagtgacagcctgcggcacgtgtatggagagctggatgtgcagatccagaggcggcccagcatgtag

SEQ ID NO: 3061 - DNA, 8835 bp, synthetic construct
  misc_feature 1..8835: note = source = /note="Description of Artificial Sequence: Synthetic coding sequence"
  source 1..8835: mol_type = other DNA
atgaccctgcggctgctggtggccgccctgtgtgccggcatcctggccgaggccccccgggtgcgggcccagcaccgggagcgggtgacctgcacccggctgtatgctgctgacatcgtgttcctgctggatggcagcagcagcatcggccgcagcaacttccgggaggtgcgctccttcctggagggcctggtgctgcccttctctggagctgccagcgcccagggcgtgcgctttgccaccgtgcagtacagtgatgaccccaggacagaatttggcctggatgccctgggcagcggaggagatgtgatccgggccatccgggagctgagctacaagggcggcaacaccaggactggagctgccatcctgcacgtggccgaccacgtgttcctgccccagctggcccggcctggggtgcccaaggtgtgcatcctgatcacagatggcaagagccaggacctggtggacacagctgcccagaggctgaagggccagggcgtgaagctgtttgctgtgggcatcaagaatgctgaccctgaggagctgaagagggtggccagccagcccaccagtgacttcttcttctttgtgaatgacttcagcatcctgcggaccctgctgcccctggtgtccagaagagtgtgcaccacagctggaggagtgcctgtgacccggcccccagatgacagcaccagcgccccccgggacctggtgctgtctgagcccagcagccagagcctgcgggtgcagtggacagctgccagcggccctgtgacaggctacaaggtgcagtacacccccctgaccggcctgggccagcccctgcccagcgagcggcaggaggtgaatgtgcctgctggggagacctctgtgcggctgcggggcctgcggcccctgacagagtaccaggtgaccgtcatcgccctgtatgccaacagcattggagaggccgtgtctggaacagcccggaccacagccctggagggccctgagctgaccatccagaacaccacagcccacagcctgctggtggcctggaggtctgtgcctggggccaccggctacagagtgacctggagggtgctgagcggcggccccacccagcagcaggagctgggccctggccagggctctgtgctgctgcgggacctggagcctggaacagattatgaggtgacagtgtccaccctgtttggccgctctgtgggccctgccaccagcctgatggccaggacagatgcctctgtggagcagaccctgcggcctgtgatcctgggccccaccagcatcctgctgtcctggaacctggtgcctgaggcccggggctaccgcctggagtggaggcgggagaccggcctggagcccccccagaaggtggtgctgcccagtgatgtgacccgctaccagctggatggcctgcagcccggcacagagtaccgcctgaccctgtacaccctgctggagggccacgaggtggccaccccagccaccgtggtgcccaccggccctgagctgcctgtgtcccctgtgacagacctgcaggccacagagctgcccggccagagggtgcgggtgtcctggagccctgtgcctggggccacccagtaccgcatcatcgtgcgcagcacccagggcgtggagaggaccctggtgctgcccggcagccagacagcctttgacctggatgatgtgcaggccggcctgagctacacagtgcgggtgtctgcccgggtgggcccccgggagggcagcgcctctgtgctgactgtgcggcgggagcctgagacccccctggccgtgcccggcctgcgggtggtggtgtctgatgccaccagggtgcgggtggcctggggccctgtgcctggggccagcggcttccgcatctcctggagcactggaagtggccctgagagcagccagaccctgcccccagacagcacagccacagacatcaccggcctgcagcccggcaccacctaccaggtggccgtgtctgtgctgcggggccgggaggagggccctgctgctgtgattgtggccaggacagaccccctgggccctgtgaggacagtgcacgtgacccaggccagcagcagctctgtgaccatcacctggaccagggtgcctggggccaccggctacagagtgtcctggcacagcgcccacggccctgagaagagccagctggtgtctggagaggccaccgtggccgagctggatggcctggagccagacacagagtacacagtgcacgtgcgggcccacgtggccggcgtggatggccccccagcctctgtggtggtgaggacagcccctgagcctgtgggccgggtgtcccggctgcagatcctgaatgccagcagtgatgtgctgcgcatcacctgggtgggcgtgactggagccacagcctaccgcctggcctggggccgctctgagggcggccccatgaggcaccagatcctgcccggcaacacagacagcgctgagatccggggcctggagggcggcgtgtcctacagcgtgcgggtgacagccctggtgggggaccgggagggcacccctgtgtccatcgtggtgaccaccccacctgaggcccccccagccctgggcaccctgcacgtggtgcagagaggagagcacagcctgcggctgcgctgggagcctgtgccccgggcccagggcttcctgctgcactggcagcctgagggcggccaggagcagagccgggtgctgggccctgagctgagcagctaccacctggatggcctggagcccgccacccagtacagagtgcggctgtctgtgctgggccctgctggggagggccccagcgctgaggtgacagccaggacagagagcccccgggtgcccagcattgagctgcgggtggtggacaccagcattgattctgtgaccctggcctggacccctgtgtcccgggccagcagctacatcctgtcctggaggcccctgcggggccctggccaggaggtgcccggcagcccccagaccctgcccggcatcagcagcagccagagggtgacaggcctggagcccggggtgtcctacatcttcagcctgacccctgtgctggatggagtgcggggccctgaggcctctgtgacccagacccctgtgtgcccccggggcctggctgatgtggtgttcctgccccacgccacccaggacaatgcccacagagctgaggccaccaggagagtgctggagcggctggtgctggccctgggccccctgggcccccaggccgtgcaggtgggcctgctgagctacagccaccggcccagccccctcttccccctgaatggcagccatgacctgggcatcatcctgcagaggatccgggacatgccctacatggaccccagcggcaacaacctgggcacagctgtggtgacagcccaccgctacatgctggccccagatgcccctggaagacggcagcacgtgcctggggtgatggtgctgctggtggatgagcccctgcggggggacatcttcagccccatccgggaggcccaggccagcggcctgaatgtggtgatgctgggcatggccggggctgaccctgagcagctgcggcggctggcccctggcatggattctgtgcagaccttctttgctgtggatgatggccccagcctggaccaggccgtgtctggcctggccacagccctgtgccaggccagcttcaccacccagcccaggcctgagccctgccctgtgtactgccccaagggccagaagggggagcctggagagatgggcctgcggggccaggtgggccccccaggggaccccggcctgcccggccgcactggagcccctggcccccagggccccccaggcagcgccacagccaagggggagcggggcttccctggagcagatggccggcccggcagccctggccgggccggcaaccctggcacccctggggcccctggcctgaagggcagccctggcctgcccggccccaggggggaccctggagagcggggcccccggggccccaagggggagcccggggcccctggccaggtgattggaggagagggccctggcctgcccggcaggaaaggagaccccggccccagcggccccccaggcccccggggccccctgggggaccccggcccccggggccccccaggcctgcccggcacagccatgaagggggacaagggggacagaggagagcggggccccccaggccctggagagggcggcatcgcccctggagagcccggcctgcccggcctgcccggcagccctggcccccagggccctgtgggccccccaggcaagaagggggagaagggggacagtgaagatggagcccctggcctgcccggccagcccggcagccctggagagcagggcccccggggccccccaggggccatcggccccaagggggaccggggcttccctggccccctgggggaggccggggagaagggggagcggggccccccaggccctgctggcagccggggcctgcccggggtggccggccggcctggggccaagggccctgagggccccccaggccccaccggccggcagggcgagaagggggagcccggccggcctggggaccctgctgtggtgggccctgctgtggccggccccaagggggagaagggagatgtgggccctgctggccccaggggggccaccggggtgcagggcgagcggggccccccaggcctggtgctgcccggggaccccggccccaagggggaccccggggaccggggccccatcggcctgaccggccgggccggccccccaggggacagcggccccccaggagagaagggggaccccggccggcccggccccccaggccctgtgggcccccggggcagagatggagaggtgggggagaagggagatgagggccccccaggggaccccggcctgcccgggaaggccggggagcggggcctgcggggggcccctggggtgcggggccctgtgggggagaagggggaccagggcgaccccggggaggatggaagaaatggcagccctggcagcagcggccccaagggggacagaggagagcccggccccccaggccccccaggccgcctggtggacaccggccctggggcccgggagaagggggagcccggggaccggggccaggagggcccccggggccccaagggggaccccggcctgcccggggcccctggagagcggggcatcgagggcttccggggccccccaggcccccagggcgaccccggggtgcggggccctgctggggagaagggggaccggggccccccaggcctggatggccgcagcggcctggatggcaagccaggagctgctggccccagcggccccaacggggctgctgggaaggccggggaccccggcagagatggcctgcccggcctgcggggggagcagggcctgcccggccccagcggccccccaggcctgcccgggaagccaggagaagatggcaagccaggcctgaatggcaagaatggagagcccggggaccccggggaggatggcaggaagggggagaagggggacagcggggccagcggccgggagggcagagatggccccaagggggagcggggggcccctggcatcctgggcccccagggccccccaggcctgcccggccctgtgggccccccaggccagggcttccctggggtgcctgggggcaccggccccaagggggacagaggagagaccggcagcaaaggagagcagggcctgcctggagagcggggcctgcggggggagcccggctctgtgcccaacgtggaccggctgctggagacagctggcatcaaggccagcgccctgcgggagatcgtggagacctgggatgagagcagcggcagcttcctgcctgtgcctgagaggagaagaggccccaagggggacagcggggagcagggccccccaggcaaggagggccccatcggcttccctggagagcggggcctgaagggggacagaggagaccccggcccccagggccccccaggcctggccctgggggagcggggccccccaggccccagcggcctggccggggagcccgggaagccaggcatccctggcctgcccggccgggccggcggcgtgggggaggccggccggcctggagagcggggggagcggggggagaagggggagcggggggagcagggcagagatggccccccaggcctgcccggcaccccaggccccccaggccccccaggccccaaggtgtctgtggatgagcccggccctggcctgagcggggagcagggccccccaggcctgaagggggccaagggggagcccggcagcaatggagaccagggccccaagggggaccggggcgtgcccggcatcaagggggacagaggagagcccggcccccggggccaggacggcaaccctggcctgcctggagagcggggcatggccggccctgagggcaagccaggcctgcagggcccccggggccccccaggccctgtgggcggccacggggaccccggccccccaggggcccctggcctggccggccctgctggcccccagggccccagcggcctgaagggggagcctggagagaccggccccccaggccggggcctgaccggccccactggagctgtgggcctgcccggccccccaggccccagcggcctggtgggcccccagggcagccctggcctgcccggccaggtgggggagaccgggaagccaggggcccctggaagagatggagccagcggcaaggatggagaccggggcagccctggggtgcccggcagccctggcctgcccggccctgtgggccccaagggggagcccggccccactggagcccctggccaggccgtggtgggcctgcccggggccaagggggagaagggggcccctgggggcctggccggggacctggtgggggagcccggggccaagggggaccggggcctgcccggccccagaggagagaagggggaggccggccgggccggggagcccggggaccctggagaagatggccagaagggggcccctggccccaagggcttcaagggggaccccggggtgggcgtgcccggcagccctggccccccaggccccccaggagtgaagggggacctgggcctgcccggcctgcccggggcccctggggtggtgggcttccctggccagacaggccccagaggagagatgggccagcccggccccagcggggagcggggcctggccggccccccaggccgggagggcatccctggccccctgggccccccaggccccccaggctctgtgggccccccaggggccagcggcctgaagggggacaagggggaccccggggtgggcctgcccggccccagaggagagcggggggagcccggcatccggggggaggatggccggcccggccaggagggcccccggggcctgactggacctcctggcagcagaggagagcggggggagaagggagatgtgggcagcgctggcctgaagggggacaagggggacagcgctgtgatcctgggccccccaggccccaggggggccaagggggacatgggagagcggggcccccggggcctggatggagacaagggccccaggggggacaacggggaccccggggacaagggcagcaaaggagagcccggggacaagggcagcgctggcctgcccggcctgcggggcctgctgggcccccagggccagcctggagctgctggcatccctggggaccccggcagccctgggaaggatggagtgcccggcatccggggggagaagggagatgtgggcttcatgggcccccggggcctgaagggggagcggggcgtgaagggggcctgtggcctggatggagagaagggggacaagggggaggccggccccccaggccggcccggcctggccggccacaagggggagatgggagagcccggggtgcccggccagagcggggcccctgggaaggagggcctgattggccccaagggggaccggggctttgatggccagcccggccccaagggggaccagggcgagaagggggagcggggcaccccaggcatcggcggcttccctggccccagcggaaatgatggcagcgctggccccccaggccccccaggctctgtgggcccccggggccctgagggcctgcagggccagaagggggagcggggccccccaggagagcgggtggtgggcgcccctggggtgcctggggcccctggagagcggggggagcagggccggcccggccctgctggccccagaggagagaagggggaggccgccctgacagaagatgacatccggggctttgtgcggcaggagatgagccagcactgtgcctgccagggccagttcatcgccagcggcagccggcccctgcccagctatgctgctgacacagctggcagccagctgcatgctgtgcctgtgctgcgggtgtcccatgctgaggaggaggagcgggtgcccccagaagatgatgagtacagcgagtacagcgagtacagcgtggaggagtaccaggaccctgaggccccctgggacagtgatgacccctgcagcctgcccctggatgagggcagctgcacagcctacaccctgcgctggtaccacagagctgtgacaggcagcacagaggcctgccacccctttgtgtatggaggctgcggcggcaatgccaacagatttggcacccgggaggcctgtgaaagacgctgccccccccgggtggtgcagagccagggcactggaacagcccaggactag

SEQ ID NO: 3062 - DNA, 8739 bp, synthetic construct
  misc_feature 1..8739: note = source = /note="Description of Artificial Sequence: Synthetic coding sequence"
  source 1..8739: mol_type = other DNA
atgaccctgcggctgctggtggccgccctgtgtgccggcatcctggccgaggccccccgggtgcgggcccagcaccgggagcgggtgacctgcacccggctgtatgctgctgacatcgtgttcctgctggatggcagcagcagcatcggccgcagcaacttccgggaggtgcgctccttcctggagggcctggtgctgcccttctctggagctgccagcgcccagggcgtgcgctttgccaccgtgcagtacagtgatgaccccaggacagaatttggcctggatgccctgggcagcggaggagatgtgatccgggccatccgggagctgagctacaagggcggcaacaccaggactggagctgccatcctgcacgtggccgaccacgtgttcctgccccagctggcccggcctggggtgcccaaggtgtgcatcctgatcacagatggcaagagccaggacctggtggacacagctgcccagaggctgaagggccagggcgtgaagctgtttgctgtgggcatcaagaatgctgaccctgaggagctgaagagggtggccagccagcccaccagtgacttcttcttctttgtgaatgacttcagcatcctgcggaccctgctgcccctggtgtccagaagagtgtgcaccacagctggaggagtgcctgtgacccggcccccagatgacagcaccagcgccccccgggacctggtgctgtctgagcccagcagccagagcctgcgggtgcagtggacagctgccagcggccctgtgacaggctacaaggtgcagtacacccccctgaccggcctgggccagcccctgcccagcgagcggcaggaggtgaatgtgcctgctggggagacctctgtgcggctgcggggcctgcggcccctgacagagtaccaggtgaccgtcatcgccctgtatgccaacagcattggagaggccgtgtctggaacagcccggaccacagccctggagggccctgagctgaccatccagaacaccacagcccacagcctgctggtggcctggaggtctgtgcctggggccaccggctacagagtgacctggagggtgctgagcggcggccccacccagcagcaggagctgggccctggccagggctctgtgctgctgcgggacctggagcctggaacagattatgaggtgacagtgtccaccctgtttggccgctctgtgggccctgccaccagcctgatggccaggacagatgcctctgtggagcagaccctgcggcctgtgatcctgggccccaccagcatcctgctgtcctggaacctggtgcctgaggcccggggctaccgcctggagtggaggcgggagaccggcctggagcccccccagaaggtggtgctgcccagtgatgtgacccgctaccagctggatggcctgcagcccggcacagagtaccgcctgaccctgtacaccctgctggagggccacgaggtggccaccccagccaccgtggtgcccaccggccctgagctgcctgtgtcccctgtgacagacctgcaggccacagagctgcccggccagagggtgcgggtgtcctggagccctgtgcctggggccacccagtaccgcatcatcgtgcgcagcacccagggcgtggagaggaccctggtgctgcccggcagccagacagcctttgacctggatgatgtgcaggccggcctgagctacacagtgcgggtgtctgcccgggtgggcccccgggagggcagcgcctctgtgctgactgtgcggcgggagcctgagacccccctggccgtgcccggcctgcgggtggtggtgtctgatgccaccagggtgcgggtggcctggggccctgtgcctggggccagcggcttccgcatctcctggagcactggaagtggccctgagagcagccagaccctgcccccagacagcacagccacagacatcaccggcctgcagcccggcaccacctaccaggtggccgtgtctgtgctgcggggccgggaggagggccctgctgctgtgattgtggccaggacagaccccctgggccctgtgaggacagtgcacgtgacccaggccagcagcagctctgtgaccatcacctggaccagggtgcctggggccaccggctacagagtgtcctggcacagcgcccacggccctgagaagagccagctggtgtctggagaggccaccgtggccgagctggatggcctggagccagacacagagtacacagtgcacgtgcgggcccacgtggccggcgtggatggccccccagcctctgtggtggtgaggacagcccctgagcctgtgggccgggtgtcccggctgcagatcctgaatgccagcagtgatgtgctgcgcatcacctgggtgggcgtgactggagccacagcctaccgcctggcctggggccgctctgagggcggccccatgaggcaccagatcctgcccggcaacacagacagcgctgagatccggggcctggagggcggcgtgtcctacagcgtgcgggtgacagccctggtgggggaccgggagggcacccctgtgtccatcgtggtgaccaccccacctgaggcccccccagccctgggcaccctgcacgtggtgcagagaggagagcacagcctgcggctgcgctgggagcctgtgccccgggcccagggcttcctgctgcactggcagcctgagggcggccaggagcagagccgggtgctgggccctgagctgagcagctaccacctggatggcctggagcccgccacccagtacagagtgcggctgtctgtgctgggccctgctggggagggccccagcgctgaggtgacagccaggacagagagcccccgggtgcccagcattgagctgcgggtggtggacaccagcattgattctgtgaccctggcctggacccctgtgtcccgggccagcagctacatcctgtcctggaggcccctgcggggccctggccaggaggtgcccggcagcccccagaccctgcccggcatcagcagcagccagagggtgacaggcctggagcccggggtgtcctacatcttcagcctgacccctgtgctggatggagtgcggggccctgaggcctctgtgacccagacccctgtgtgcccccggggcctggctgatgtggtgttcctgccccacgccacccaggacaatgcccacagagctgaggccaccaggagagtgctggagcggctggtgctggccctgggccccctgggcccccaggccgtgcaggtgggcctgctgagctacagccaccggcccagccccctcttccccctgaatggcagccatgacctgggcatcatcctgcagaggatccgggacatgccctacatggaccccagcggcaacaacctgggcacagctgtggtgacagcccaccgctacatgctggccccagatgcccctggaagacggcagcacgtgcctggggtgatggtgctgctggtggatgagcccctgcggggggacatcttcagccccatccgggaggcccaggccagcggcctgaatgtggtgatgctgggcatggccggggctgaccctgagcagctgcggcggctggcccctggcatggattctgtgcagaccttctttgctgtggatgatggccccagcctggaccaggccgtgtctggcctggccacagccctgtgccaggccagcttcaccacccagcccaggcctgagccctgccctgtgtactgccccaagggccagaagggggagcctggagagatgggcctgcggggccaggtgggccccccaggggaccccggcctgcccggccgcactggagcccctggcccccagggccccccaggcagcgccacagccaagggggagcggggcttccctggagcagatggccggcccggcagccctggccgggccggcaaccctggcacccctggggcccctggcctgaagggcagccctggcctgcccggccccaggggggaccctggagagcggggcccccggggccccaagggggagcccggggcccctggccaggtgattggaggagagggccctggcctgcccggcaggaaaggagaccccggccccagcggccccccaggcccccggggccccctgggggaccccggcccccggggccccccaggcctgcccggcacagccatgaagggggacaagggggacagaggagagcggggccccccaggccctggagagggcggcatcgcccctggagagcccggcctgcccggcctgcccggcagccctggcccccagggccctgtgggccccccaggcaagaagggggagaagggggacagtgaagatggagcccctggcctgcccggccagcccggcagccctggagagcagggcccccggggccccccaggggccatcggccccaagggggaccggggcttccctggccccctgggggaggccggggagaagggggagcggggccccccaggccctgctggcagccggggcctgcccggggtggccggccggcctggggccaagggccctgagggccccccaggccccaccggccggcagggcgagaagggggagcccggccggcctggggaccctgctgtggtgggccctgctgtggccggccccaagggggagaagggagatgtgggccctgctggccccaggggggccaccggggtgcagggcgagcggggccccccaggcctggtgctgcccggggaccccggccccaagggggaccccggggaccggggccccatcggcctgaccggccgggccggccccccaggggacagcggccccccaggagagaagggggaccccggccggcccggccccccaggccctgtgggcccccggggcagagatggagaggtgggggagaagggagatgagggccccccaggggaccccggcctgcccgggaaggccggggagcggggcctgcggggggcccctggggtgcggggccctgtgggggagaagggggaccagggcgaccccggggaggatggaagaaatggcagccctggcagcagcggccccaagggggacagaggagagcccggccccccaggccccccaggccgcctggtggacaccggccctggggcccgggagaagggggagcccggggaccggggccaggagggcccccggggccccaagggggaccccggcctgcccggggcccctggagagcggggcatcgagggcttccggggccccccaggcccccagggcgaccccggggtgcggggccctgctggggagaagggggaccggggccccccaggcctggatggccgcagcggcctggatggcaagccaggagctgctggccccagcggccccaacggggctgctgggaaggccggggaccccggcagagatggcctgcccggcctgcggggggagcagggcctgcccggccccagcggccccccaggcctgcccgggaagccaggagaagatggcaagccaggcctgaatggcaagaatggagagcccggggaccccggggaggatggcaggaagggggagaagggggacagcggggccagcggccgggagggcttccctggggtgcctgggggcaccggccccaagggggacagaggagagaccggcagcaaaggagagcagggcctgcctggagagcggggcctgcggggggagcccggctctgtgcccaacgtggaccggctgctggagacagctggcatcaaggccagcgccctgcgggagatcgtggagacctgggatgagagcagcggcagcttcctgcctgtgcctgagaggagaagaggccccaagggggacagcggggagcagggccccccaggcaaggagggccccatcggcttccctggagagcggggcctgaagggggacagaggagaccccggcccccagggccccccaggcctggccctgggggagcggggccccccaggccccagcggcctggccggggagcccgggaagccaggcatccctggcctgcccggccgggccggcggcgtgggggaggccggccggcctggagagcggggggagcggggggagaagggggagcggggggagcagggcagagatggccccccaggcctgcccggcaccccaggccccccaggccccccaggccccaaggtgtctgtggatgagcccggccctggcctgagcggggagcagggccccccaggcctgaagggggccaagggggagcccggcagcaatggagaccagggccccaagggggaccggggcgtgcccggcatcaagggggacagaggagagcccggcccccggggccaggacggcaaccctggcctgcctggagagcggggcatggccggccctgagggcaagccaggcctgcagggcccccggggccccccaggccctgtgggcggccacggggaccccggccccccaggggcccctggcctggccggccctgctggcccccagggccccagcggcctgaagggggagcctggagagaccggccccccaggccggggcctgaccggccccactggagctgtgggcctgcccggccccccaggccccagcggcctggtgggcccccagggcagccctggcctgcccggccaggtgggggagaccgggaagccaggggcccctggaagagatggagccagcggcaaggatggagaccggggcagccctggggtgcccggcagccctggcctgcccggccctgtgggccccaagggggagcccggccccactggagcccctggccaggccgtggtgggcctgcccggggccaagggggagaagggggcccctgggggcctggccggggacctggtgggggagcccggggccaagggggaccggggcctgcccggccccagaggagagaagggggaggccggccgggccggggagcccggggaccctggagaagatggccagaagggggcccctggccccaagggcttcaagggggaccccggggtgggcgtgcccggcagccctggccccccaggccccccaggagtgaagggggacctgggcctgcccggcctgcccggggcccctggggtggtgggcttccctggccagacaggccccagaggagagatgggccagcccggccccagcggggagcggggcctggccggccccccaggccgggagggcatccctggccccctgggccccccaggccccccaggctctgtgggccccccaggggccagcggcctgaagggggacaagggggaccccggggtgggcctgcccggccccagaggagagcggggggagcccggcatccggggggaggatggccggcccggccaggagggcccccggggcctgactggacctcctggcagcagaggagagcggggggagaagggagatgtgggcagcgctggcctgaagggggacaagggggacagcgctgtgatcctgggccccccaggccccaggggggccaagggggacatgggagagcggggcccccggggcctggatggagacaagggccccaggggggacaacggggaccccggggacaagggcagcaaaggagagcccggggacaagggcagcgctggcctgcccggcctgcggggcctgctgggcccccagggccagcctggagctgctggcatccctggggaccccggcagccctgggaaggatggagtgcccggcatccggggggagaagggagatgtgggcttcatgggcccccggggcctgaagggggagcggggcgtgaagggggcctgtggcctggatggagagaagggggacaagggggaggccggccccccaggccggcccggcctggccggccacaagggggagatgggagagcccggggtgcccggccagagcggggcccctgggaaggagggcctgattggccccaagggggaccggggctttgatggccagcccggccccaagggggaccagggcgagaagggggagcggggcaccccaggcatcggcggcttccctggccccagcggaaatgatggcagcgctggccccccaggccccccaggctctgtgggcccccggggccctgagggcctgcagggccagaagggggagcggggccccccaggagagcgggtggtgggcgcccctggggtgcctggggcccctggagagcggggggagcagggccggcccggccctgctggccccagaggagagaagggggaggccgccctgacagaagatgacatccggggctttgtgcggcaggagatgagccagcactgtgcctgccagggccagttcatcgccagcggcagccggcccctgcccagctatgctgctgacacagctggcagccagctgcatgctgtgcctgtgctgcgggtgtcccatgctgaggaggaggagcgggtgcccccagaagatgatgagtacagcgagtacagcgagtacagcgtggaggagtaccaggaccctgaggccccctgggacagtgatgacccctgcagcctgcccctggatgagggcagctgcacagcctacaccctgcgctggtaccacagagctgtgacaggcagcacagaggcctgccacccctttgtgtatggaggctgcggcggcaatgccaacagatttggcacccgggaggcctgtgaaagacgctgccccccccgggtggtgcagagccagggcactggaacagcccaggactag

SEQ ID NO: 3063 - DNA, 435 bp, synthetic construct
  misc_feature 1..435: note = source = /note="Description of Artificial Sequence: Synthetic coding sequence"
  source 1..435: mol_type = other DNA
atgtggctgcagagcctgctgctgctgggcaccgtggcctgcagcatcagcgccccagcccggagccccagccccagcacccagccctgggagcacgtgaatgccatccaggaggcccggcggctgctgaacctgagccgggacacagctgctgagatgaatgagaccgtggaggtgatcagcgagatgtttgacctgcaggagcccacctgcctgcagacccggctggagctgtacaagcagggcctgcggggcagcctgaccaagctgaagggccccctgaccatgatggccagccactacaagcagcactgcccccccaccccagagaccagctgtgccacccagatcatcacctttgagagcttcaaggagaacctgaaggacttcctgctggtgatcccctttgactgctgggagcctgtgcaggagtag

SEQ ID NO: 3064 - DNA, 1218 bp, synthetic construct
  misc_feature 1..1218: note = source = /note="Description of Artificial Sequence: Synthetic coding sequence"
  source 1..1218: mol_type = other DNA
atggaggccagctttgtgcagaccaccatggccctgggcctgagcagcaagaaggccagcagcagaaatgtggccgtggagaggaagaacctgatcaccgtgtgccgcttctctgtgaagaccctgctggagaagtacacagctgagcccattgatgacagcagcgaggagtttgtgaactttgctgccatcctggagcagatcctgagccaccgcttcaaggcctgtgccccagctggccctgtgtcctggttcagcagtgatggccagaggggcttctgggactacatccggctggcctgcagcaaggtgcccaacaactgtgtgagcagcattgagaacatggagaacatcagcacagcccgggccaagggccgggcctggatccgggtggccctgatggagaagaggatgtctgagtacatcaccacagccctgcgggacaccaggaccacccggcgcttctatgacagcggggccatcatgctgagagatgaggccaccatcctgaccggcatgctgattggcctgagcgccatcgacttctccttctgcctgaagggggaggtgctggatggcaagacccctgtggtgattgactacaccccctacctgaagttcacccagagctatgactacctgacagatgaggaggagcggcacagcgctgagagcagcaccagcgaggacaacagccctgagcacccctacctgcccctggtgacagatgaggacagctggtacagcaagtggcacaagatggagcagaagttccgcatcgtgtatgcccagaagggctacctggaggagctggtgcggctgcgggagagccagctgaaggacctggaggctgaaaatagaaggctgcagctgcagctggaggaggccgccgcccagaaccagcgggagaagcgggagctggagggcgtcatcctggagctgcaggagcagctgaccggcctcatccccagcgaccacgcccccctggcccagggcagcaaggagctgaccacccccctggtgaaccagtggcccagcctgggcaccctgaatggagctgagggcgccagcaacagcaagctgtacagaagacacagcttcatgagcacagagcccctgtctgctgaggccagcctgagcagtgacagccagaggctgggggagggcaccagagatgaggagccctggggccccatcggcagcagcgagcccaactag

SEQ ID NO: 3065 - DNA, 603 bp, synthetic construct
  misc_feature 1..603: note = source = /note="Description of Artificial Sequence: Synthetic coding sequence"
  source 1..603: mol_type = other DNA
atgagccctgagcccgccctgagccctgccctgcagctgctgctgtggcacagcgccctgtggacagtgcaggaggccacccccctgggccctgccagcagcctgccccagagcttcctgctgaagtgcctggagcaggtgaggaagatccagggagatggagctgccctgcaggagaagctgtgtgccacctacaagctgtgccaccctgaggagctggtgctgctgggccacagcctgggcatcccctgggcccccctgagcagctgccccagccaggccctgcagctggccggctgcctgagccagctgcacagcggcctcttcctgtaccagggcctgctgcaggccctggagggcatcagccctgagctgggccccaccctggacaccctgcagctggatgtggccgactttgccaccaccatctggcagcagatggaggagctgggcatggccccagccctgcagcccacccagggcgccatgcctgcctttgccagcgccttccagaggcgggccggcggcgtgctggtggccagccacctgcagagcttcctggaggtgtcctacagagtgctgcggcacctggcccagccctag

SEQ ID NO: 3066 - DNA, 516 bp, synthetic construct
  misc_feature 1..516: note = source = /note="Description of Artificial Sequence: Synthetic coding sequence"
  source 1..516: mol_type = other DNA
atggccggccctgccacccagagccccatgaagctgatggccctgcagctgctgctgtggcacagcgccctgtggacagtgcaggaggccacccccctgggccctgccagcagcctgccccagagcttcctgctgaagtgcctggagcaggtgaggaagatccagggagatggagctgccctgcaggagaagctggtgtctgaggccggctgcctgagccagctgcacagcggcctcttcctgtaccagggcctgctgcaggccctggagggcatcagccctgagctgggccccaccctggacaccctgcagctggatgtggccgactttgccaccaccatctggcagcagatggaggagctgggcatggccccagccctgcagcccacccagggcgccatgcctgcctttgccagcgccttccagaggagagctggaggagtgctggtggccagccacctgcagagcttcctggaggtgtcctacagagtgctgcggcacctggcccagccctag

SEQ ID NO: 3067 - DNA, 615 bp, synthetic construct
  misc_feature 1..615: note = source = /note="Description of Artificial Sequence: Synthetic coding sequence"
  source 1..615: mol_type = other DNA
atggccggccctgccacccagagccccatgaagctgatggccctgcagctgctgctgtggcacagcgccctgtggacagtgcaggaggccacccccctgggccctgccagcagcctgccccagagcttcctgctgaagtgcctggagcaggtgaggaagatccagggagatggagctgccctgcaggagaagctgtgtgccacctacaagctgtgccaccctgaggagctggtgctgctgggccacagcctgggcatcccctgggcccccctgagcagctgccccagccaggccctgcagctggccggctgcctgagccagctgcacagcggcctcttcctgtaccagggcctgctgcaggccctggagggcatcagccctgagctgggccccaccctggacaccctgcagctggatgtggccgactttgccaccaccatctggcagcagatggaggagctgggcatggccccagccctgcagcccacccagggcgccatgcctgcctttgccagcgccttccagaggcgggccggcggcgtgctggtggccagccacctgcagagcttcctggaggtgtcctacagagtgctgcggcacctggcccagccctag

SEQ ID NO: 3068 - DNA, 3696 bp, synthetic construct
  misc_feature 1..3696: note = source = /note="Description of Artificial Sequence: Synthetic coding sequence"
  source 1..3696: mol_type = other DNA
atgaggctgctggccaagatcatctgcctgatgctgtgggccatctgtgtggccgaggactgcaatgagctgcccccaagaagaaacacagagatcctgaccggctcctggagcgaccagacctacccagagggcacccaggccatctacaagtgccggcccggctaccgcagcctgggcaatgtcatcatggtgtgcaggaagggggagtgggtggccctgaaccccctgaggaagtgccagaagaggccctgtggccaccctggggacaccccatttggcaccttcaccctgactggaggaaatgtgtttgaatatggagtgaaggctgtgtacacctgcaatgaaggctaccagctgctgggggagatcaactaccgggagtgtgacacagatggctggaccaatgacatccccatctgtgaggtggtgaagtgcctgcctgtgacagccccagaaaatggcaagatcgtgagcagcgccatggagccagaccgggagtaccacttcggccaggccgtgcgctttgtgtgcaacagcggctacaagattgaaggagatgaggagatgcactgcagtgatgatggcttctggagcaaggagaagcccaagtgtgtggagatcagctgcaagagcccagatgtgatcaatggcagccccatcagccagaagatcatctacaaggaaaatgaacgcttccagtacaagtgcaacatgggctatgagtacagcgagagaggagatgctgtgtgcacagagagcggctggaggcccctgcccagctgtgaggagaagagctgtgacaacccctacatccccaacggggactacagccccctgcgcatcaagcacaggactggagatgagatcacctaccagtgcagaaatggcttctacccagccacccggggcaacacagccaagtgcaccagcacaggctggatcccagccccccgctgcaccctgaagccctgtgactacccagacatcaagcacggcggcctgtaccacgagaacatgagaagaccctacttccctgtggccgtgggcaagtactacagctactactgtgatgagcactttgagaccccatctggcagctactgggaccacatccactgcacccaggacggctggagccctgctgtgccctgcctgaggaagtgctacttcccctacctggagaatggctacaaccagaaccacggcaggaagtttgtgcagggcaagagcattgatgtggcctgccaccctggctacgccctgcccaaggcccagaccaccgtgacctgcatggagaatggctggagccccaccccccgctgcatccgggtgaagacctgcagcaagagcagcattgatattgaaaatggcttcatcagcgagagccagtacacctacgccctgaaggagaaggccaagtaccagtgcaagctgggctacgtgacagcagatggagagaccagcggcagcatcacctgtgggaaggatggctggagcgcccagcccacctgcatcaagagctgtgacatccctgtgttcatgaatgcccggaccaagaatgacttcacctggttcaagctgaatgacaccctggactatgaatgtcatgatggctatgagagcaacacaggcagcaccaccggcagcatcgtgtgtggctacaacggctggagcgacctgcccatctgctatgagcgggagtgtgagctgcccaagattgatgtgcacctggtgcctgacaggaagaaggaccagtacaaggtgggggaggtgctgaagttcagctgcaagccaggcttcaccatcgtgggccccaacagcgtgcagtgctaccacttcggcctgagcccagacctgcccatctgcaaggagcaggtgcagagctgtggccccccacctgagctgctgaatggaaatgtgaaggagaagaccaaggaggagtatggccacagcgaggtggtggagtactactgcaacccccgcttcctgatgaagggccccaacaagatccagtgtgtggatggagagtggaccaccctgcctgtgtgcatcgtggaggagagcacctgtggggacatccctgagctggagcacggctgggcccagctgagcagccccccctactactatggagacagcgtggagttcaactgcagcgagagcttcaccatgattggccacaggagcatcacctgcatccatggagtgtggacccagctgccccagtgtgtggccatcgacaagctgaagaagtgcaagagcagcaacctgatcatcctggaggagcacctgaagaacaagaaggagtttgaccacaacagcaacatccgctaccgctgccggggcaaggagggctggatccacacagtgtgcatcaatggccgctgggaccctgaggtgaactgcagcatggcccagatccagctgtgccccccaccaccccagatccccaacagccacaacatgaccaccaccctgaactacagagatggagagaaggtgtctgtgctgtgccaggagaactacctgatccaggagggggaggagatcacctgcaaggatggccgctggcagagcatccccctgtgtgtggagaagatcccctgcagccagcccccccagatcgagcacggcaccatcaacagcagccgcagcagccaggagagctatgcccacggcaccaagctgagctacacctgtgagggcggcttccgcatcagcgaggagaatgagaccacctgctacatgggcaagtggagcagccccccccagtgtgagggcctgccctgcaagagccccccagagatcagccatggagtggtggcccacatgtctgacagctaccagtatggagaggaggtgacctacaagtgctttgagggctttggaattgatggccctgccatcgccaagtgcctgggggagaagtggagccacccccccagctgcatcaagacagactgcctgagcctgcccagctttgaaaatgccatccccatgggagagaagaaggatgtgtacaaggccggggagcaggtgacctacacctgtgccacctactacaagatggatggagccagcaatgtgacctgcatcaacagccgctggacaggccggcccacctgccgggacaccagctgtgtgaaccccccaacagtgcagaatgcctacatcgtgtcccggcagatgagcaagtaccccagcggggagcgggtgcgctaccagtgccgcagcccctatgagatgtttggagatgaggaggtgatgtgcctgaatggaaactggacagagcccccccagtgcaaggacagcactggaaaatgtggccccccaccacccatcgacaatggagacatcaccagcttccccctgtctgtgtatgccccagccagctctgtggagtaccagtgccagaacctgtaccagctggagggcaacaagaggatcacctgcagaaatggccagtggagcgagccccccaagtgcctgcacccctgtgtgatcagccgggagatcatggagaactacaacatcgccctgcgctggacagccaagcagaagctgtacagcaggactggagagagcgtggagtttgtgtgcaagaggggctaccgcctgagcagccgcagccacaccctgcggaccacctgctgggatggcaagctggagtaccccacctgtgccaagaggtag

SEQ ID NO: 3069 - DNA, 1350 bp, synthetic construct
  misc_feature 1..1350: note = source = /note="Description of Artificial Sequence: Synthetic coding sequence"
  source 1..1350: mol_type = other DNA
atgaggctgctggccaagatcatctgcctgatgctgtgggccatctgtgtggccgaggactgcaatgagctgcccccaagaagaaacacagagatcctgaccggctcctggagcgaccagacctacccagagggcacccaggccatctacaagtgccggcccggctaccgcagcctgggcaatgtcatcatggtgtgcaggaagggggagtgggtggccctgaaccccctgaggaagtgccagaagaggccctgtggccaccctggggacaccccatttggcaccttcaccctgactggaggaaatgtgtttgaatatggagtgaaggctgtgtacacctgcaatgaaggctaccagctgctgggggagatcaactaccgggagtgtgacacagatggctggaccaatgacatccccatctgtgaggtggtgaagtgcctgcctgtgacagccccagaaaatggcaagatcgtgagcagcgccatggagccagaccgggagtaccacttcggccaggccgtgcgctttgtgtgcaacagcggctacaagattgaaggagatgaggagatgcactgcagtgatgatggcttctggagcaaggagaagcccaagtgtgtggagatcagctgcaagagcccagatgtgatcaatggcagccccatcagccagaagatcatctacaaggaaaatgaacgcttccagtacaagtgcaacatgggctatgagtacagcgagagaggagatgctgtgtgcacagagagcggctggaggcccctgcccagctgtgaggagaagagctgtgacaacccctacatccccaacggggactacagccccctgcgcatcaagcacaggactggagatgagatcacctaccagtgcagaaatggcttctacccagccacccggggcaacacagccaagtgcaccagcacaggctggatcccagccccccgctgcaccctgaagccctgtgactacccagacatcaagcacggcggcctgtaccacgagaacatgagaagaccctacttccctgtggccgtgggcaagtactacagctactactgtgatgagcactttgagaccccatctggcagctactgggaccacatccactgcacccaggacggctggagccctgctgtgccctgcctgaggaagtgctacttcccctacctggagaatggctacaaccagaaccacggcaggaagtttgtgcagggcaagagcattgatgtggcctgccaccctggctacgccctgcccaaggcccagaccaccgtgacctgcatggagaatggctggagccccaccccccgctgcatccgggtcatcttccagctgtag

SEQ ID NO: 3070 - DNA, 1350 bp, synthetic construct
  misc_feature 1..1350: note = source = /note="Description of Artificial Sequence: Synthetic coding sequence"
  source 1..1350: mol_type = other DNA
atgaggctgctggccaagatcatctgcctgatgctgtgggccatctgtgtggccgaggactgcaatgagctgcccccaagaagaaacacagagatcctgaccggctcctggagcgaccagacctacccagagggcacccaggccatctacaagtgccggcccggctaccgcagcctgggcaatgtcatcatggtgtgcaggaagggggagtgggtggccctgaaccccctgaggaagtgccagaagaggccctgtggccaccctggggacaccccatttggcaccttcaccctgactggaggaaatgtgtttgaatatggagtgaaggctgtgtacacctgcaatgaaggctaccagctgctgggggagatcaactaccgggagtgtgacacagatggctggaccaatgacatccccatctgtgaggtggtgaagtgcctgcctgtgacagccccagaaaatggcaagatcgtgagcagcgccatggagccagaccgggagtaccacttcggccaggccgtgcgctttgtgtgcaacagcggctacaagattgaaggagatgaggagatgcactgcagtgatgatggcttctggagcaaggagaagcccaagtgtgtggagatcagctgcaagagcccagatgtgatcaatggcagccccatcagccagaagatcatctacaaggaaaatgaacgcttccagtacaagtgcaacatgggctatgagtacagcgagagaggagatgctgtgtgcacagagagcggctggaggcccctgcccagctgtgaggagaagagctgtgacaacccctacatccccaacggggactacagccccctgcgcatcaagcacaggactggagatgagatcacctaccagtgcagaaatggcttctacccagccacccggggcaacacagccaagtgcaccagcacaggctggatcccagccccccgctgcaccctgaagccctgtgactacccagacatcaagcacggcggcctgtaccacgagaacatgagaagaccctacttccctgtggccgtgggcaagtactacagctactactgtgatgagcactttgagaccccatctggcagctactgggaccacatccactgcacccaggacggctggagccctgctgtgccctgcctgaggaagtgctacttcccctacctggagaatggctacaaccagaaccacggcaggaagtttgtgcagggcaagagcattgatgtggcctgccaccctggctacgccctgcccaaggcccagaccaccgtgacctgcatggagaatggctggagccccaccccccgctgcatccgggtgtccttcaccctgtag

SEQ ID NO: 3071 - DNA, 573 bp, synthetic construct
  misc_feature 1..573: note = source = /note="Description of Artificial Sequence: Synthetic coding sequence"
  source 1..573: mol_type = other DNA
atggctgctggggagctggagggcggcaagcccctgagcggcctgctgaatgccctggcccaggacaccttccacggctacccaggcatcacagaggagctgctgcggagccagctgtacccagaggtgcccccagaggagttccggcccttcctggccaagatgaggggcatcctgaagagcatcgccagcgctgacatggacttcaaccagctggaggccttcctgacagcccagaccaagaagcagggcggcatcaccagtgaccaggccgccgtcatcagcaagttctggaagagccacaagaccaagatccgggagagcctgatgaaccagagccgctggaacagcggcctgcggggcctgtcctggagggtggatggcaagagccagagccgccacagcgcccagatccacacccctgtggccatcatcgagctggagctgggcaagtatggccaggagagcgagttcctgtgcctggagtttgatgaggtgaaggtgaaccagatcctgaagaccctgtctgaggtggaggagagcatcagcaccctcatcagccagcccaactag

SEQ ID NO: 3072 - DNA, 117 bp, synthetic construct
  misc_feature 1..117: note = source = /note="Description of Artificial Sequence: Synthetic coding sequence"
  source 1..117: mol_type = other DNA
tgacaggagagcgagttcctgtgcctggagtttgatgaggtgaaggtgaaccagatcctgaagaccctgtctgaggtggaggagagcatcagcaccctcatcagccagcccaactag

SEQ ID NO: 3073 - DNA, 99 bp, synthetic construct
  misc_feature 1..99: note = source = /note="Description of Artificial Sequence: Synthetic coding sequence"
  source 1..99: mol_type = other DNA
tgatgcctggagtttgatgaggtgaaggtgaaccagatcctgaagaccctgtctgaggtggaggagagcatcagcaccctcatcagccagcccaactag

SEQ ID NO: 3074 - DNA, 117 bp, synthetic construct; identical to SEQ ID NO: 3072
  misc_feature 1..117: note = source = /note="Description of Artificial Sequence: Synthetic coding sequence"
  source 1..117: mol_type = other DNA

SEQ ID NO: 3075 - DNA, 480 bp, synthetic construct
  misc_feature 1..480: note = source = /note="Description of Artificial Sequence: Synthetic coding sequence"
  source 1..480: mol_type = other DNA
atggctgctggggagctggagggcggcaagcccctgagcggcctgctgaatgccctggcccaggacaccttccacggctacccaggcatcacagaggagctgctgcggagccagctgtacccagaggtgcccccagaggagttccggcccttcctggccaagatgaggggcatcctgaagagcatcgccagcgctgacatggacttcaaccagctggaggccttcctgacagcccagaccaagaagcagggcggcatcaccagtgaccaggccgccgtcatcagcaagttctggaagagccacaagaccaagatccgggagagcctgatgaaccagagccgctggaacagcggcctgcggggcctgtcctggagggtggatggcaagagccagagccgccacagcgcccagatccacacccctgtggccatcatcgagctggagctgggcaagtatggccaggtgcactgcaaccagtag

SEQ ID NO: 3076 - DNA, 591 bp, synthetic construct
  misc_feature 1..591: note = source = /note="Description of Artificial Sequence: Synthetic coding sequence"
  source 1..591: mol_type = other DNA
atgaggctgcccctgctggtgtctgctggggtgctgctggtggccctgctgccctgccccccctgccgggccctgctgagccggggccctgtgcctggggcccggcaggccccccagcacccccagcccctggacttcttccagcccccaccccagagcgagcagccccagcagccccaggcccggcctgtgctgctgaggatgggagaggagtacttcctgcggctgggcaacctgaacaagagccctgctgcccccctgagccctgccagcagcctgctggccggcggcagcggcagccggcccagccctgagcaggccacagccaacttcttccgggtgctgctgcagcagctgctgctgcccaggaggagcctggacagccctgctgccctggccgagcggggggccagaaatgccctgggcggccaccaggaggcccctgagcgggagcggcgctctgaggagccccccatcagcctggacctgaccttccacctgctgcgggaggtgctggagatggcccgggcagagcagctggcccagcaggcccacagcaacaggaagctgatggagatcatcggcaagtag

SEQ ID NO: 3077 - DNA, 4443 bp, synthetic construct
  misc_feature 1..4443: note = source = /note="Description of Artificial Sequence: Synthetic coding sequence"
  source 1..4443: mol_type = other DNA
atgcagaggagccccctggagaaggcctctgtggtgtccaagctgttcttctcctggacccggcccatcctgaggaagggctaccggcagaggctggagctgagtgacatctaccagatccccagcgtggacagcgctgacaacctgtctgagaagctggagcgggagtgggaccgggagctggccagcaagaagaaccccaagctgatcaatgccctgcggcgctgcttcttctggaggttcatgttctacggcatcttcctgtacctgggggaggtgaccaaggctgtgcagcccctgctgctgggccgcatcatcgccagctatgaccctgacaacaaggaggagaggagcatcgccatctacctgggcatcggcctgtgcctgctcttcatcgtgaggaccctgctgctgcacccagccatcttcggcctgcaccacatcggcatgcagatgagaattgccatgttcagcctcatctacaagaagaccctgaagctgagcagccgggtgctggacaagatcagcatcggccagctggtgtccctgctgagcaacaacctgaacaagtttgatgagggcctggccctggcccactttgtgtggatcgcccccctgcaggtggccctgctgatgggcctcatctgggagctgctgcaggccagcgccttctgtggcctgggcttcctgattgtgctggccctcttccaggccggcctgggccgcatgatgatgaagtacagagaccagagagctgggaagatcagcgagcggctggtgatcaccagcgagatgattgagaacatccagagcgtgaaggcctactgctgggaggaggccatggagaagatgattgagaacctgcggcagacagagctgaagctgaccaggaaggccgcctacgtgcgctacttcaacagcagcgccttcttcttcagcggcttctttgtggtgttcctgtctgtgctgccctatgccctgatcaagggcatcatcctgaggaagatcttcaccaccatctccttctgcatcgtgctgaggatggctgtgacccggcagttcccctgggccgtgcagacctggtatgacagcctgggcgccatcaacaagatccaggacttcctgcagaagcaggagtacaagaccctggagtacaacctgaccaccacagaggtggtgatggagaatgtgacagccttctgggaggagggctttggagagctgtttgagaaggccaagcagaacaacaacaacaggaagaccagcaatggagatgacagcctcttcttcagcaacttcagcctgctgggcacccctgtgctgaaggacatcaacttcaagattgaaagaggccagctgctggccgtggccggcagcactggagctgggaagaccagcctgctgatggtgatcatgggagagctggagcccagcgagggcaagatcaagcacagcggccgcatctccttctgcagccagttctcctggatcatgcctggcaccatcaaggagaacatcatcttcggcgtgtcctatgatgagtaccgctacagaagtgtcatcaaggcctgccagctggaggaggacatcagcaagtttgctgagaaggacaacatcgtgctgggggagggcggcatcaccctgagcggcggccagagggcccgcatcagcctggcccgggctgtgtacaaggatgctgacctgtacctgctggacagccccttcggctacctggatgtgctgacagagaaggagatctttgagagctgtgtgtgcaagctgatggccaacaagacccgcatcctggtgaccagcaagatggagcacctgaagaaggctgacaagatcctgatcctgcacgagggcagcagctacttctacggcaccttcagcgagctgcagaacctgcagcctgacttcagcagcaagctgatgggctgtgacagctttgaccagttctctgctgagaggaggaacagcatcctgacagagaccctgcaccgcttcagcctggagggagatgcccctgtgtcctggacagagaccaagaagcagagcttcaagcagacaggagaatttggagagaagaggaagaacagcatcctgaaccccatcaacagcatcaggaagttcagcatcgtgcagaagacccccctgcagatgaatggcatcgaggaggacagtgatgagcccctggagcggcggctgagcctggtgcctgacagcgagcagggcgaggccatcctgccccgcatcagcgtcatcagcacaggccccaccctgcaggcccggcggcggcagagcgtgctgaacctgatgacccacagcgtgaaccagggccagaacatccacaggaagaccacagccagcaccaggaaggtgtccctggccccccaggccaacctgacagagctggacatctacagccggcggctgagccaggagaccggcctggagatcagcgaggagatcaatgaggaggacctgaaggagtgcttctttgatgacatggagagcatcccagctgtgaccacctggaacacctacctgcgctacatcaccgtgcacaagagcctcatctttgtgctgatctggtgcctggtgatcttcctggccgaggtggccgccagcctggtggtgctgtggctgctgggcaacacccccctgcaggacaagggcaacagcacccacagcaggaacaacagctatgctgtgatcatcaccagcaccagcagctactacgtgttctacatctacgtgggcgtggccgacaccctgctggccatgggcttcttccggggcctgcccctggtgcacaccctcatcaccgtgtccaagatcctgcaccacaagatgctgcacagcgtgctgcaggcccccatgagcaccctgaacaccctgaaggccggcggcatcctgaaccgcttcagcaaggacatcgccatcctggatgacctgctgcccctgaccatctttgacttcatccagctgctgctgattgtcatcggggccatcgctgtggtggccgtgctgcagccctacatctttgtggccaccgtgcctgtgattgtggccttcatcatgctgcgggcctacttcctgcagaccagccagcagctgaagcagctggagagcgagggccgcagccccatcttcacccacctggtgaccagcctgaagggcctgtggaccctgcgggccttcggccggcagccctactttgagaccctcttccacaaggccctgaacctgcacacagccaactggttcctgtacctgagcaccctgcgctggttccagatgagaattgagatgatctttgtgatcttcttcatcgctgtgaccttcatcagcatcctgaccaccggggagggggagggccgggtgggcatcatcctgaccctggccatgaacatcatgagcaccctgcagtgggccgtgaacagcagcattgatgtggacagcctgatgaggtctgtgtccagggtcttcaagttcatcgacatgcccacagagggcaagcccaccaagagcaccaagccctacaagaatggccagctgagcaaggtgatgatcatcgagaacagccacgtgaagaaggatgacatctggcccagcggcggccagatgacagtgaaggacctgacagccaagtacacagagggcggcaatgccatcctggagaacatctccttcagcatcagccctggccagagggtgggcctgctgggccgcacaggcagcggcaagagcaccctgctgagcgccttcctgcggctgctgaacacagaaggagagatccagattgatggagtgtcctgggacagcatcaccctgcagcagtggaggaaggccttcggggtcatcccccagaaggtgttcatcttcagcggcaccttcaggaagaacctggacccctatgagcagtggagcgaccaggagatctggaaggtggctgatgaggtgggcctgcggagcgtcatcgagcagtttcctgggaagctggactttgtgctggtggatggcggctgtgtgctgagccacggccacaagcagctgatgtgcctggcccggtctgtgctgagcaaggccaagatcctgctgctggatgagcccagcgcccacctggaccctgtgacctaccagatcatccggaggaccctgaagcaggcctttgctgactgcaccgtcatcctgtgtgagcaccgcatcgaggccatgctggagtgccagcagttcctggtgattgaggagaacaaggtgcggcagtatgacagcatccagaagctgctgaatgaaagaagcctcttccggcaggccatcagccccagcgacagagtgaagctgttcccccacaggaacagcagcaagtgcaagagcaagccccagattgctgccctgaaggaggagacagaggaggaggtgcaggacacccggctgtag

SEQ ID NO: 3078 - DNA, 4317 bp, synthetic construct
  misc_feature 1..4317: note = source = /note="Description of Artificial Sequence: Synthetic coding sequence"
  source 1..4317: mol_type = other DNA
atgcagaggagccccctggagaaggcctctgtggtgtccaagctgttcttctcctggacccggcccatcctgaggaagggctaccggcagaggctggagctgagtgacatctaccagatccccagcgtggacagcgctgacaacctgtctgagaagctggagcgggagtgggaccgggagctggccagcaagaagaaccccaagctgatcaatgccctgcggcgctgcttcttctggaggttcatgttctacggcatcttcctgtacctgggggaggtgaccaaggctgtgcagcccctgctgctgggccgcatcatcgccagctatgaccctgacaacaaggaggagaggagcatcgccatctacctgggcatcggcctgtgcctgctcttcatcgtgaggaccctgctgctgcacccagccatcttcggcctgcaccacatcggcatgcagatgagaattgccatgttcagcctcatctacaagaagggcctggccctggcccactttgtgtggatcgcccccctgcaggtggccctgctgatgggcctcatctgggagctgctgcaggccagcgccttctgtggcctgggcttcctgattgtgctggccctcttccaggccggcctgggccgcatgatgatgaagtacagagaccagagagctgggaagatcagcgagcggctggtgatcaccagcgagatgattgagaacatccagagcgtgaaggcctactgctgggaggaggccatggagaagatgattgagaacctgcggcagacagagctgaagctgaccaggaaggccgcctacgtgcgctacttcaacagcagcgccttcttcttcagcggcttctttgtggtgttcctgtctgtgctgccctatgccctgatcaagggcatcatcctgaggaagatcttcaccaccatctccttctgcatcgtgctgaggatggctgtgacccggcagttcccctgggccgtgcagacctggtatgacagcctgggcgccatcaacaagatccaggacttcctgcagaagcaggagtacaagaccctggagtacaacctgaccaccacagaggtggtgatggagaatgtgacagccttctgggaggagggctttggagagctgtttgagaaggccaagcagaacaacaacaacaggaagaccagcaatggagatgacagcctcttcttcagcaacttcagcctgctgggcacccctgtgctgaaggacatcaacttcaagattgaaagaggccagctgctggccgtggccggcagcactggagctgggaagaccagcctgctgatggtgatcatgggagagctggagcccagcgagggcaagatcaagcacagcggccgcatctccttctgcagccagttctcctggatcatgcctggcaccatcaaggagaacatcatcttcggcgtgtcctatgatgagtaccgctacagaagtgtcatcaaggcctgccagctggaggaggacatcagcaagtttgctgagaaggacaacatcgtgctgggggagggcggcatcaccctgagcggcggccagagggcccgcatcagcctggcccgggctgtgtacaaggatgctgacctgtacctgctggacagccccttcggctacctggatgtgctgacagagaaggagatctttgagagctgtgtgtgcaagctgatggccaacaagacccgcatcctggtgaccagcaagatggagcacctgaagaaggctgacaagatcctgatcctgcacgagggcagcagctacttctacggcaccttcagcgagctgcagaacctgcagcctgacttcagcagcaagctgatgggctgtgacagctttgaccagttctctgctgagaggaggaacagcatcctgacagagaccctgcaccgcttcagcctggagggagatgcccctgtgtcctggacagagaccaagaagcagagcttcaagcagacaggagaatttggagagaagaggaagaacagcatcctgaaccccatcaacagcatcaggaagttcagcatcgtgcagaagacccccctgcagatgaatggcatcgaggaggacagtgatgagcccctggagcggcggctgagcctggtgcctgacagcgagcagggcgaggccatcctgccccgcatcagcgtcatcagcacaggccccaccctgcaggcccggcggcggcagagcgtgctgaacctgatgacccacagcgtgaaccagggccagaacatccacaggaagaccacagccagcaccaggaaggtgtccctggccccccaggccaacctgacagagctggacatctacagccggcggctgagccaggagaccggcctggagatcagcgaggagatcaatgaggaggacctgaaggagtgcttctttgatgacatggagagcatcccagctgtgaccacctggaacacctacctgcgctacatcaccgtgcacaagagcctcatctttgtgctgatctggtgcctggtgatcttcctggccgaggtggccgccagcctggtggtgctgtggctgctgggcaacacccccctgcaggacaagggcaacagcacccacagcaggaacaacagctatgctgtgatcatcaccagcaccagcagctactacgtgttctacatctacgtgggcgtggccgacaccctgctggccatgggcttcttccggggcctgcccctggtgcacaccctcatcaccgtgtccaagatcctgcaccacaagatgctgcacagcgtgctgcaggcccccatgagcaccctgaacaccctgaaggccggcggcatcctgaaccgcttcagcaaggacatcgccatcctggatgacctgctgcccctgaccatctttgacttcatccagctgctgctgattgtcatcggggccatcgctgtggtggccgtgctgcagccctacatctttgtggccaccgtgcctgtgattgtggccttcatcatgctgcgggcctacttcctgcagaccagccagcagctgaagcagctggagagcgagggccgcagccccatcttcacccacctggtgaccagcctgaagggcctgtggaccctgcgggccttcggccggcagccctactttgagaccctcttccacaaggccctgaacctgcacacagccaactggttcctgtacctgagcaccctgcgctggttccagatgagaattgagatgatctttgtgatcttcttcatcgctgtgaccttcatcagcatcctgaccaccggggagggggagggccgggtgggcatcatcctgaccctggccatgaacatcatgagcaccctgcagtgggccgtgaacagcagcattgatgtggacagcctgatgaggtctgtgtccagggtcttcaagttcatcgacatgcccacagagggcaagcccaccaagagcaccaagccctacaagaatggccagctgagcaaggtgatgatcatcgagaacagccacgtgaagaaggatgacatctggcccagcggcggccagatgacagtgaaggacctgacagccaagtacacagagggcggcaatgccatcctggagaacatctccttcagcatcagccctggccagagggtgggcctgctgggccgcacaggcagcggcaagagcaccctgctgagcgccttcctgcggctgctgaacacagaaggagagatccagattgatggagtgtcctgggacagcatcaccctgcagcagtggaggaaggccttcggggtcatcccccagaaggtgttcatcttcagcggcaccttcaggaagaacctggacccctatgagcagtggagcgaccaggagatctggaaggtggctgatgaggtgggcctgcggagcgtcatcgagcagtttcctgggaagctggactttgtgctggtggatggcggctgtgtgctgagccacggccacaagcagctgatgtgcctggcccggtctgtgctgagcaaggccaagatcctgctgctggatgagcccagcgcccacctggaccctgtgacctaccagatcatccggaggaccctgaagcaggcctttgctgactgcaccgtcatcctgtgtgagcaccgcatcgaggccatgctggagtgccagcagttcctggtgattgaggagaacaaggtgcggcagtatgacagcatccagaagctgctgaatgaaagaagcctcttccggcaggccatcagccccagcgacagagtgaagctgttcccccacaggaacagcagcaagtgcaagagcaagccccagattgctgccctgaagtag

SEQ ID NO: 3079 - DNA, 4260 bp, synthetic construct
  misc_feature 1..4260: note = source = /note="Description of Artificial Sequence: Synthetic coding sequence"
  source 1..4260: mol_type = other DNA
atgcagaggagccccctggagaaggcctctgtggtgtccaagctgttcttctcctggacccggcccatcctgaggaagggctaccggcagaggctggagctgagtgacatctaccagatccccagcgtggacagcgctgacaacctgtctgagaagctggagcgggagtgggaccgggagctggccagcaagaagaaccccaagctgatcaatgccctgcggcgctgcttcttctggaggttcatgttctacggcatcttcctgtacctgggggaggtgaccaaggctgtgcagcccctgctgctgggccgcatcatcgccagctatgaccctgacaacaaggaggagaggagcatcgccatctacctgggcatcggcctgtgcctgctcttcatcgtgaggaccctgctgctgcacccagccatcttcggcctgcaccacatcggcatgcagatgagaattgccatgttcagcctcatctacaagaagaccctgaagctgagcagccgggtgctggacaagatcagcatcggccagctggtgtccctgctgagcaacaacctgaacaagtttgatgagggcctggccctggcccactttgtgtggatcgcccccctgcaggtggccctgctgatgggcctcatctgggagctgctgcaggccagcgccttctgtggcctgggcttcctgattgtgctggccctcttccaggccggcctgggccgcatgatgatgaagtacagagaccagagagctgggaagatcagcgagcggctggtgatcaccagcgagatgattgagaacatccagagcgtgaaggcctactgctgggaggaggccatggagaagatgattgagaacctgcggcagacagagctgaagctgaccaggaaggccgcctacgtgcgctacttcaacagcagcgccttcttcttcagcggcttctttgtggtgttcctgtctgtgctgccctatgccctgatcaagggcatcatcctgaggaagatcttcaccaccatctccttctgcatcgtgctgaggatggctgtgacccggcagttcccctgggccgtgcagacctggtatgacagcctgggcgccatcaacaagatccaggacttcctgcagaagcaggagtacaagaccctggagtacaacctgaccaccacagaggtggtgatggagaatgtgacagccttctgggaggagaccagcctgctgatggtgatcatgggagagctggagcccagcgagggcaagatcaagcacagcggccgcatctccttctgcagccagttctcctggatcatgcctggcaccatcaaggagaacatcatctttggagtgtcctatgatgagtaccgctaccgcagcgtcatcaaggcctgccagctggaggaggacatcagcaagtttgctgagaaggacaacatcgtgctgggggagggcggcatcaccctgagcggcggccagagggcccgcatcagcctggcccgggctgtgtacaaggatgctgacctgtacctgctggacagccccttcggctacctggatgtgctgacagagaaggagatctttgagagctgtgtgtgcaagctgatggccaacaagacccgcatcctggtgaccagcaagatggagcacctgaagaaggctgacaagatcctgatcctgcacgagggcagcagctacttctacggcaccttcagcgagctgcagaacctgcagcctgacttcagcagcaagctgatgggctgtgacagctttgaccagttctctgctgagaggagaaattccatcctgacagagaccctgcaccgcttcagcctggagggagatgcccctgtgtcctggacagagaccaagaagcagagcttcaagcagacaggagaatttggagagaagaggaagaacagcatcctgaaccccatcaacagcatcaggaagttcagcatcgtgcagaagacccccctgcagatgaatggaattgaagaagattctgatgagcccctggagcggcggctgagcctggtgcctgattctgagcagggcgaggccatcctgccccgcatcagcgtcatcagcacaggccccaccctgcaggcccggcggcggcagagcgtgctgaacctgatgacccacagcgtgaaccagggccagaacatccacaggaagaccacagccagcaccaggaaggtgtccctggccccccaggccaacctgacagagctggacatctacagccggcggctgagccaggagaccggcctggagatcagcgaggagatcaatgaggaggacctgaaggagtgcttctttgatgacatggagagcatcccagctgtgaccacctggaacacctacctgcgctacatcaccgtgcacaagagcctcatctttgtgctgatctggtgcctggtgatcttcctggccgaggtggccgccagcctggtggtgctgtggctgctgggcaacacccccctgcaggacaagggcaacagcacccacagcaggaacaacagctatgctgtgatcatcaccagcaccagcagctactacgtgttctacatctacgtgggcgtggccgacaccctgctggccatgggcttcttccggggcctgcccctggtgcacaccctcatcaccgtgtccaagatcctgcaccacaagatgctgcacagcgtgctgcaggcccccatgagcaccctgaacaccctgaaggccggcggcatcctgaaccgcttcagcaaggacatcgccatcctggatgacctgctgcccctgaccatctttgacttcatccagctgctgctgattgtgattggagccatcgctgtggtggccgtgctgcagccctacatctttgtggccaccgtgcctgtgattgtggccttcatcatgctgcgggcctacttcctgcagaccagccagcagctgaagcagctggagagcgagggccgcagccccatcttcacccacctggtgaccagcctgaagggcctgtggaccctgcgggccttcggccggcagccctactttgagaccctcttccacaaggccctgaacctgcacacagccaactggttcctgtacctgagcaccctgcgctggttccagatgagaattgagatgatcttcgtcatcttcttcatcgctgtgaccttcatcagcatcctgaccactggagagggggagggccgggtgggcatcatcctgaccctggccatgaacatcatgagcaccctgcagtgggccgtgaacagcagcattgatgtggacagcctgatgaggtctgtgtccagggtcttcaagttcatcgacatgcccacagagggcaagcccaccaagagcaccaagccctacaagaatggccagctgagcaaggtgatgatcatcgagaacagccacgtgaagaaggatgacatctggcccagcggcggccagatgacagtgaaggacctgacagccaagtacacagaaggaggaaatgccatcctggagaacatctccttcagcatcagccctggccagagggtgggcctgctgggccgcactggaagtggcaagagcaccctgctgagcgccttcctgcggctgctgaacacagaaggagagatccagattgatggagtgtcctgggacagcatcaccctgcagcagtggaggaaggcctttggagtcatcccccagaaggtgttcatcttcagcggcaccttcaggaagaacctggacccctatgagcagtggagcgaccaggagatctggaaggtggctgatgaggtgggcctgcggtctgtgattgagcagtttcctgggaagctggactttgtgctggtggatggcggctgtgtgctgagccacggccacaagcagctgatgtgcctggcccggtctgtgctgagcaaggccaagatcctgctgctggatgagcccagcgcccacctggaccctgtgacctaccagatcatccggaggaccctgaagcaggcctttgctgactgcaccgtcatcctgtgtgagcacagaattgaggccatgctggagtgccagcagttcctggtgattgaggagaacaaggtgcggcagtatgacagcatccagaagctgctgaatgaaagaagcctcttccggcaggccatcagccccagcgacagagtgaagctgttcccccacaggaacagcagcaagtgcaagagcaagccccagattgctgccctgaaggaggagacagaggaggaggtgcaggacacccggctgtag

SEQ ID NO: 3080 - DNA, 573 bp, synthetic construct
  misc_feature 1..573: note = source = /note="Description of Artificial Sequence: Synthetic coding sequence"
  source 1..573: mol_type = other DNA
tgaaaaggcctgtggaccctgcgggccttcggccggcagccctactttgagaccctcttccacaaggccctgaacctgcacacagccaactggttcctgtacctgagcaccctgcgctggttccagatgagaattgagatgatctttgtgatcttcttcatcgctgtgaccttcatcagcatcctgaccaccggggagggggagggccgggtgggcatcatcctgaccctggccatgaacatcatgagcaccctgcagtgggccgtgaacagcagcattgatgtggacagcctgatgaggtctgtgtccagggtcttcaagttcatcgacatgcccacagagggcaagcccaccaagagcaccaagccctacaagaatggccagctgagcaaggtgatgatcatcgagaacagccacgtgaagaaggatgacatctggcccagcggcggccagatgacagtgaaggacctgacagccaagtacacagagggcggcaatgccatcctggagaacatctccttcagcatcagccctggccagagggtgcgctttgagcactgcctgctgtgctag

SEQ ID NO: 3081 - DNA, 1203 bp, synthetic construct
  misc_feature 1..1203: note = source = /note="Description of Artificial Sequence: Synthetic coding sequence"
  source 1..1203: mol_type = other DNA
atgatccggaactggctgaccatcttcatcctcttccccctgaagctggtggagaagtgtgagagctctgtgtccctgactgtgccccctgtggtgaagctggagaatggcagcagcaccaacgtgtccctgaccctgcggccccccctgaatgccaccctggtgatcacctttgagatcaccttccgcagcaagaacatcaccatcctggagctgcctgatgaggtggtggtgcccccaggagtgaccaacagcagcttccaggtgaccagccagaatgtgggccagctgactgtgtacctgcacggcaaccacagcaaccagacaggcccccgcatccgcttcctggtgatccgcagcagcgccatcagcatcatcaaccaggtgattggctggatctactttgtggcctggagcatctccttctacccccaggtgatcatgaactggaggaggaagagcgtcatcggcctgagctttgattttgtggccctgaacctgaccggctttgtggcctacagcgtcttcaacatcggcctgctgtgggtgccctacatcaaggagcagttcctgctgaagtaccccaacggggtgaaccctgtgaacagcaatgatgtgttcttcagcctgcatgctgtggtgctgaccctcatcatcatcgtgcagtgctgcctgtatgaaagaggaggccagagggtgtcctggccagccatcggcttcctggtgctggcctggctgtttgcctttgtgaccatgattgtggccgctgtgggcgtgaccacctggctgcagttcctgttctgcttctcctacatcaagctggccgtgaccctggtgaagtacttcccccaggcctacatgaacttctactacaagagcacagagggctggagcattggaaatgtgctgctggacttcaccggcggcagcttcagcctgctgcagatgttcctgcagagctacaacaatgaccagtggaccctcatctttggagaccccaccaagtttggcctgggcgtcttcagcatcgtgtttgatgtggtgttcttcatccagcacttctgcctgtacaggaagaggcctggcctgcaggccgccaggacaggcagcggcagccggctgcggcaggactgggcccccagcctgcagcccaaggccctgccccagaccacctctgtgtctgccagcagcctgaagggctag

SEQ ID NO: 3082 - DNA, 1104 bp, synthetic construct
  misc_feature 1..1104: note = source = /note="Description of Artificial Sequence: Synthetic coding sequence"
  source 1..1104: mol_type = other DNA
atgatccggaactggctgaccatcttcatcctcttccccctgaagctggtggagaagtgtgagagctctgtgtccctgactgtgccccctgtggtgaagctggagaatggcagcagcaccaacgtgtccctgaccctgcggccccccctgaatgccaccctggtgatcacctttgagatcaccttccgcagcaagaacatcaccatcctggagctgcctgatgaggtggtggtgcccccaggagtgaccaacagcagcttccaggtgaccagccagaatgtgggccagctgactgtgtacctgcacggcaaccacagcaaccagacaggcccccgcatccgcttcctggtgatccgcagcagcgccatcagcatcatcaaccaggtgattggctggatctactttgtggcctggagcatctccttctacccccaggtgatcatgaactggaggaggaagagcgtcatcggcctgagctttgattttgtggccctgaacctgaccggctttgtggcctacagcgtcttcaacatcggcctgctgtgggtgccctacatcaaggagcagttcctgctgaagtaccccaacggggtgaaccctgtgaacagcaatgatgtgttcttcagcctgcatgctgtggtgctgaccctcatcatcatcgtgcagtgctgcctgtatgaaagaggaggccagagggtgtcctggccagccatcggcttcctggtgctggcctggctgtttgcctttgtgaccatgattgtggccgctgtgggcgtgaccacctggctgcagttcctgttctgcttctcctacatcaagctggccgtgaccctggtgaagtacttcccccaggcctacatgaacttctactacaagagcacagagggctggagcattggaaatgtgctgctggacttcaccggcggcagcttcagcctgctgcagatgttcctgcagagctacaacaatgaccagtggaccctcatctttggagaccccaccaagtttggcctgggcgtcttcagcatcgtgtttgatgtggtgttcttcatccagcacttctgcctgtacaggaagaggcctggctatgaccagctgaactag

SEQ ID NO: 3083 - DNA, 663 bp, synthetic construct
  misc_feature 1..663: note = source = /note="Description of Artificial Sequence: Synthetic coding sequence"
  source 1..663: mol_type = other DNA
atgaactggaggaggaagtctgtgattggcctgagctttgattttgtggccctgaacctgactggatttgtggcctacagcgtcttcaacatcggcctgctgtgggtgccctacatcaaggagcagttcctgctgaagtacccaaatggagtgaaccctgtgaacagcaatgatgtgttcttcagcctgcatgctgtggtgctgaccctcatcatcatcgtgcagtgctgcctgtatgagcggggcggccagagggtgtcctggccagccatcggcttcctggtgctggcctggctgtttgcctttgtgaccatgattgtggccgctgtgggcgtgaccacctggctgcagttcctgttctgcttctcctacatcaagctggccgtgaccctggtgaagtacttcccccaggcctacatgaacttctactacaagagcacagagggctggagcattggaaatgtgctgctggacttcaccggcggcagcttcagcctgctgcagatgttcctgcagagctacaacaatgaccagtggaccctcatctttggagaccccaccaagtttggcctgggcgtcttcagcatcgtgtttgatgtggtgttcttcatccagcacttctgcctgtacaggaagaggcctggctatgaccagctgaactag

SEQ ID NO: 3084 - DNA, 879 bp, synthetic construct
  misc_feature 1..879: note = source = /note="Description of Artificial Sequence: Synthetic coding sequence"
  source 1..879: mol_type = other DNA
atgtgcccccgcatccgcttcctggtgatccgcagcagcgccatcagcatcatcaaccaggtgattggctggatctactttgtggcctggagcatctccttctacccccaggtgatcatgaactggaggaggaagagcgtcatcggcctgagctttgattttgtggccctgaacctgaccggctttgtggcctacagcgtcttcaacatcggcctgctgtgggtgccctacatcaaggagcagttcctgctgaagtaccccaacggggtgaaccctgtgaacagcaatgatgtgttcttcagcctgcatgctgtggtgctgaccctcatcatcatcgtgcagtgctgcctgtatgaaagaggaggccagagggtgtcctggccagccatcggcttcctggtgctggcctggctgtttgcctttgtgaccatgattgtggccgctgtgggcgtgaccacctggctgcagttcctgttctgcttctcctacatcaagctggccgtgaccctggtgaagtacttcccccaggcctacatgaacttctactacaagagcacagagggctggagcattggaaatgtgctgctggacttcaccggcggcagcttcagcctgctgcagatgttcctgcagagctacaacaatgaccagtggaccctcatctttggagaccccaccaagtttggcctgggcgtcttcagcatcgtgtttgatgtggtgttcttcatccagcacttctgcctgtacaggaagaggcctggcctgcaggccgccaggacaggcagcggcagccggctgcggcaggactgggcccccagcctgcagcccaaggccctgccccagaccacctctgtgtctgccagcagcctgaagggctag

SEQ ID NO: 3085 - DNA, 228 bp, synthetic construct
  misc_feature 1..228: note = source = /note="Description of Artificial Sequence: Synthetic coding sequence"
  source 1..228: mol_type = other DNA
atgatccggaactggctgaccatcttcatcctcttccccctgaagctggtggagaagtgtgagagctctgtgtccctgactgtgccccctgtggtgaagctggagaatggcagcagcaccaacgtgtccctgaccctgcggccccccctgaatgccaccctggtgatcacctttgagatcaccttccgcagcaagaacatcaccatcctggagctgcctgatgaatag

SEQ ID NO: 3086 - DNA, 204 bp, synthetic construct
  misc_feature 1..204: note = source = /note="Description of Artificial Sequence: Synthetic coding sequence"
  source 1..204: mol_type = other DNA
atgaggatccactacctgctgtttgccctgctcttcctgttcctggtgcctgtgcccggccatggaggcatcatcaacaccctgcagaagtactactgccgggtgcggggcggccgctgtgctgtgctgagctgcctgcccaaggaggagcagatcggcaagtgcagcacccggggcaggaagtgctgcaggaggaagaagtag

SEQ ID NO: 3087 - DNA, 204 bp, synthetic construct; identical to SEQ ID NO: 3086
  misc_feature 1..204: note = source = /note="Description of Artificial Sequence: Synthetic coding sequence"
  source 1..204: mol_type = other DNA

SEQ ID NO: 3088 - DNA, 195 bp, synthetic construct
  misc_feature 1..195: note = source = /note="Description of Artificial Sequence: Synthetic coding sequence"
  source 1..195: mol_type = other DNA
atgagggtgctgtacctgctcttctccttcctgttcatcttcctgatgcccctgcccggggtgtttggaggcattggagaccctgtgacctgcctgaagagcggggccatctgccaccctgtgttctgcccccggcgctacaagcagatcggcacctgtggcctgcccggcaccaagtgctgcaagaagccctag

SEQ ID NO: 3089 - DNA, 195 bp, synthetic construct; identical to SEQ ID NO: 3088
  misc_feature 1..195: note = source = /note="Description of Artificial Sequence: Synthetic coding sequence"
  source 1..195: mol_type = other DNA

SEQ ID NO: 3090 - DNA, 849 bp, synthetic construct
  misc_feature 1..849: note = source = /note="Description of Artificial Sequence: Synthetic coding sequence"
  source 1..849: mol_type = other DNA
atgaggggcatgaagctgctgggcgccctgctggccctggccgccctgctgcagggcgctgtgtccctgaagattgctgccttcaacatccagacctttggagagaccaagatgagcaatgccaccctggtgtcctacatcgtgcagatcctgagccgctatgacatcgccctggtgcaggaggtgcgggacagccacctgacagctgtgggcaagctgctggacaacctgaaccaggatgccccagacacctaccactacgtggtgtctgagcccctgggcagaaattcctacaaggagcgctacctgtttgtgtacagaccagaccaggtgtctgctgtggacagctactactatgatgatggctgtgagccctgtggaaatgacaccttcaaccgggagcccgccatcgtgcgcttcttcagccgcttcacagaggtgcgggagtttgccatcgtgcccctgcatgctgcccctggagatgctgtggccgagattgatgccctgtatgatgtgtacctggatgtgcaggagaagtggggcctggaggatgtgatgctgatgggagacttcaatgccggctgcagctatgtgcggcccagccagtggagcagcatccggctgtggaccagccccaccttccagtggctgatcccagattctgctgacaccacagccacccccacccactgtgcctatgaccgcatcgtggtggccggcatgctgctgcggggagctgtggtgcctgattctgccctgcccttcaacttccaggccgcctacggcctgagtgaccagctggcccaggccatcagtgaccactaccctgtggaggtgatgctgaagtag

SEQ ID NO: 3091 - DNA, 849 bp, synthetic construct; identical to SEQ ID NO: 3090
  misc_feature 1..849: note = source = /note="Description of Artificial Sequence: Synthetic coding sequence"
  source 1..849: mol_type = other DNA

SEQ ID NO: 3092 - DNA, 564 bp, synthetic construct
  misc_feature 1..564: note = source = /note="Description of Artificial Sequence: Synthetic coding sequence"
  source 1..564: mol_type = other DNA
atgcaccagacccccatcaccacctggagcgtgagccactgggatggaacagccatccgcagcgccacctgcagctgcaccggcctgacccgctgcctgcgctggacagccaccaccaccatgatggccgccagccctgctggcaccacccccagcacagagagccagcccctgagcggcagcagccctggcagccaggatgtgatgctgatgggagacttcaatgccggctgcagctatgtgcggcccagccagtggagcagcatccggctgtggaccagccccaccttccagtggctgatcccagacagcgctgacaccacagccacccccacccactgtgcctatgacagaattgtggtggccggcatgctgctgcggggagctgtggtgcctgacagcgccctgcccttcaacttccaggccgcctacggcctgagtgaccagctgttctctgtgcacacctgcagcggggccggcctgggggagagacatggcctgcctgccagcgctgccctgcccagcaacacctgccgggccggcacccaccgggtgtccacctag

SEQ ID NO: 3093 - DNA, 6243 bp, synthetic construct
  misc_feature 1..6243: note = source = /note="Description of Artificial Sequence: Synthetic coding sequence"
  source 1..6243: mol_type = other DNA
atgctgcgggtcttcatcctgtatgcagaaaatgtgcacaccccagacacagacatcagtgatgcctactgcagcgctgtgtttgctggggtgaagaagaggaccaaggtgatcaagaacagcgtgaaccctgtgtggaatgaaggatttgagtgggacctgaagggcatccccctggaccagggcagcgagctgcacgtggtggtgaaggaccacgagaccatgggcaggaaccgcttcctgggggaggccaaggtgcccctgcgggaggtgctggccacccccagcctgagcgccagcttcaatgcccccctgctggacaccaagaagcagcccactggagccagcctggtgctgcaggtgtcctacacccccctgcctggagctgtgcccctcttccccccacccacccccctggagcccagccccaccctgcctgacctggatgtggtggccgacaccggcggggaggaggacacagaggaccagggcctgactggagatgaggccgagcccttcctggaccagagcggcggccctggggcccccaccacccccaggaagctgcccagccggcccccaccccactacccaggcatcaagaggaagaggtctgcccccaccagcaggaagctgctgagtgacaagccccaggacttccagatccgggtgcaggtgattgagggccggcagctgcccggggtgaacatcaagcctgtggtgaaggtgacagctgctggccagaccaagaggacccgcatccacaagggcaacagccccctcttcaatgagaccctcttcttcaacctgtttgacagccctggagagctgtttgatgagcccatcttcatcaccgtggtggacagccgcagcctgaggacagatgccctgctgggggagttcaggatggatgtgggcaccatctaccgggagcccaggcatgcctacctgaggaagtggctgctgctgagtgaccctgatgacttctctgctggggcccggggctacctgaagaccagcctgtgtgtgctgggccctggagatgaggcccccctggagaggaaggaccccagcgaggacaaggaggacatcgagagcaacctgctgcggcccaccggggtggccctgcggggggcccacttctgcctgaaggtgttccgggcagaggacctgccccagatggatgatgctgtgatggacaacgtgaagcagatcttcggctttgagagcaacaagaagaacctggtggacccctttgtggaggtgtcctttgctgggaagatgctgtgcagcaagatcctggagaagacagccaacccccagtggaaccagaacatcaccctgcctgccatgttccccagcatgtgtgagaagatgaggatccgcatcatcgactgggaccggctgacccacaatgacatcgtggccaccacctacctgtccatgagcaagatcagcgcccctggaggagaaattgaggaggagcctgctggagctgtgaagcccagcaaggccagtgacctggatgactacctgggcttcctgcccaccttcggcccctgctacatcaacctgtatggcagcccccgggagttcaccggcttcccagacccctacacagagctgaacacaggcaagggggagggcgtggcctaccggggccgcctgctgctgagcctggagaccaagctggtggagcacagcgagcagaaggtggaggacctgcctgcagatgacatcctgcgggtggagaagtacctgcggcggaggaagtacagcctgtttgctgccttctacagcgccaccatgctgcaggatgtggatgatgccatccagtttgaggtgtccatcggcaactacggcaacaagtttgacatgacctgcctgcccctggccagcaccacccagtacagcagagctgtgtttgatggctgccactactactacctgccctggggcaatgtgaagcctgtggtggtgctgagcagctactgggaggacatcagccaccgcatcgagacccagaaccagctgctgggcattgctgaccggctggaggccggcctggagcaggtgcacctggccctgaaggcccagtgcagcacagaagatgtggacagcctggtggcccagctgacagatgagctgattgctggctgcagccagcccctgggggacatccacgagacccccagcgccacccacctggaccagtacctgtaccagctgcggacccaccacctgagccagatcacagaggccgccctggccctgaagctgggccacagcgagctgcctgctgccctggagcaggccgaggactggctgctgcggctgcgggccctggccgaggagccccagaacagcctgcctgacatcgtcatctggatgctgcagggcgacaagagggtggcctaccagagggtgcctgcccaccaggtgctcttcagccggcggggggccaactactgtgggaagaactgtgggaagctgcagaccatcttcctgaagtaccccatggagaaggtgcctggggccaggatgcctgtgcagatccgggtgaagctgtggtttggcctgtctgtggatgagaaggagttcaaccagtttgctgagggcaagctgtctgtgtttgctgagacctatgaaaatgagaccaagctggccctggtgggcaactggggcaccaccggcctgacctaccccaagttcagtgatgtgacaggcaagatcaagctgcccaaggacagcttccggcccagcgctggctggacctgggccggggactggtttgtgtgcccagagaagaccctgctgcatgacatggatgctggccacctgagctttgtggaggaggtgtttgagaaccagacccggctgcccggcggccagtggatctacatgtctgacaactacacagatgtgaatggagagaaggtgctgcccaaggatgacattgaatgtcccctgggctggaagtgggaggatgaggagtggagcacagacctgaacagagctgtggatgagcagggctgggagtacagcatcaccatccccccagagaggaagcccaagcactgggtgcctgctgagaagatgtactacacccacagaagaagacgctgggtgcggctgcggcggcgggacctgagccagatggaggccctgaagaggcaccggcaggccgaggccgagggggagggctgggagtatgccagcctgtttggctggaagttccacctggagtacaggaagacagatgccttcagaagaagacgctggaggaggaggatggagcccctggagaagacaggccctgctgctgtgtttgccctggagggcgccctgggcggcgtgatggatgacaagtcagaagattccatgtctgtgtccaccctgagctttggagtgaaccggcccaccatcagctgcatctttgattatggcaaccgctaccacctgcgctgctacatgtaccaggcccgggacctggccgccatggacaaggacagcttcagtgacccctatgccatcgtgtccttcctgcaccagagccagaagacagtggtggtgaagaacaccctgaaccccacctgggaccagaccctcatcttctatgaaattgagatctttggagagcccgccaccgtggccgagcagcccccatccatcgtggtggagctgtatgaccatgacacctacggggctgatgagttcatgggccgctgcatctgccagcccagcctggagaggatgccccggctggcctggttccccctgacccggggcagccagcccagcggggagctgctggccagctttgagctgatccagcgggagaagccagccatccaccacatccctggctttgaggtgcaggagaccagccgcatcctggatgaaagtgaggacacagacctgccctaccccccaccccagcgggaggccaacatctacatggtgccccagaacatcaagccagccctgcagaggacagccatcgagatcctggcctggggcctgaggaacatgaagagctaccagctggccaacatcagcagccccagcctggtggtggagtgtggcggccagacagtgcagagctgtgtgatccggaacctgaggaagaaccccaactttgacatctgcaccctcttcatggaggtgatgctgccccgggaggagctgtactgcccccccatcaccgtgaaggtgattgacaaccggcagtttggaagaagacctgtggtgggccagtgcaccatccgcagcctggagagcttcctgtgtgacccctacagcgctgagagccccagcccccagggcggcccagatgatgtgtccctgctgagccctggagaagatgtgctgattgatattgatgacaaggagcccctcatccccatccaggaggaggagttcatcgactggtggagcaagttctttgccagcattggagagcgggagaagtgtggcagctacctggagaaggactttgacaccctgaaggtgtatgacacccagctggagaatgtggaggcctttgagggcctgagtgacttctgcaacaccttcaagctgtaccggggcaagacccaggaggagacagaggaccccagcgtcatcggggagttcaagggcctcttcaagatctaccccctgcctgaggaccctgccatccccatgccaccccggcagttccaccagctggccgcccagggcccccaggagtgcctggtgcgcatctacatcgtgcgggccttcggcctgcagcccaaggaccccaacgggaaatgtgacccctacatcaagatcagcatcggcaagaagtctgtgtctgaccaggacaactacatcccctgcaccctggagcctgtgtttgggaagatgtttgagctgacctgcaccctgcccctggagaaggacctgaagatcaccctgtatgactatgacctgctgagcaaggatgagaagattggagagaccgtggtggacctggagaaccggctgctgagcaagtttggagcccgctgtggcctgccccagacctactgtgtgtctggccccaaccagtggagggaccagctgcggcccagccagctgctgcacctgttctgccagcagcaccgggtgaaggcccctgtgtacagaacagacagagtgatgttccaggacaaggagtacagcattgaggagattgaagctggccgcatccccaacccccacctgggccctgtggaggagcggctggccctgcacgtgctgcagcagcagggcctggtgcctgagcacgtggagagccggcccctgtacagccccctgcagcctgacatcgagcagggcaagctgcagatgtgggtggacctcttccccaaggccctgggccggcccggcccccccttcaacatcaccccccggcgggcccggcgcttcttcctgcgctgcatcatctggaacaccagagatgtgatcctggatgacctgagcctgactggagagaagatgtctgacatctacgtgaagggctggatgattggatttgaggagcacaagcagaagacagatgtgcactaccgcagcctgggcggggagggcaacttcaactggaggttcatcttcccctttgactacctgcctgctgagcaggtgtgcaccatcgccaagaaggatgccttctggaggctggacaagacagagagcaagatcccagcccgggtggtgttccagatctgggacaatgacaagttctcctttgatgacttcctgggcagcctgcagctggacctgaacaggatgcccaagccagccaagacagccaagaagtgcagcctggaccagctggatgatgccttccaccctgagtggtttgtgtccctgtttgagcagaagacagtgaagggctggtggccctgtgtggccgaggagggggagaagaagatcctggccggcaagctggagatgaccctggagatcgtggccgagagcgagcacgaggagaggcctgctggccagggcagagatgagcccaacatgaaccccaagctggaggaccccaggaggccagacaccagcttcctgtggttcaccagcccctacaagaccatgaagttcatcctgtggaggcgcttccgctgggccatcatcctcttcatcatcctcttcatcctgctgctcttcctggccatcttcatctatgccttccccaactatgctgccatgaagctggtgaagcccttctcctag

SEQ ID NO: 3094 - DNA, 6246 bp, synthetic construct
  misc_feature 1..6246: note = source = /note="Description of Artificial Sequence: Synthetic coding sequence"
  source 1..6246: mol_type = other DNA
atgctgtgctgcctgctggtgcgggccagcaacctgcccagcgccaagaaggacagaagaagtgaccctgtggccagcctgaccttccggggcgtgaagaagaggaccaaggtgatcaagaacagcgtgaaccctgtgtggaatgaaggatttgagtgggacctgaagggcatccccctggaccagggcagcgagctgcacgtggtggtgaaggaccacgagaccatgggcaggaaccgcttcctgggggaggccaaggtgcccctgcgggaggtgctggccacccccagcctgagcgccagcttcaatgcccccctgctggacaccaagaagcagcccaccggggccagcctggtgctgcaggtgtcctacacccccctgcccggggctgtgcccctcttccccccacccacccccctggagcccagccccaccctgcctgacctggatgtggtggccgacacaggaggagaggaggacacagaggaccagggcctgactggagatgaagctgagcccttcctggaccagagcggcggccctggggcccccaccacccccaggaagctgcccagccggcccccaccccactacccaggcatcaagaggaagaggtctgcccccaccagcaggaagctgctgagtgacaagccccaggacttccagatccgggtgcaggtgattgagggccggcagctgcccggggtgaacatcaagcctgtggtgaaggtgacagctgctggccagaccaagaggacccgcatccacaagggcaacagccccctcttcaatgagaccctcttcttcaacctgtttgacagccctggagagctgtttgatgagcccatcttcatcaccgtggtggacagccgcagcctgaggacagatgccctgctgggggagttcaggatggatgtgggcaccatctaccgggagcccaggcatgcctacctgaggaagtggctgctgctgagtgaccctgatgacttctctgctggggcccggggctacctgaagaccagcctgtgtgtgctgggccctggagatgaggcccccctggagaggaaggaccccagcgaggacaaggaggacatcgagagcaacctgctgcggcccactggagtggccctgcggggggcccacttctgcctgaaggtgttccgggcagaggacctgccccagatggatgatgctgtgatggacaacgtgaagcagatctttggatttgagagcaacaagaagaacctggtggacccctttgtggaggtgtcctttgctgggaagatgctgtgcagcaagatcctggagaagacagccaacccccagtggaaccagaacatcaccctgcctgccatgttccccagcatgtgtgagaagatgaggatccgcatcatcgactgggaccggctgacccacaatgacatcgtggccaccacctacctgtccatgagcaagatcagcgcccctggaggagaaattgaggaggagcctgctggagctgtgaagcccagcaaggccagtgacctggatgactacctgggcttcctgcccaccttcggcccctgctacatcaacctgtatggcagcccccgggagttcaccggcttcccagacccctacacagagctgaacacaggaaaaggagagggcgtggcctaccggggccgcctgctgctgagcctggagaccaagctggtggagcacagcgagcagaaggtggaggacctgcctgcagatgacatcctgcgggtggagaagtacctgcggcggaggaagtacagcctgtttgctgccttctacagcgccaccatgctgcaggatgtggatgatgccatccagtttgaggtgtccatcggcaactacggcaacaagtttgacatgacctgcctgcccctggccagcaccacccagtacagcagagctgtgtttgatggctgccactactactacctgccctggggcaatgtgaagcctgtggtggtgctgagcagctactgggaggacatcagccacagaattgagacccagaaccagctgctgggcattgctgaccggctggaggccggcctggagcaggtgcacctggccctgaaggcccagtgcagcacagaagatgtggacagcctggtggcccagctgacagatgagctgattgctggctgcagccagcccctgggggacatccacgagaccccatctgccacccacctggaccagtacctgtaccagctgcggacccaccacctgagccagatcacagaagctgccctggccctgaagctgggccacagcgagctgcctgctgccctggagcaggccgaggactggctgctgcggctgcgggccctggccgaggagccccagaacagcctgcctgacatcgtcatctggatgctgcagggcgacaagagggtggcctaccagagggtgcctgcccaccaggtgctcttcagcagaagaggagccaactactgcggcaagaactgtgggaagctgcagaccatcttcctgaagtaccccatggagaaggtgcctggggccaggatgcctgtgcagatccgggtgaagctgtggtttggcctgtctgtggatgagaaggagttcaaccagtttgctgagggcaagctgtctgtgtttgctgagacctatgaaaatgagaccaagctggccctggtgggcaactggggcaccaccggcctgacctaccccaagttcagtgatgtgacaggcaagatcaagctgcccaaggacagcttccggcccagcgctggctggacctgggccggggactggtttgtgtgcccagagaagaccctgctgcatgacatggatgctggccacctgagctttgtggaggaggtgtttgagaaccagacccggctgcccggcggccagtggatctacatgtctgacaactacacagatgtgaatggagagaaggtgctgcccaaggatgacatcgagtgccccctgggctggaagtgggaggatgaggagtggagcacagacctgaacagagctgtggatgagcagggctgggagtacagcatcaccatccccccagagaggaagcccaagcactgggtgcctgctgagaagatgtactacacccacagaagaagacgctgggtgcggctgcggcggcgggacctgagccagatggaggccctgaagaggcaccggcaggccgaggccgagggggagggctgggagtatgccagcctgtttggctggaagttccacctggagtacaggaagacagatgccttcagaagaagacgctggaggaggaggatggagcccctggagaagacaggccctgctgctgtgtttgccctggagggcgccctgggcggcgtgatggatgacaagtctgaggacagcatgtctgtgtccaccctgagctttggagtgaaccggcccaccatcagctgcatctttgattatggcaaccgctaccacctgcgctgctacatgtaccaggcccgggacctggccgccatggacaaggacagcttcagtgacccctatgccatcgtgtccttcctgcaccagagccagaagacagtggtggtgaagaacaccctgaaccccacctgggaccagaccctcatcttctatgaaattgagatctttggagagcccgccaccgtggccgagcagccccccagcatcgtggtggagctgtatgaccatgacacctatggagcagatgagttcatgggccgctgcatctgccagcccagcctggagaggatgccccggctggcctggttccccctgacccggggcagccagcccagcggggagctgctggccagctttgagctgatccagcgggagaagccagccatccaccacatccctggctttgaggtgcaggagaccagccgcatcctggatgaaagtgaggacacagacctgccctaccccccaccccagcgggaggccaacatctacatggtgccccagaacatcaagccagccctgcagaggacagccatcgagatcctggcctggggcctgaggaacatgaagagctaccagctggccaacatcagcagccccagcctggtggtggagtgtggcggccagacagtgcagagctgtgtgatccggaacctgaggaagaaccccaactttgacatctgcaccctcttcatggaggtgatgctgccccgggaggagctgtactgcccccccatcaccgtgaaggtgattgacaaccggcagtttggccggcggcctgtggtgggccagtgcaccatccgcagcctggagagcttcctgtgtgacccctacagcgctgagagccccagcccccagggcggcccagatgatgtgtccctgctgagccctggagaagatgtgctgattgatattgatgacaaggagcccctcatccccatccaggaggaggagttcatcgactggtggagcaagttctttgccagcatcggggagcgggagaagtgtggcagctacctggagaaggactttgacaccctgaaggtgtatgacacccagctggagaatgtggaggcctttgagggcctgagtgacttctgcaacaccttcaagctgtaccggggcaagacccaggaggagacagaggaccccagcgtgattggagagttcaagggcctcttcaagatctaccccctgcctgaagatcctgccatccccatgccaccccggcagttccaccagctggccgcccagggcccccaggagtgcctggtgcgcatctacatcgtgcgggccttcggcctgcagcccaaggaccccaatggaaaatgtgacccctacatcaagatcagcatcggcaagaagtctgtgtctgaccaggacaactacatcccctgcaccctggagcctgtgtttgggaagatgtttgagctgacctgcaccctgcccctggagaaggacctgaagatcaccctgtatgactatgacctgctgagcaaggatgagaagatcggggagaccgtggtggacctggagaaccggctgctgagcaagtttggagcccgctgtggcctgccccagacctactgtgtgtctggccccaaccagtggagggaccagctgcggcccagccagctgctgcacctgttctgccagcagcaccgggtgaaggcccctgtgtacagaacagacagagtgatgttccaggacaaggagtacagcattgaggagattgaggccggccgcatccccaacccccacctgggccctgtggaggagcggctggccctgcacgtgctgcagcagcagggcctggtgcctgagcacgtggagagccggcccctgtacagccccctgcagcctgacatcgagcagggcaagctgcagatgtgggtggacctcttccccaaggccctgggccggcccggcccccccttcaacatcaccccaagaagagcccggcgcttcttcctgcgctgcatcatctggaacaccagagatgtgatcctggatgacctgagcctgaccggggagaagatgtctgacatctacgtgaagggctggatgattggatttgaggagcacaagcagaagacagatgtgcactaccgcagcctgggcggggagggcaacttcaactggaggttcatcttcccctttgactacctgcctgctgagcaggtgtgcaccatcgccaagaaggatgccttctggaggctggacaagacagagagcaagatcccagcccgggtggtgttccagatctgggacaatgacaagttctcctttgatgacttcctgggcagcctgcagctggacctgaacaggatgcccaagccagccaagacagccaagaagtgcagcctggaccagctggatgatgccttccaccctgagtggtttgtgtccctgtttgagcagaagacagtgaagggctggtggccctgtgtggccgaggagggggagaagaagatcctggccggcaagctggagatgaccctggagatcgtggccgagagcgagcacgaggagaggcctgctggccagggcagagatgagcccaacatgaaccccaagctggaggacccccggcggccagacaccagcttcctgtggttcaccagcccctacaagaccatgaagttcatcctgtggaggcgcttccgctgggccatcatcctcttcatcatcctcttcatcctgctgctcttcctggccatcttcatctatgccttccccaactatgctgccatgaagctggtgaagcccttctcctag

SEQ ID NO: 3095 - DNA, 6309 bp, synthetic construct
  misc_feature 1..6309: note = source = /note="Description of Artificial Sequence: Synthetic coding sequence"
  source 1..6309: mol_type = other DNA
atgctgtgctgcctgctggtgcgggccagcaacctgcccagcgccaagaaggacagaagaagtgaccctgtggccagcctgaccttccggggcgtgaagaagaggaccaaggtgatcaagaacagcgtgaaccctgtgtggaatgaaggatttgagtgggacctgaagggcatccccctggaccagggcagcgagctgcacgtggtggtgaaggaccacgagaccatgggcaggaaccgcttcctgggggaggccaaggtgcccctgcgggaggtgctggccacccccagcctgagcgccagcttcaatgcccccctgctggacaccaagaagcagcccaccggggccagcctggtgctgcaggtgtcctacacccccctgcccggggctgtgcccctcttccccccacccacccccctggagcccagccccaccctgcctgacctggatgtggtggccgacacaggaggagaggaggacacagaggaccagggcctgactggagatgaagctgagcccttcctggaccagagcggcggccctggggcccccaccacccccaggaagctgcccagccggcccccaccccactacccaggcatcaagaggaagaggtctgcccccaccagcaggaagctgctgagtgacaagccccaggacttccagatccgggtgcaggtgattgagggccggcagctgcccggggtgaacatcaagcctgtggtgaaggtgacagctgctggccagaccaagaggacccgcatccacaagggcaacagccccctcttcaatgagaccctcttcttcaacctgtttgacagccctggagagctgtttgatgagcccatcttcatcaccgtggtggacagccgcagcctgaggacagatgccctgctgggggagttcaggatggatgtgggcaccatctaccgggagcccaggcatgcctacctgaggaagtggctgctgctgagtgaccctgatgacttctctgctggggcccggggctacctgaagaccagcctgtgtgtgctgggccctggagatgaggcccccctggagaggaaggaccccagcgaggacaaggaggacatcgagagcaacctgctgcggcccactggagtggccctgcggggggcccacttctgcctgaaggtgttccgggcagaggacctgccccagatggatgatgctgtgatggacaacgtgaagcagatctttggatttgagagcaacaagaagaacctggtggacccctttgtggaggtgtcctttgctgggaagatgctgtgcagcaagatcctggagaagacagccaacccccagtggaaccagaacatcaccctgcctgccatgttccccagcatgtgtgagaagatgaggatccgcatcatcgactgggaccggctgacccacaatgacatcgtggccaccacctacctgtccatgagcaagatcagcgcccctggaggagaaattgaggaggagcctgctggagctgtgaagcccagcaaggccagtgacctggatgactacctgggcttcctgcccaccttcggcccctgctacatcaacctgtatggcagcccccgggagttcaccggcttcccagacccctacacagagctgaacacaggaaaaggagagggcgtggcctaccggggccgcctgctgctgagcctggagaccaagctggtggagcacagcgagcagaaggtggaggacctgcctgcagatgacatcctgcgggtggagaagtacctgcggcggaggaagtacagcctgtttgctgccttctacagcgccaccatgctgcaggatgtggatgatgccatccagtttgaggtgtccatcggcaactacggcaacaagtttgacatgacctgcctgcccctggccagcaccacccagtacagcagagctgtgtttgatggctgccactactactacctgccctggggcaatgtgaagcctgtggtggtgctgagcagctactgggaggacatcagccacagaattgagacccagaaccagctgctgggcattgctgaccggctggaggccggcctggagcaggtgcacctggccctgaaggcccagtgcagcacagaagatgtggacagcctggtggcccagctgacagatgagctgattgctggctgcagccagcccctgggggacatccacgagaccccatctgccacccacctggaccagtacctgtaccagctgcggacccaccacctgagccagatcacagaagctgccctggccctgaagctgggccacagcgagctgcctgctgccctggagcaggccgaggactggctgctgcggctgcgggccctggccgaggagccccagaacagcctgcctgacatcgtcatctggatgctgcagggcgacaagagggtggcctaccagagggtgcctgcccaccaggtgctcttcagcagaagaggagccaactactgcggcaagaactgtgggaagctgcagaccatcttcctgaagtaccccatggagaaggtgcctggggccaggatgcctgtgcagatccgggtgaagctgtggtttggcctgtctgtggatgagaaggagttcaaccagtttgctgagggcaagctgtctgtgtttgctgagacctatgaaaatgagaccaagctggccctggtgggcaactggggcaccaccggcctgacctaccccaagttcagtgatgtgacaggcaagatcaagctgcccaaggacagcttccggcccagcgctggctggacctgggccggggactggtttgtgtgcccagagaagaccctgctgcatgacatggatgctggccacctgagctttgtggaggaggtgtttgagaaccagacccggctgcccggcggccagtggatctacatgtctgacaactacacagatgtgaatggagagaaggtgctgcccaaggatgacatcgagtgccccctgggctggaagtgggaggatgaggagtggagcacagacctgaacagagctgtggatgagcagggctgggagtacagcatcaccatccccccagagaggaagcccaagcactgggtgcctgctgagaagatgtactacacccacagaagaagacgctgggtgcggctgcggcggcgggacctgagccagatggaggccctgaagaggcaccggcaggccgaggccgagggggagggctgggagtatgccagcctgtttggctggaagttccacctggagtacaggaagacagatgccttcagaagaagacgctggaggaggaggatggagcccctggagaagacaggccctgctgctgtgtttgccctggagggcgccctgggcggcgtgatggatgacaagtctgaggacagcatgtctgtgtccaccctgagctttggagtgaaccggcccaccatcagctgcatctttgattatggcaaccgctaccacctgcgctgctacatgtaccaggcccgggacctggccgccatggacaaggacagcttcagtgacccctatgccatcgtgtccttcctgcaccagagccagaagacagtggtggtgaagaacaccctgaaccccacctgggaccagaccctcatcttctatgaaattgagatctttggagagcccgccaccgtggccgagcagccccccagcatcgtggtggagctgtatgaccatgacacctatggagcagatgagttcatgggccgctgcatctgccagcccagcctggagaggatgccccggctggcctggttccccctgacccggggcagccagcccagcggggagctgctggccagctttgagctgatccagcgggagaagccagccatccaccacatccctggctttgaggtgcaggagaccagccgcatcctggatgaaagtgaggacacagacctgccctaccccccaccccagcgggaggccaacatctacatggtgccccagaacatcaagccagccctgcagaggacagccatcgagatcctggcctggggcctgaggaacatgaagagctaccagctggccaacatcagcagccccagcctggtggtggagtgtggcggccagacagtgcagagctgtgtgatccggaacctgaggaagaaccccaactttgacatctgcaccctcttcatggaggtgatgctgccccgggaggagctgtactgcccccccatcaccgtgaaggtgattgacaaccggcagtttggccggcggcctgtggtgggccagtgcaccatccgcagcctggagagcttcctgtgtgacccctacagcgctgagagccccagcccccagggcggcccagatgatgtgtccctgctgagccctggagaagatgtgctgattgatattgatgacaaggagcccctcatccccatccagctggctgatggcctgagcagcctggcccccaccaacacagccagcccccccagcagcccccatgaggaggagttcatcgactggtggagcaagttctttgccagcattggagagcgggagaagtgtggcagctacctggagaaggactttgacaccctgaaggtgtatgacacccagctggagaatgtggaggcctttgagggcctgagtgacttctgcaacaccttcaagctgtaccggggcaagacccaggaggagacagaggaccccagcgtcatcggggagttcaagggcctcttcaagatctaccccctgcctgaggaccctgccatccccatgccaccccggcagttccaccagctggccgcccagggcccccaggagtgcctggtgcgcatctacatcgtgcgggccttcggcctgcagcccaaggaccccaacgggaaatgtgacccctacatcaagatcagcatcggcaagaagtctgtgtctgaccaggacaactacatcccctgcaccctggagcctgtgtttgggaagatgtttgagctgacctgcaccctgcccctggagaaggacctgaagatcaccctgtatgactatgacctgctgagcaaggatgagaagattggagagaccgtggtggacctggagaaccggctgctgagcaagtttggagcccgctgtggcctgccccagacctactgtgtgtctggccccaaccagtggagggaccagctgcggcccagccagctgctgcacctgttctgccagcagcaccgggtgaaggcccctgtgtacagaacagacagagtgatgttccaggacaaggagtacagcattgaggagattgaagctggccgcatccccaacccccacctgggccctgtggaggagcggctggccctgcacgtgctgcagcagcagggcctggtgcctgagcacgtggagagccggcccctgtacagccccctgcagcctgacatcgagcagggcaagctgcagatgtgggtggacctcttccccaaggccctgggccggcccggcccccccttcaacatcaccccccggcgggcccggcgcttcttcctgcgctgcatcatctggaacaccagagatgtgatcctggatgacctgagcctgactggagagaagatgtctgacatctacgtgaagggctggatgattggatttgaggagcacaagcagaagacagatgtgcactaccgcagcctgggcggggagggcaacttcaactggaggttcatcttcccctttgactacctgcctgctgagcaggtgtgcaccatcgccaagaaggatgccttctggaggctggacaagacagagagcaagatcccagcccgggtggtgttccagatctgggacaatgacaagttctcctttgatgacttcctgggcagcctgcagctggacctgaacaggatgcccaagccagccaagacagccaagaagtgcagcctggaccagctggatgatgccttccaccctgagtggtttgtgtccctgtttgagcagaagacagtgaagggctggtggccctgtgtggccgaggagggggagaagaagatcctggccggcaagctggagatgaccctggagatcgtggccgagagcgagcacgaggagaggcctgctggccagggcagagatgagcccaacatgaaccccaagctggaggaccccaggaggccagacaccagcttcctgtggttcaccagcccctacaagaccatgaagttcatcctgtggaggcgcttccgctgggccatcatcctcttcatcatcctcttcatcctgctgctcttcctggccatcttcatctatgccttccccaactatgctgccatgaagctggtgaagcccttctcctag

SEQ ID NO: 3096 - DNA, 6357 bp, synthetic construct
  misc_feature 1..6357: note = source = /note="Description of Artificial Sequence: Synthetic coding sequence"
  source 1..6357: mol_type = other DNA
atgctgcgggtcttcatcctgtatgcagaaaatgtgcacaccccagacacagacatcagtgatgcctactgcagcgctgtgtttgctggggtgaagaagaggaccaaggtgatcaagaacagcgtgaaccctgtgtggaatgaaggatttgagtgggacctgaagggcatccccctggaccagggcagcgagctgcacgtggtggtgaaggaccacgagaccatgggcaggaaccgcttcctgggggaggccaaggtgcccctgcgggaggtgctggccacccccagcctgagcgccagcttcaatgcccccctgctggacaccaagaagcagcccactggagccagcctggtgctgcaggtgtcctacacccccctgcctggagctgtgcccctcttccccccacccacccccctggagcccagccccaccctgcctgacctggatgtggtggccggcggcggccagagcagagctgagacctggagcctgctgagtgacagcaccatggacacccgctacagcggcaagaagtggccagcccccacagacacaggaggagaggaggacacagaggaccagggcctgactggagatgaagctgagcccttcctggaccagagcggcggccctggggcccccaccacccccaggaagctgcccagccggcccccaccccactacccaggcatcaagaggaagaggtctgcccccaccagcaggaagctgctgagtgacaagccccaggacttccagatccgggtgcaggtgattgagggccggcagctgcccggggtgaacatcaagcctgtggtgaaggtgacagctgctggccagaccaagaggacccgcatccacaagggcaacagccccctcttcaatgagaccctcttcttcaacctgtttgacagccctggagagctgtttgatgagcccatcttcatcaccgtggtggacagccgcagcctgaggacagatgccctgctgggggagttcaggatggatgtgggcaccatctaccgggagcccaggcatgcctacctgaggaagtggctgctgctgagtgaccctgatgacttctctgctggggcccggggctacctgaagaccagcctgtgtgtgctgggccctggagatgaggcccccctggagaggaaggaccccagcgaggacaaggaggacatcgagagcaacctgctgcggcccactggagtggccctgcggggggcccacttctgcctgaaggtgttccgggcagaggacctgccccagatggatgatgctgtgatggacaacgtgaagcagatctttggatttgagagcaacaagaagaacctggtggacccctttgtggaggtgtcctttgctgggaagatgctgtgcagcaagatcctggagaagacagccaacccccagtggaaccagaacatcaccctgcctgccatgttccccagcatgtgtgagaagatgaggatccgcatcatcgactgggaccggctgacccacaatgacatcgtggccaccacctacctgtccatgagcaagatcagcgcccctggaggagaaattgaggtggatgactacctgggcttcctgcccaccttcggcccctgctacatcaacctgtatggcagcccccgggagttcaccggcttcccagacccctacacagagctgaacacaggaaaaggagagggcgtggcctaccggggccgcctgctgctgagcctggagaccaagctggtggagcacagcgagcagaaggtggaggacctgcctgcagatgacatcctgcgggtggagaagtacctgcggcggaggaagtacagcctgtttgctgccttctacagcgccaccatgctgcaggatgtggatgatgccatccagtttgaggtgtccatcggcaactacggcaacaagtttgacatgacctgcctgcccctggccagcaccacccagtacagcagagctgtgtttgatggctgccactactactacctgccctggggcaatgtgaagcctgtggtggtgctgagcagctactgggaggacatcagccacagaattgagacccagaaccagctgctgggcattgctgaccggctggaggccggcctggagcaggtgcacctggccctgaaggcccagtgcagcacagaagatgtggacagcctggtggcccagctgacagatgagctgattgctggctgcagccagcccctgggggacatccacgagaccccatctgccacccacctggaccagtacctgtaccagctgcggacccaccacctgagccagatcacagaagctgccctggccctgaagctgggccacagcgagctgcctgctgccctggagcaggccgaggactggctgctgcggctgcgggccctggccgaggagccccagaacagcctgcctgacatcgtcatctggatgctgcagggcgacaagagggtggcctaccagagggtgcctgcccaccaggtgctcttcagcagaagaggagccaactactgcggcaagaactgtgggaagctgcagaccatcttcctgaagtaccccatggagaaggtgcctggggccaggatgcctgtgcagatccgggtgaagctgtggtttggcctgtctgtggatgagaaggagttcaaccagtttgctgagggcaagctgtctgtgtttgctgagacctatgaaaatgagaccaagctggccctggtgggcaactggggcaccaccggcctgacctaccccaagttcagtgatgtgacaggcaagatcaagctgcccaaggacagcttccggcccagcgctggctggacctgggccggggactggtttgtgtgcccagagaagaccctgctgcatgacatggatgctggccacctgagctttgtggaggaggtgtttgagaaccagacccggctgcccggcggccagtggatctacatgtctgacaactacacagatgtgaatggagagaaggtgctgcccaaggatgacatcgagtgccccctgggctggaagtgggaggatgaggagtggagcacagacctgaacagagctgtggatgagcagggctgggagtacagcatcaccatccccccagagaggaagcccaagcactgggtgcctgctgagaagatgtactacacccacagaagaagacgctgggtgcggctgcggcggcgggacctgagccagatggaggccctgaagaggcaccggcaggccgaggccgagggggagggctgggagtatgccagcctgtttggctggaagttccacctggagtacaggaagacagatgccttcagaagaagacgctggaggaggaggatggagcccctggagaagacaggccctgctgctgtgtttgccctggagggcgccctgggcggcgtgatggatgacaagtctgaggacagcatgtctgtgtccaccctgagctttggagtgaaccggcccaccatcagctgcatctttgattatggcaaccgctaccacctgcgctgctacatgtaccaggcccgggacctggccgccatggacaaggacagcttcagtgacccctatgccatcgtgtccttcctgcaccagagccagaagacagtggtggtgaagaacaccctgaaccccacctgggaccagaccctcatcttctatgaaattgagatctttggagagcccgccaccgtggccgagcagccccccagcatcgtggtggagctgtatgaccatgacacctatggagcagatgagttcatgggccgctgcatctgccagcccagcctggagaggatgccccggctggcctggttccccctgacccggggcagccagcccagcggggagctgctggccagctttgagctgatccagcgggagaagccagccatccaccacatccctggctttgaggtgcaggagaccagccgcatcctggatgaaagtgaggacacagacctgccctaccccccaccccagcgggaggccaacatctacatggtgccccagaacatcaagccagccctgcagaggacagccatcgagatcctggcctggggcctgaggaacatgaagagctaccagctggccaacatcagcagccccagcctggtggtggagtgtggcggccagacagtgcagagctgtgtgatccggaacctgaggaagaaccccaactttgacatctgcaccctcttcatggaggtgatgctgccccgggaggagctgtactgcccccccatcaccgtgaaggtgattgacaaccggcagtttggccggcggcctgtggtgggccagtgcaccatccgcagcctggagagcttcctgtgtgacccctacagcgctgagagccccagcccccagggcggcccagatgatgtgtccctgctgagccctggagaagatgtgctgattgatattgatgacaaggagcccctcatccccatccagctggctgatggcctgagcagcctggcccccaccaacacagccagcccccccagcagcccccatgaggaggagttcatcgactggtggagcaagttctttgccagcattggagagcgggagaagtgtggcagctacctggagaaggactttgacaccctgaaggtgtatgacacccagctggagaatgtggaggcctttgagggcctgagtgacttctgcaacaccttcaagctgtaccggggcaagacccaggaggagacagaggaccccagcgtcatcggggagttcaagggcctcttcaagatctaccccctgcctgaggaccctgccatccccatgccaccccggcagttccaccagctggccgcccagggcccccaggagtgcctggtgcgcatctacatcgtgcgggccttcggcctgcagcccaaggaccccaacgggaaatgtgacccctacatcaagatcagcatcggcaagaagtctgtgtctgaccaggacaactacatcccctgcaccctggagcctgtgtttgggaagatgtttgagctgacctgcaccctgcccctggagaaggacctgaagatcaccctgtatgactatgacctgctgagcaaggatgagaagattggagagaccgtggtggacctggagaaccggctgctgagcaagtttggagcccgctgtggcctgccccagacctactgtgtgtctggccccaaccagtggagggaccagctgcggcccagccagctgctgcacctgttctgccagcagcaccgggtgaaggcccctgtgtacagaacagacagagtgatgttccaggacaaggagtacagcattgaggagattgaagctggccgcatccccaacccccacctgggccctgtggaggagcggctggccctgcacgtgctgcagcagcagggcctggtgcctgagcacgtggagagccggcccctgtacagccccctgcagcctgacatcgagcagggcaagctgcagatgtgggtggacctcttccccaaggccctgggccggcccggcccccccttcaacatcaccccccggcgggcccggcgcttcttcctgcgctgcatcatctggaacaccagagatgtgatcctggatgacctgagcctgactggagagaagatgtctgacatctacgtgaagggctggatgattggatttgaggagcacaagcagaagacagatgtgcactaccgcagcctgggcggggagggcaacttcaactggaggttcatcttcccctttgactacctgcctgctgagcaggtgtgcaccatcgccaagaaggatgccttctggaggctggacaagacagagagcaagatcccagcccgggtggtgttccagatctgggacaatgacaagttctcctttgatgacttcctgggcagcctgcagctggacctgaacaggatgcccaagccagccaagacagccaagaagtgcagcctggaccagctggatgatgccttccaccctgagtggtttgtgtccctgtttgagcagaagacagtgaagggctggtggccctgtgtggccgaggagggggagaagaagatcctggccggcaagctggagatgaccctggagatcgtggccgagagcgagcacgaggagaggcctgctggccagggcagagatgagcccaacatgaaccccaagctggaggaccccaggaggccagacaccagcttcctgtggttcaccagcccctacaagaccatgaagttcatcctgtggaggcgcttccgctgggccatcatcctcttcatcatcctcttcatcctgctgctcttcctggccatcttcatctatgccttccccaactatgctgccatgaagctggtgaagcccttctcctag

SEQ ID NO: 3097 - DNA, 6339 bp, synthetic construct
  misc_feature 1..6339: note = source = /note="Description of Artificial Sequence: Synthetic coding sequence"
  source 1..6339: mol_type = other DNA
atgctgtgctgcctgctggtgcgggccagcaacctgcccagcgccaagaaggacagaagaagtgaccctgtggccagcctgaccttccggggcgtgaagaagaggaccaaggtgatcaagaacagcgtgaaccctgtgtggaatgaaggatttgagtgggacctgaagggcatccccctggaccagggcagcgagctgcacgtggtggtgaaggaccacgagaccatgggcaggaaccgcttcctgggggaggccaaggtgcccctgcgggaggtgctggccacccccagcctgagcgccagcttcaatgcccccctgctggacaccaagaagcagcccaccggggccagcctggtgctgcaggtgtcctacacccccctgcccggggctgtgcccctcttccccccacccacccccctggagcccagccccaccctgcctgacctggatgtggtggccggcggcggccagagcagagctgagacctggagcctgctgagtgacagcaccatggacacccgctacagcggcaagaagtggccagcccccacagacaccggcggggaggaggacacagaggaccagggcctgactggagatgaggccgagcccttcctggaccagagcggcggccctggggcccccaccacccccaggaagctgcccagccggcccccaccccactacccaggcatcaagaggaagaggtctgcccccaccagcaggaagctgctgagtgacaagccccaggacttccagatccgggtgcaggtgattgagggccggcagctgcccggggtgaacatcaagcctgtggtgaaggtgacagctgctggccagaccaagaggacccgcatccacaagggcaacagccccctcttcaatgagaccctcttcttcaacctgtttgacagccctggagagctgtttgatgagcccatcttcatcaccgtggtggacagccgcagcctgaggacagatgccctgctgggggagttcaggatggatgtgggcaccatctaccgggagcccaggcatgcctacctgaggaagtggctgctgctgagtgaccctgatgacttctctgctggggcccggggctacctgaagaccagcctgtgtgtgctgggccctggagatgaggcccccctggagaggaaggaccccagcgaggacaaggaggacatcgagagcaacctgctgcggcccaccggggtggccctgcggggggcccacttctgcctgaaggtgttccgggcagaggacctgccccagatggatgatgctgtgatggacaacgtgaagcagatcttcggctttgagagcaacaagaagaacctggtggacccctttgtggaggtgtcctttgctgggaagatgctgtgcagcaagatcctggagaagacagccaacccccagtggaaccagaacatcaccctgcctgccatgttccccagcatgtgtgagaagatgaggatccgcatcatcgactgggaccggctgacccacaatgacatcgtggccaccacctacctgtccatgagcaagatcagcgcccctggaggagaaattgaggaggagcctgctggagctgtgaagcccagcaaggccagtgacctggatgactacctgggcttcctgcccaccttcggcccctgctacatcaacctgtatggcagcccccgggagttcaccggcttcccagacccctacacagagctgaacacaggcaagggggagggcgtggcctaccggggccgcctgctgctgagcctggagaccaagctggtggagcacagcgagcagaaggtggaggacctgcctgcagatgacatcctgcgggtggagaagtacctgcggcggaggaagtacagcctgtttgctgccttctacagcgccaccatgctgcaggatgtggatgatgccatccagtttgaggtgtccatcggcaactacggcaacaagtttgacatgacctgcctgcccctggccagcaccacccagtacagcagagctgtgtttgatggctgccactactactacctgccctggggcaatgtgaagcctgtggtggtgctgagcagctactgggaggacatcagccaccgcatcgagacccagaaccagctgctgggcattgctgaccggctggaggccggcctggagcaggtgcacctggccctgaaggcccagtgcagcacagaagatgtggacagcctggtggcccagctgacagatgagctgattgctggctgcagccagcccctgggggacatccacgagacccccagcgccacccacctggaccagtacctgtaccagctgcggacccaccacctgagccagatcacagaggccgccctggccctgaagctgggccacagcgagctgcctgctgccctggagcaggccgaggactggctgctgcggctgcgggccctggccgaggagccccagaacagcctgcctgacatcgtcatctggatgctgcagggcgacaagagggtggcctaccagagggtgcctgcccaccaggtgctcttcagccggcggggggccaactactgtgggaagaactgtgggaagctgcagaccatcttcctgaagtaccccatggagaaggtgcctggggccaggatgcctgtgcagatccgggtgaagctgtggtttggcctgtctgtggatgagaaggagttcaaccagtttgctgagggcaagctgtctgtgtttgctgagacctatgaaaatgagaccaagctggccctggtgggcaactggggcaccaccggcctgacctaccccaagttcagtgatgtgacaggcaagatcaagctgcccaaggacagcttccggcccagcgctggctggacctgggccggggactggtttgtgtgcccagagaagaccctgctgcatgacatggatgctggccacctgagctttgtggaggaggtgtttgagaaccagacccggctgcccggcggccagtggatctacatgtctgacaactacacagatgtgaatggagagaaggtgctgcccaaggatgacattgaatgtcccctgggctggaagtgggaggatgaggagtggagcacagacctgaacagagctgtggatgagcagggctgggagtacagcatcaccatccccccagagaggaagcccaagcactgggtgcctgctgagaagatgtactacacccacagaagaagacgctgggtgcggctgcggcggcgggacctgagccagatggaggccctgaagaggcaccggcaggccgaggccgagggggagggctgggagtatgccagcctgtttggctggaagttccacctggagtacaggaagacagatgccttcagaagaagacgctggaggaggaggatggagcccctggagaagacaggccctgctgctgtgtttgccctggagggcgccctgggcggcgtgatggatgacaagtcagaagattccatgtctgtgtccaccctgagctttggagtgaaccggcccaccatcagctgcatctttgattatggcaaccgctaccacctgcgctgctacatgtaccaggcccgggacctggccgccatggacaaggacagcttcagtgacccctatgccatcgtgtccttcctgcaccagagccagaagacagtggtggtgaagaacaccctgaaccccacctgggaccagaccctcatcttctatgaaattgagatctttggagagcccgccaccgtggccgagcagcccccatccatcgtggtggagctgtatgaccatgacacctacggggctgatgagttcatgggccgctgcatctgccagcccagcctggagaggatgccccggctggcctggttccccctgacccggggcagccagcccagcggggagctgctggccagctttgagctgatccagcgggagaagccagccatccaccacatccctggctttgaggtgcaggagaccagccgcatcctggatgaaagtgaggacacagacctgccctaccccccaccccagcgggaggccaacatctacatggtgccccagaacatcaagccagccctgcagaggacagccatcgagatcctggcctggggcctgaggaacatgaagagctaccagctggccaacatcagcagccccagcctggtggtggagtgtggcggccagacagtgcagagctgtgtgatccggaacctgaggaagaaccccaactttgacatctgcaccctcttcatggaggtgatgctgccccgggaggagctgtactgcccccccatcaccgtgaaggtgattgacaaccggcagtttggaagaagacctgtggtgggccagtgcaccatccgcagcctggagagcttcctgtgtgacccctacagcgctgagagccccagcccccagggcggcccagatgatgtgtccctgctgagccctggagaagatgtgctgattgatattgatgacaaggagcccctcatccccatccaggaggaggagttcatcgactggtggagcaagttctttgccagcattggagagcgggagaagtgtggcagctacctggagaaggactttgacaccctgaaggtgtatgacacccagctggagaatgtggaggcctttgagggcctgagtgacttctgcaacaccttcaagctgtaccggggcaagacccaggaggagacagaggaccccagcgtcatcggggagttcaagggcctcttcaagatctaccccctgcctgaggaccctgccatccccatgccaccccggcagttccaccagctggccgcccagggcccccaggagtgcctggtgcgcatctacatcgtgcgggccttcggcctgcagcccaaggaccccaacgggaaatgtgacccctacatcaagatcagcatcggcaagaagtctgtgtctgaccaggacaactacatcccctgcaccctggagcctgtgtttgggaagatgtttgagctgacctgcaccctgcccctggagaaggacctgaagatcaccctgtatgactatgacctgctgagcaaggatgagaagattggagagaccgtggtggacctggagaaccggctgctgagcaagtttggagcccgctgtggcctgccccagacctactgtgtgtctggccccaaccagtggagggaccagctgcggcccagccagctgctgcacctgttctgccagcagcaccgggtgaaggcccctgtgtacagaacagacagagtgatgttccaggacaaggagtacagcattgaggagattgaagctggccgcatccccaacccccacctgggccctgtggaggagcggctggccctgcacgtgctgcagcagcagggcctggtgcctgagcacgtggagagccggcccctgtacagccccctgcagcctgacatcgagcagggcaagctgcagatgtgggtggacctcttccccaaggccctgggccggcccggcccccccttcaacatcaccccccggcgggcccggcgcttcttcctgcgctgcatcatctggaacaccagagatgtgatcctggatgacctgagcctgactggagagaagatgtctgacatctacgtgaagggctggatgattggatttgaggagcacaagcagaagacagatgtgcactaccgcagcctgggcggggagggcaacttcaactggaggttcatcttcccctttgactacctgcctgctgagcaggtgtgcaccatcgccaagaaggatgccttctggaggctggacaagacagagagcaagatcccagcccgggtggtgttccagatctgggacaatgacaagttctcctttgatgacttcctgggcagcctgcagctggacctgaacaggatgcccaagccagccaagacagccaagaagtgcagcctggaccagctggatgatgccttccaccctgagtggtttgtgtccctgtttgagcagaagacagtgaagggctggtggccctgtgtggccgaggagggggagaagaagatcctggccggcaagctggagatgaccctggagatcgtggccgagagcgagcacgaggagaggcctgctggccagggcagagatgagcccaacatgaaccccaagctggaggaccccaggaggccagacaccagcttcctgtggttcaccagcccctacaagaccatgaagttcatcctgtggaggcgcttccgctgggccatcatcctcttcatcatcctcttcatcctgctgctcttcctggccatcttcatctatgccttccccaactatgctgccatgaagctggtgaagcccttctcctag

SEQ ID NO: 3098 - DNA, 6267 bp, synthetic construct
  misc_feature 1..6267: note = source = /note="Description of Artificial Sequence: Synthetic coding sequence"
  source 1..6267: mol_type = other DNA
atgctgtgctgcctgctggtgcgggccagcaacctgcccagcgccaagaaggacagaagaagtgaccctgtggccagcctgaccttccggggcgtgaagaagaggaccaaggtgatcaagaacagcgtgaaccctgtgtggaatgaaggatttgagtgggacctgaagggcatccccctggaccagggcagcgagctgcacgtggtggtgaaggaccacgagaccatgggcaggaaccgcttcctgggggaggccaaggtgcccctgcgggaggtgctggccacccccagcctgagcgccagcttcaatgcccccctgctggacaccaagaagcagcccaccggggccagcctggtgctgcaggtgtcctacacccccctgcccggggctgtgcccctcttccccccacccacccccctggagcccagccccaccctgcctgacctggatgtggtggccgacacaggaggagaggaggacacagaggaccagggcctgactggagatgaagctgagcccttcctggaccagagcggcggccctggggcccccaccacccccaggaagctgcccagccggcccccaccccactacccaggcatcaagaggaagaggtctgcccccaccagcaggaagctgctgagtgacaagccccaggacttccagatccgggtgcaggtgattgagggccggcagctgcccggggtgaacatcaagcctgtggtgaaggtgacagctgctggccagaccaagaggacccgcatccacaagggcaacagccccctcttcaatgagaccctcttcttcaacctgtttgacagccctggagagctgtttgatgagcccatcttcatcaccgtggtggacagccgcagcctgaggacagatgccctgctgggggagttcaggatggatgtgggcaccatctaccgggagcccaggcatgcctacctgaggaagtggctgctgctgagtgaccctgatgacttctctgctggggcccggggctacctgaagaccagcctgtgtgtgctgggccctggagatgaggcccccctggagaggaaggaccccagcgaggacaaggaggacatcgagagcaacctgctgcggcccactggagtggccctgcggggggcccacttctgcctgaaggtgttccgggcagaggacctgccccagatggatgatgctgtgatggacaacgtgaagcagatctttggatttgagagcaacaagaagaacctggtggacccctttgtggaggtgtcctttgctgggaagatgctgtgcagcaagatcctggagaagacagccaacccccagtggaaccagaacatcaccctgcctgccatgttccccagcatgtgtgagaagatgaggatccgcatcatcgactgggaccggctgacccacaatgacatcgtggccaccacctacctgtccatgagcaagatcagcgcccctggaggagaaattgaggtggatgactacctgggcttcctgcccaccttcggcccctgctacatcaacctgtatggcagcccccgggagttcaccggcttcccagacccctacacagagctgaacacaggaaaaggagagggcgtggcctaccggggccgcctgctgctgagcctggagaccaagctggtggagcacagcgagcagaaggtggaggacctgcctgcagatgacatcctgcgggtggagaagtacctgcggcggaggaagtacagcctgtttgctgccttctacagcgccaccatgctgcaggatgtggatgatgccatccagtttgaggtgtccatcggcaactacggcaacaagtttgacatgacctgcctgcccctggccagcaccacccagtacagcagagctgtgtttgatggctgccactactactacctgccctggggcaatgtgaagcctgtggtggtgctgagcagctactgggaggacatcagccacagaattgagacccagaaccagctgctgggcattgctgaccggctggaggccggcctggagcaggtgcacctggccctgaaggcccagtgcagcacagaagatgtggacagcctggtggcccagctgacagatgagctgattgctggctgcagccagcccctgggggacatccacgagaccccatctgccacccacctggaccagtacctgtaccagctgcggacccaccacctgagccagatcacagaagctgccctggccctgaagctgggccacagcgagctgcctgctgccctggagcaggccgaggactggctgctgcggctgcgggccctggccgaggagccccagaacagcctgcctgacatcgtcatctggatgctgcagggcgacaagagggtggcctaccagagggtgcctgcccaccaggtgctcttcagcagaagaggagccaactactgcggcaagaactgtgggaagctgcagaccatcttcctgaagtaccccatggagaaggtgcctggggccaggatgcctgtgcagatccgggtgaagctgtggtttggcctgtctgtggatgagaaggagttcaaccagtttgctgagggcaagctgtctgtgtttgctgagacctatgaaaatgagaccaagctggccctggtgggcaactggggcaccaccggcctgacctaccccaagttcagtgatgtgacaggcaagatcaagctgcccaaggacagcttccggcccagcgctggctggacctgggccggggactggtttgtgtgcccagagaagaccctgctgcatgacatggatgctggccacctgagctttgtggaggaggtgtttgagaaccagacccggctgcccggcggccagtggatctacatgtctgacaactacacagatgtgaatggagagaaggtgctgcccaaggatgacatcgagtgccccctgggctggaagtgggaggatgaggagtggagcacagacctgaacagagctgtggatgagcagggctgggagtacagcatcaccatccccccagagaggaagcccaagcactgggtgcctgctgagaagatgtactacacccacagaagaagacgctgggtgcggctgcggcggcgggacctgagccagatggaggccctgaagaggcaccggcaggccgaggccgagggggagggctgggagtatgccagcctgtttggctggaagttccacctggagtacaggaagacagatgccttcagaagaagacgctggaggaggaggatggagcccctggagaagacaggccctgctgctgtgtttgccctggagggcgccctgggcggcgtgatggatgacaagtctgaggacagcatgtctgtgtccaccctgagctttggagtgaaccggcccaccatcagctgcatctttgattatggcaaccgctaccacctgcgctgctacatgtaccaggcccgggacctggccgccatggacaaggacagcttcagtgacccctatgccatcgtgtccttcctgcaccagagccagaagacagtggtggtgaagaacaccctgaaccccacctgggaccagaccctcatcttctatgaaattgagatctttggagagcccgccaccgtggccgagcagccccccagcatcgtggtggagctgtatgaccatgacacctatggagcagatgagttcatgggccgctgcatctgccagcccagcctggagaggatgccccggctggcctggttccccctgacccggggcagccagcccagcggggagctgctggccagctttgagctgatccagcgggagaagccagccatccaccacatccctggctttgaggtgcaggagaccagccgcatcctggatgaaagtgaggacacagacctgccctaccccccaccccagcgggaggccaacatctacatggtgccccagaacatcaagccagccctgcagaggacagccatcgagatcctggcctggggcctgaggaacatgaagagctaccagctggccaacatcagcagccccagcctggtggtggagtgtggcggccagacagtgcagagctgtgtgatccggaacctgaggaagaaccccaactttgacatctgcaccctcttcatggaggtgatgctgccccgggaggagctgtactgcccccccatcaccgtgaaggtgattgacaaccggcagtttggccggcggcctgtggtgggccagtgcaccatccgcagcctggagagcttcctgtgtgacccctacagcgctgagagccccagcccccagggcggcccagatgatgtgtccctgctgagccctggagaagatgtgctgattgatattgatgacaaggagcccctcatccccatccagctggctgatggcctgagcagcctggcccccaccaacacagccagcccccccagcagcccccatgaggaggagttcatcgactggtggagcaagttctttgccagcattggagagcgggagaagtgtggcagctacctggagaaggactttgacaccctgaaggtgtatgacacccagctggagaatgtggaggcctttgagggcctgagtgacttctgcaacaccttcaagctgtaccggggcaagacccaggaggagacagaggaccccagcgtcatcggggagttcaagggcctcttcaagatctaccccctgcctgaggaccctgccatccccatgccaccccggcagttccaccagctggccgcccagggcccccaggagtgcctggtgcgcatctacatcgtgcgggccttcggcctgcagcccaaggaccccaacgggaaatgtgacccctacatcaagatcagcatcggcaagaagtctgtgtctgaccaggacaactacatcccctgcaccctggagcctgtgtttgggaagatgtttgagctgacctgcaccctgcccctggagaaggacctgaagatcaccctgtatgactatgacctgctgagcaaggatgagaagattggagagaccgtggtggacctggagaaccggctgctgagcaagtttggagcccgctgtggcctgccccagacctactgtgtgtctggccccaaccagtggagggaccagctgcggcccagccagctgctgcacctgttctgccagcagcaccgggtgaaggcccctgtgtacagaacagacagagtgatgttccaggacaaggagtacagcattgaggagattgaagctggccgcatccccaacccccacctgggccctgtggaggagcggctggccctgcacgtgctgcagcagcagggcctggtgcctgagcacgtggagagccggcccctgtacagccccctgcagcctgacatcgagcagggcaagctgcagatgtgggtggacctcttccccaaggccctgggccggcccggcccccccttcaacatcaccccccggcgggcccggcgcttcttcctgcgctgcatcatctggaacaccagagatgtgatcctggatgacctgagcctgactggagagaagatgtctgacatctacgtgaagggctggatgattggatttgaggagcacaagcagaagacagatgtgcactaccgcagcctgggcggggagggcaacttcaactggaggttcatcttcccctttgactacctgcctgctgagcaggtgtgcaccatcgccaagaaggatgccttctggaggctggacaagacagagagcaagatcccagcccgggtggtgttccagatctgggacaatgacaagttctcctttgatgacttcctgggcagcctgcagctggacctgaacaggatgcccaagccagccaagacagccaagaagtgcagcctggaccagctggatgatgccttccaccctgagtggtttgtgtccctgtttgagcagaagacagtgaagggctggtggccctgtgtggccgaggagggggagaagaagatcctggccggcaagctggagatgaccctggagatcgtggccgagagcgagcacgaggagaggcctgctggccagggcagagatgagcccaacatgaaccccaagctggaggaccccaggaggccagacaccagcttcctgtggttcaccagcccctacaagaccatgaagttcatcctgtggaggcgcttccgctgggccatcatcctcttcatcatcctcttcatcctgctgctcttcctggccatcttcatctatgccttccccaactatgctgccatgaagctggtgaagcccttctcctag

SEQ ID NO: 3099 - DNA, 6294 bp, synthetic construct
  misc_feature 1..6294: note = source = /note="Description of Artificial Sequence: Synthetic coding sequence"
  source 1..6294: mol_type = other DNA
atgctgcgggtcttcatcctgtatgcagaaaatgtgcacaccccagacacagacatcagtgatgcctactgcagcgctgtgtttgctggggtgaagaagaggaccaaggtgatcaagaacagcgtgaaccctgtgtggaatgaaggatttgagtgggacctgaagggcatccccctggaccagggcagcgagctgcacgtggtggtgaaggaccacgagaccatgggcaggaaccgcttcctgggggaggccaaggtgcccctgcgggaggtgctggccacccccagcctgagcgccagcttcaatgcccccctgctggacaccaagaagcagcccactggagccagcctggtgctgcaggtgtcctacacccccctgcctggagctgtgcccctcttccccccacccacccccctggagcccagccccaccctgcctgacctggatgtggtggccggcggcggccagagcagagctgagacctggagcctgctgagtgacagcaccatggacacccgctacagcggcaagaagtggccagcccccacagacacaggaggagaggaggacacagaggaccagggcctgactggagatgaagctgagcccttcctggaccagagcggcggccctggggcccccaccacccccaggaagctgcccagccggcccccaccccactacccaggcatcaagaggaagaggtctgcccccaccagcaggaagctgctgagtgacaagccccaggacttccagatccgggtgcaggtgattgagggccggcagctgcccggggtgaacatcaagcctgtggtgaaggtgacagctgctggccagaccaagaggacccgcatccacaagggcaacagccccctcttcaatgagaccctcttcttcaacctgtttgacagccctggagagctgtttgatgagcccatcttcatcaccgtggtggacagccgcagcctgaggacagatgccctgctgggggagttcaggatggatgtgggcaccatctaccgggagcccaggcatgcctacctgaggaagtggctgctgctgagtgaccctgatgacttctctgctggggcccggggctacctgaagaccagcctgtgtgtgctgggccctggagatgaggcccccctggagaggaaggaccccagcgaggacaaggaggacatcgagagcaacctgctgcggcccactggagtggccctgcggggggcccacttctgcctgaaggtgttccgggcagaggacctgccccagatggatgatgctgtgatggacaacgtgaagcagatctttggatttgagagcaacaagaagaacctggtggacccctttgtggaggtgtcctttgctgggaagatgctgtgcagcaagatcctggagaagacagccaacccccagtggaaccagaacatcaccctgcctgccatgttccccagcatgtgtgagaagatgaggatccgcatcatcgactgggaccggctgacccacaatgacatcgtggccaccacctacctgtccatgagcaagatcagcgcccctggaggagaaattgaggtggatgactacctgggcttcctgcccaccttcggcccctgctacatcaacctgtatggcagcccccgggagttcaccggcttcccagacccctacacagagctgaacacaggaaaaggagagggcgtggcctaccggggccgcctgctgctgagcctggagaccaagctggtggagcacagcgagcagaaggtggaggacctgcctgcagatgacatcctgcgggtggagaagtacctgcggcggaggaagtacagcctgtttgctgccttctacagcgccaccatgctgcaggatgtggatgatgccatccagtttgaggtgtccatcggcaactacggcaacaagtttgacatgacctgcctgcccctggccagcaccacccagtacagcagagctgtgtttgatggctgccactactactacctgccctggggcaatgtgaagcctgtggtggtgctgagcagctactgggaggacatcagccacagaattgagacccagaaccagctgctgggcattgctgaccggctggaggccggcctggagcaggtgcacctggccctgaaggcccagtgcagcacagaagatgtggacagcctggtggcccagctgacagatgagctgattgctggctgcagccagcccctgggggacatccacgagaccccatctgccacccacctggaccagtacctgtaccagctgcggacccaccacctgagccagatcacagaagctgccctggccctgaagctgggccacagcgagctgcctgctgccctggagcaggccgaggactggctgctgcggctgcgggccctggccgaggagccccagaacagcctgcctgacatcgtcatctggatgctgcagggcgacaagagggtggcctaccagagggtgcctgcccaccaggtgctcttcagcagaagaggagccaactactgcggcaagaactgtgggaagctgcagaccatcttcctgaagtaccccatggagaaggtgcctggggccaggatgcctgtgcagatccgggtgaagctgtggtttggcctgtctgtggatgagaaggagttcaaccagtttgctgagggcaagctgtctgtgtttgctgagacctatgaaaatgagaccaagctggccctggtgggcaactggggcaccaccggcctgacctaccccaagttcagtgatgtgacaggcaagatcaagctgcccaaggacagcttccggcccagcgctggctggacctgggccggggactggtttgtgtgcccagagaagaccctgctgcatgacatggatgctggccacctgagctttgtggaggaggtgtttgagaaccagacccggctgcccggcggccagtggatctacatgtctgacaactacacagatgtgaatggagagaaggtgctgcccaaggatgacatcgagtgccccctgggctggaagtgggaggatgaggagtggagcacagacctgaacagagctgtggatgagcagggctgggagtacagcatcaccatccccccagagaggaagcccaagcactgggtgcctgctgagaagatgtactacacccacagaagaagacgctgggtgcggctgcggcggcgggacctgagccagatggaggccctgaagaggcaccggcaggccgaggccgagggggagggctgggagtatgccagcctgtttggctggaagttccacctggagtacaggaagacagatgccttcagaagaagacgctggaggaggaggatggagcccctggagaagacaggccctgctgctgtgtttgccctggagggcgccctgggcggcgtgatggatgacaagtctgaggacagcatgtctgtgtccaccctgagctttggagtgaaccggcccaccatcagctgcatctttgattatggcaaccgctaccacctgcgctgctacatgtaccaggcccgggacctggccgccatggacaaggacagcttcagtgacccctatgccatcgtgtccttcctgcaccagagccagaagacagtggtggtgaagaacaccctgaaccccacctgggaccagaccctcatcttctatgaaattgagatctttggagagcccgccaccgtggccgagcagccccccagcatcgtggtggagctgtatgaccatgacacctatggagcagatgagttcatgggccgctgcatctgccagcccagcctggagaggatgccccggctggcctggttccccctgacccggggcagccagcccagcggggagctgctggccagctttgagctgatccagcgggagaagccagccatccaccacatccctggctttgaggtgcaggagaccagccgcatcctggatgaaagtgaggacacagacctgccctaccccccaccccagcgggaggccaacatctacatggtgccccagaacatcaagccagccctgcagaggacagccatcgagatcctggcctggggcctgaggaacatgaagagctaccagctggccaacatcagcagccccagcctggtggtggagtgtggcggccagacagtgcagagctgtgtgatccggaacctgaggaagaaccccaactttgacatctgcaccctcttcatggaggtgatgctgccccgggaggagctgtactgcccccccatcaccgtgaaggtgattgacaaccggcagtttggccggcggcctgtggtgggccagtgcaccatccgcagcctggagagcttcctgtgtgacccctacagcgctgagagccccagcccccagggcggcccagatgatgtgtccctgctgagccctggagaagatgtgctgattgatattgatgacaaggagcccctcatccccatccaggaggaggagttcatcgactggtggagcaagttctttgccagcatcggggagcgggagaagtgtggcagctacctggagaaggactttgacaccctgaaggtgtatgacacccagctggagaatgtggaggcctttgagggcctgagtgacttctgcaacaccttcaagctgtaccggggcaagacccaggaggagacagaggaccccagcgtgattggagagttcaagggcctcttcaagatctaccccctgcctgaagatcctgccatccccatgccaccccggcagttccaccagctggccgcccagggcccccaggagtgcctggtgcgcatctacatcgtgcgggccttcggcctgcagcccaaggaccccaatggaaaatgtgacccctacatcaagatcagcatcggcaagaagtctgtgtctgaccaggacaactacatcccctgcaccctggagcctgtgtttgggaagatgtttgagctgacctgcaccctgcccctggagaaggacctgaagatcaccctgtatgactatgacctgctgagcaaggatgagaagatcggggagaccgtggtggacctggagaaccggctgctgagcaagtttggagcccgctgtggcctgccccagacctactgtgtgtctggccccaaccagtggagggaccagctgcggcccagccagctgctgcacctgttctgccagcagcaccgggtgaaggcccctgtgtacagaacagacagagtgatgttccaggacaaggagtacagcattgaggagattgaggccggccgcatccccaacccccacctgggccctgtggaggagcggctggccctgcacgtgctgcagcagcagggcctggtgcctgagcacgtggagagccggcccctgtacagccccctgcagcctgacatcgagcagggcaagctgcagatgtgggtggacctcttccccaaggccctgggccggcccggcccccccttcaacatcaccccaagaagagcccggcgcttcttcctgcgctgcatcatctggaacaccagagatgtgatcctggatgacctgagcctgaccggggagaagatgtctgacatctacgtgaagggctggatgattggatttgaggagcacaagcagaagacagatgtgcactaccgcagcctgggcggggagggcaacttcaactggaggttcatcttcccctttgactacctgcctgctgagcaggtgtgcaccatcgccaagaaggatgccttctggaggctggacaagacagagagcaagatcccagcccgggtggtgttccagatctgggacaatgacaagttctcctttgatgacttcctgggcagcctgcagctggacctgaacaggatgcccaagccagccaagacagccaagaagtgcagcctggaccagctggatgatgccttccaccctgagtggtttgtgtccctgtttgagcagaagacagtgaagggctggtggccctgtgtggccgaggagggggagaagaagatcctggccggcaagctggagatgaccctggagatcgtggccgagagcgagcacgaggagaggcctgctggccagggcagagatgagcccaacatgaaccccaagctggaggacccccggcggccagacaccagcttcctgtggttcaccagcccctacaagaccatgaagttcatcctgtggaggcgcttccgctgggccatcatcctcttcatcatcctcttcatcctgctgctcttcctggccatcttcatctatgccttccccaactatgctgccatgaagctggtgaagcccttctcctag

SEQ ID NO: 3100 - DNA, 6360 bp, synthetic construct
  misc_feature 1..6360: note = source = /note="Description of Artificial Sequence: Synthetic coding sequence"
  source 1..6360: mol_type = other DNA
atgctgtgctgcctgctggtgcgggccagcaacctgcccagcgccaagaaggacagaagaagtgaccctgtggccagcctgaccttccggggcgtgaagaagaggaccaaggtgatcaagaacagcgtgaaccctgtgtggaatgaaggatttgagtgggacctgaagggcatccccctggaccagggcagcgagctgcacgtggtggtgaaggaccacgagaccatgggcaggaaccgcttcctgggggaggccaaggtgcccctgcgggaggtgctggccacccccagcctgagcgccagcttcaatgcccccctgctggacaccaagaagcagcccaccggggccagcctggtgctgcaggtgtcctacacccccctgcccggggctgtgcccctcttccccccacccacccccctggagcccagccccaccctgcctgacctggatgtggtggccggcggcggccagagcagagctgagacctggagcctgctgagtgacagcaccatggacacccgctacagcggcaagaagtggccagcccccacagacaccggcggggaggaggacacagaggaccagggcctgactggagatgaggccgagcccttcctggaccagagcggcggccctggggcccccaccacccccaggaagctgcccagccggcccccaccccactacccaggcatcaagaggaagaggtctgcccccaccagcaggaagctgctgagtgacaagccccaggacttccagatccgggtgcaggtgattgagggccggcagctgcccggggtgaacatcaagcctgtggtgaaggtgacagctgctggccagaccaagaggacccgcatccacaagggcaacagccccctcttcaatgagaccctcttcttcaacctgtttgacagccctggagagctgtttgatgagcccatcttcatcaccgtggtggacagccgcagcctgaggacagatgccctgctgggggagttcaggatggatgtgggcaccatctaccgggagcccaggcatgcctacctgaggaagtggctgctgctgagtgaccctgatgacttctctgctggggcccggggctacctgaagaccagcctgtgtgtgctgggccctggagatgaggcccccctggagaggaaggaccccagcgaggacaaggaggacatcgagagcaacctgctgcggcccaccggggtggccctgcggggggcccacttctgcctgaaggtgttccgggcagaggacctgccccagatggatgatgctgtgatggacaacgtgaagcagatcttcggctttgagagcaacaagaagaacctggtggacccctttgtggaggtgtcctttgctgggaagatgctgtgcagcaagatcctggagaagacagccaacccccagtggaaccagaacatcaccctgcctgccatgttccccagcatgtgtgagaagatgaggatccgcatcatcgactgggaccggctgacccacaatgacatcgtggccaccacctacctgtccatgagcaagatcagcgcccctggaggagaaattgaggtggatgactacctgggcttcctgcccaccttcggcccctgctacatcaacctgtatggcagcccccgggagttcaccggcttcccagacccctacacagagctgaacacaggcaagggggagggcgtggcctaccggggccgcctgctgctgagcctggagaccaagctggtggagcacagcgagcagaaggtggaggacctgcctgcagatgacatcctgcgggtggagaagtacctgcggcggaggaagtacagcctgtttgctgccttctacagcgccaccatgctgcaggatgtggatgatgccatccagtttgaggtgtccatcggcaactacggcaacaagtttgacatgacctgcctgcccctggccagcaccacccagtacagcagagctgtgtttgatggctgccactactactacctgccctggggcaatgtgaagcctgtggtggtgctgagcagctactgggaggacatcagccaccgcatcgagacccagaaccagctgctgggcattgctgaccggctggaggccggcctggagcaggtgcacctggccctgaaggcccagtgcagcacagaagatgtggacagcctggtggcccagctgacagatgagctgattgctggctgcagccagcccctgggggacatccacgagacccccagcgccacccacctggaccagtacctgtaccagctgcggacccaccacctgagccagatcacagaggccgccctggccctgaagctgggccacagcgagctgcctgctgccctggagcaggccgaggactggctgctgcggctgcgggccctggccgaggagccccagaacagcctgcctgacatcgtcatctggatgctgcagggcgacaagagggtggcctaccagagggtgcctgcccaccaggtgctcttcagccggcggggggccaactactgtgggaagaactgtgggaagctgcagaccatcttcctgaagtaccccatggagaaggtgcctggggccaggatgcctgtgcagatccgggtgaagctgtggtttggcctgtctgtggatgagaaggagttcaaccagtttgctgagggcaagctgtctgtgtttgctgagacctatgaaaatgagaccaagctggccctggtgggcaactggggcaccaccggcctgacctaccccaagttcagtgatgtgacaggcaagatcaagctgcccaaggacagcttccggcccagcgctggctggacctgggccggggactggtttgtgtgcccagagaagaccctgctgcatgacatggatgctggccacctgagctttgtggaggaggtgtttgagaaccagacccggctgcccggcggccagtggatctacatgtctgacaactacacagatgtgaatggagagaaggtgctgcccaaggatgacattgaatgtcccctgggctggaagtgggaggatgaggagtggagcacagacctgaacagagctgtggatgagcagggctgggagtacagcatcaccatccccccagagaggaagcccaagcactgggtgcctgctgagaagatgtactacacccacagaagaagacgctgggtgcggctgcggcggcgggacctgagccagatggaggccctgaagaggcaccggcaggccgaggccgagggggagggctgggagtatgccagcctgtttggctggaagttccacctggagtacaggaagacagatgccttcagaagaagacgctggaggaggaggatggagcccctggagaagacaggccctgctgctgtgtttgccctggagggcgccctgggcggcgtgatggatgacaagtcagaagattccatgtctgtgtccaccctgagctttggagtgaaccggcccaccatcagctgcatctttgattatggcaaccgctaccacctgcgctgctacatgtaccaggcccgggacctggccgccatggacaaggacagcttcagtgacccctatgccatcgtgtccttcctgcaccagagccagaagacagtggtggtgaagaacaccctgaaccccacctgggaccagaccctcatcttctatgaaattgagatctttggagagcccgccaccgtggccgagcagcccccatccatcgtggtggagctgtatgaccatgacacctacggggctgatgagttcatgggccgctgcatctgccagcccagcctggagaggatgccccggctggcctggttccccctgacccggggcagccagcccagcggggagctgctggccagctttgagctgatccagcgggagaagccagccatccaccacatccctggctttgaggtgcaggagaccagccgcatcctggatgaaagtgaggacacagacctgccctaccccccaccccagcgggaggccaacatctacatggtgccccagaacatcaagccagccctgcagaggacagccatcgagatcctggcctggggcctgaggaacatgaagagctaccagctggccaacatcagcagccccagcctggtggtggagtgtggcggccagacagtgcagagctgtgtgatccggaacctgaggaagaaccccaactttgacatctgcaccctcttcatggaggtgatgctgccccgggaggagctgtactgcccccccatcaccgtgaaggtgattgacaaccggcagtttggaagaagacctgtggtgggccagtgcaccatccgcagcctggagagcttcctgtgtgacccctacagcgctgagagccccagcccccagggcggcccagatgatgtgtccctgctgagccctggagaagatgtgctgattgatattgatgacaaggagcccctcatccccatccagctggctgatggcctgagcagcctggcccccaccaacacagccagcccccccagcagcccccatgaggaggagttcatcgactggtggagcaagttctttgccagcatcggggagcgggagaagtgtggcagctacctggagaaggactttgacaccctgaaggtgtatgacacccagctggagaatgtggaggcctttgagggcctgagtgacttctgcaacaccttcaagctgtaccggggcaagacccaggaggagacagaggaccccagcgtgattggagagttcaagggcctcttcaagatctaccccctgcctgaagatcctgccatccccatgccaccccggcagttccaccagctggccgcccagggcccccaggagtgcctggtgcgcatctacatcgtgcgggccttcggcctgcagcccaaggaccccaatggaaaatgtgacccctacatcaagatcagcatcggcaagaagtctgtgtctgaccaggacaactacatcccctgcaccctggagcctgtgtttgggaagatgtttgagctgacctgcaccctgcccctggagaaggacctgaagatcaccctgtatgactatgacctgctgagcaaggatgagaagatcggggagaccgtggtggacctggagaaccggctgctgagcaagtttggagcccgctgtggcctgccccagacctactgtgtgtctggccccaaccagtggagggaccagctgcggcccagccagctgctgcacctgttctgccagcagcaccgggtgaaggcccctgtgtacagaacagacagagtgatgttccaggacaaggagtacagcattgaggagattgaggccggccgcatccccaacccccacctgggccctgtggaggagcggctggccctgcacgtgctgcagcagcagggcctggtgcctgagcacgtggagagccggcccctgtacagccccctgcagcctgacatcgagcagggcaagctgcagatgtgggtggacctcttccccaaggccctgggccggcccggcccccccttcaacatcaccccaagaagagcccggcgcttcttcctgcgctgcatcatctggaacaccagagatgtgatcctggatgacctgagcctgaccggggagaagatgtctgacatctacgtgaagggctggatgattggatttgaggagcacaagcagaagacagatgtgcactaccgcagcctgggcggggagggcaacttcaactggaggttcatcttcccctttgactacctgcctgctgagcaggtgtgcaccatcgccaagaaggatgccttctggaggctggacaagacagagagcaagatcccagcccgggtggtgttccagatctgggacaatgacaagttctcctttgatgacttcctgggcagcctgcagctggacctgaacaggatgcccaagccagccaagacagccaagaagtgcagcctggaccagctggatgatgccttccaccctgagtggtttgtgtccctgtttgagcagaagacagtgaagggctggtggccctgtgtggccgaggagggggagaagaagatcctggccggcaagctggagatgaccctggagatcgtggccgagagcgagcacgaggagaggcctgctggccagggcagagatgagcccaacatgaaccccaagctggaggacccccggcggccagacaccagcttcctgtggttcaccagcccctacaagaccatgaagttcatcctgtggaggcgcttccgctgggccatcatcctcttcatcatcctcttcatcctgctgctcttcctggccatcttcatctatgccttccccaactatgctgccatgaagctggtgaagcccttctcctag

SEQ ID NO: 3101 - DNA, 6297 bp, synthetic construct
  misc_feature 1..6297: note = source = /note="Description of Artificial Sequence: Synthetic coding sequence"
  source 1..6297: mol_type = other DNA
atgctgtgctgcctgctggtgcgggccagcaacctgcccagcgccaagaaggacagaagaagtgaccctgtggccagcctgaccttccggggcgtgaagaagaggaccaaggtgatcaagaacagcgtgaaccctgtgtggaatgaaggatttgagtgggacctgaagggcatccccctggaccagggcagcgagctgcacgtggtggtgaaggaccacgagaccatgggcaggaaccgcttcctgggggaggccaaggtgcccctgcgggaggtgctggccacccccagcctgagcgccagcttcaatgcccccctgctggacaccaagaagcagcccaccggggccagcctggtgctgcaggtgtcctacacccccctgcccggggctgtgcccctcttccccccacccacccccctggagcccagccccaccctgcctgacctggatgtggtggccggcggcggccagagcagagctgagacctggagcctgctgagtgacagcaccatggacacccgctacagcggcaagaagtggccagcccccacagacaccggcggggaggaggacacagaggaccagggcctgactggagatgaggccgagcccttcctggaccagagcggcggccctggggcccccaccacccccaggaagctgcccagccggcccccaccccactacccaggcatcaagaggaagaggtctgcccccaccagcaggaagctgctgagtgacaagccccaggacttccagatccgggtgcaggtgattgagggccggcagctgcccggggtgaacatcaagcctgtggtgaaggtgacagctgctggccagaccaagaggacccgcatccacaagggcaacagccccctcttcaatgagaccctcttcttcaacctgtttgacagccctggagagctgtttgatgagcccatcttcatcaccgtggtggacagccgcagcctgaggacagatgccctgctgggggagttcaggatggatgtgggcaccatctaccgggagcccaggcatgcctacctgaggaagtggctgctgctgagtgaccctgatgacttctctgctggggcccggggctacctgaagaccagcctgtgtgtgctgggccctggagatgaggcccccctggagaggaaggaccccagcgaggacaaggaggacatcgagagcaacctgctgcggcccaccggggtggccctgcggggggcccacttctgcctgaaggtgttccgggcagaggacctgccccagatggatgatgctgtgatggacaacgtgaagcagatcttcggctttgagagcaacaagaagaacctggtggacccctttgtggaggtgtcctttgctgggaagatgctgtgcagcaagatcctggagaagacagccaacccccagtggaaccagaacatcaccctgcctgccatgttccccagcatgtgtgagaagatgaggatccgcatcatcgactgggaccggctgacccacaatgacatcgtggccaccacctacctgtccatgagcaagatcagcgcccctggaggagaaattgaggtggatgactacctgggcttcctgcccaccttcggcccctgctacatcaacctgtatggcagcccccgggagttcaccggcttcccagacccctacacagagctgaacacaggcaagggggagggcgtggcctaccggggccgcctgctgctgagcctggagaccaagctggtggagcacagcgagcagaaggtggaggacctgcctgcagatgacatcctgcgggtggagaagtacctgcggcggaggaagtacagcctgtttgctgccttctacagcgccaccatgctgcaggatgtggatgatgccatccagtttgaggtgtccatcggcaactacggcaacaagtttgacatgacctgcctgcccctggccagcaccacccagtacagcagagctgtgtttgatggctgccactactactacctgccctggggcaatgtgaagcctgtggtggtgctgagcagctactgggaggacatcagccaccgcatcgagacccagaaccagctgctgggcattgctgaccggctggaggccggcctggagcaggtgcacctggccctgaaggcccagtgcagcacagaagatgtggacagcctggtggcccagctgacagatgagctgattgctggctgcagccagcccctgggggacatccacgagacccccagcgccacccacctggaccagtacctgtaccagctgcggacccaccacctgagccagatcacagaggccgccctggccctgaagctgggccacagcgagctgcctgctgccctggagcaggccgaggactggctgctgcggctgcgggccctggccgaggagccccagaacagcctgcctgacatcgtcatctggatgctgcagggcgacaagagggtggcctaccagagggtgcctgcccaccaggtgctcttcagccggcggggggccaactactgtgggaagaactgtgggaagctgcagaccatcttcctgaagtaccccatggagaaggtgcctggggccaggatgcctgtgcagatccgggtgaagctgtggtttggcctgtctgtggatgagaaggagttcaaccagtttgctgagggcaagctgtctgtgtttgctgagacctatgaaaatgagaccaagctggccctggtgggcaactggggcaccaccggcctgacctaccccaagttcagtgatgtgacaggcaagatcaagctgcccaaggacagcttccggcccagcgctggctggacctgggccggggactggtttgtgtgcccagagaagaccctgctgcatgacatggatgctggccacctgagctttgtggaggaggtgtttgagaaccagacccggctgcccggcggccagtggatctacatgtctgacaactacacagatgtgaatggagagaaggtgctgcccaaggatgacattgaatgtcccctgggctggaagtgggaggatgaggagtggagcacagacctgaacagagctgtggatgagcagggctgggagtacagcatcaccatccccccagagaggaagcccaagcactgggtgcctgctgagaagatgtactacacccacagaagaagacgctgggtgcggctgcggcggcgggacctgagccagatggaggccctgaagaggcaccggcaggccgaggccgagggggagggctgggagtatgccagcctgtttggctggaagttccacctggagtacaggaagacagatgccttcagaagaagacgctggaggaggaggatggagcccctggagaagacaggccctgctgctgtgtttgccctggagggcgccctgggcggcgtgatggatgacaagtcagaagattccatgtctgtgtccaccctgagctttggagtgaaccggcccaccatcagctgcatctttgattatggcaaccgctaccacctgcgctgctacatgtaccaggcccgggacctggccgccatggacaaggacagcttcagtgacccctatgccatcgtgtccttcctgcaccagagccagaagacagtggtggtgaagaacaccctgaaccccacctgggaccagaccctcatcttctatgaaattgagatctttggagagcccgccaccgtggccgagcagcccccatccatcgtggtggagctgtatgaccatgacacctacggggctgatgagttcatgggccgctgcatctgccagcccagcctggagaggatgccccggctggcctggttccccctgacccggggcagccagcccagcggggagctgctggccagctttgagctgatccagcgggagaagccagccatccaccacatccctggctttgaggtgcaggagaccagccgcatcctggatgaaagtgaggacacagacctgccctaccccccaccccagcgggaggccaacatctacatggtgccccagaacatcaagccagccctgcagaggacagccatcgagatcctggcctggggcctgaggaacatgaagagctaccagctggccaacatcagcagccccagcctggtggtggagtgtggcggccagacagtgcagagctgtgtgatccggaacctgaggaagaaccccaactttgacatctgcaccctcttcatggaggtgatgctgccccgggaggagctgtactgcccccccatcaccgtgaaggtgattgacaaccggcagtttggaagaagacctgtggtgggccagtgcaccatccgcagcctggagagcttcctgtgtgacccctacagcgctgagagccccagcccccagggcggcccagatgatgtgtccctgctgagccctggagaagatgtgctgattgatattgatgacaaggagcccctcatccccatccaggaggaggagttcatcgactggtggagcaagttctttgccagcattggagagcgggagaagtgtggcagctacctggagaaggactttgacaccctgaaggtgtatgacacccagctggagaatgtggaggcctttgagggcctgagtgacttctgcaacaccttcaagctgtaccggggcaagacccaggaggagacagaggaccccagcgtcatcggggagttcaagggcctcttcaagatctaccccctgcctgaggaccctgccatccccatgccaccccggcagttccaccagctggccgcccagggcccccaggagtgcctggtgcgcatctacatcgtgcgggccttcggcctgcagcccaaggaccccaacgggaaatgtgacccctacatcaagatcagcatcggcaagaagtctgtgtctgaccaggacaactacatcccctgcaccctggagcctgtgtttgggaagatgtttgagctgacctgcaccctgcccctggagaaggacctgaagatcaccctgtatgactatgacctgctgagcaaggatgagaagattggagagaccgtggtggacctggagaaccggctgctgagcaagtttggagcccgctgtggcctgccccagacctactgtgtgtctggccccaaccagtggagggaccagctgcggcccagccagctgctgcacctgttctgccagcagcaccgggtgaaggcccctgtgtacagaacagacagagtgatgttccaggacaaggagtacagcattgaggagattgaagctggccgcatccccaacccccacctgggccctgtggaggagcggctggccctgcacgtgctgcagcagcagggcctggtgcctgagcacgtggagagccggcccctgtacagccccctgcagcctgacatcgagcagggcaagctgcagatgtgggtggacctcttccccaaggccctgggccggcccggcccccccttcaacatcaccccccggcgggcccggcgcttcttcctgcgctgcatcatctggaacaccagagatgtgatcctggatgacctgagcctgactggagagaagatgtctgacatctacgtgaagggctggatgattggatttgaggagcacaagcagaagacagatgtgcactaccgcagcctgggcggggagggcaacttcaactggaggttcatcttcccctttgactacctgcctgctgagcaggtgtgcaccatcgccaagaaggatgccttctggaggctggacaagacagagagcaagatcccagcccgggtggtgttccagatctgggacaatgacaagttctcctttgatgacttcctgggcagcctgcagctggacctgaacaggatgcccaagccagccaagacagccaagaagtgcagcctggaccagctggatgatgccttccaccctgagtggtttgtgtccctgtttgagcagaagacagtgaagggctggtggccctgtgtggccgaggagggggagaagaagatcctggccggcaagctggagatgaccctggagatcgtggccgagagcgagcacgaggagaggcctgctggccagggcagagatgagcccaacatgaaccccaagctggaggaccccaggaggccagacaccagcttcctgtggttcaccagcccctacaagaccatgaagttcatcctgtggaggcgcttccgctgggccatcatcctcttcatcatcctcttcatcctgctgctcttcctggccatcttcatctatgccttccccaactatgctgccatgaagctggtgaagcccttctcctag

SEQ ID NO: 3102 - DNA, 6336 bp, synthetic construct
  misc_feature 1..6336: note = source = /note="Description of Artificial Sequence: Synthetic coding sequence"
  source 1..6336: mol_type = other DNA
atgctgcgggtcttcatcctgtatgcagaaaatgtgcacaccccagacacagacatcagtgatgcctactgcagcgctgtgtttgctggggtgaagaagaggaccaaggtgatcaagaacagcgtgaaccctgtgtggaatgaaggatttgagtgggacctgaagggcatccccctggaccagggcagcgagctgcacgtggtggtgaaggaccacgagaccatgggcaggaaccgcttcctgggggaggccaaggtgcccctgcgggaggtgctggccacccccagcctgagcgccagcttcaatgcccccctgctggacaccaagaagcagcccactggagccagcctggtgctgcaggtgtcctacacccccctgcctggagctgtgcccctcttccccccacccacccccctggagcccagccccaccctgcctgacctggatgtggtggccggcggcggccagagcagagctgagacctggagcctgctgagtgacagcaccatggacacccgctacagcggcaagaagtggccagcccccacagacacaggaggagaggaggacacagaggaccagggcctgactggagatgaagctgagcccttcctggaccagagcggcggccctggggcccccaccacccccaggaagctgcccagccggcccccaccccactacccaggcatcaagaggaagaggtctgcccccaccagcaggaagctgctgagtgacaagccccaggacttccagatccgggtgcaggtgattgagggccggcagctgcccggggtgaacatcaagcctgtggtgaaggtgacagctgctggccagaccaagaggacccgcatccacaagggcaacagccccctcttcaatgagaccctcttcttcaacctgtttgacagccctggagagctgtttgatgagcccatcttcatcaccgtggtggacagccgcagcctgaggacagatgccctgctgggggagttcaggatggatgtgggcaccatctaccgggagcccaggcatgcctacctgaggaagtggctgctgctgagtgaccctgatgacttctctgctggggcccggggctacctgaagaccagcctgtgtgtgctgggccctggagatgaggcccccctggagaggaaggaccccagcgaggacaaggaggacatcgagagcaacctgctgcggcccactggagtggccctgcggggggcccacttctgcctgaaggtgttccgggcagaggacctgccccagatggatgatgctgtgatggacaacgtgaagcagatctttggatttgagagcaacaagaagaacctggtggacccctttgtggaggtgtcctttgctgggaagatgctgtgcagcaagatcctggagaagacagccaacccccagtggaaccagaacatcaccctgcctgccatgttccccagcatgtgtgagaagatgaggatccgcatcatcgactgggaccggctgacccacaatgacatcgtggccaccacctacctgtccatgagcaagatcagcgcccctggaggagaaattgaggaggagcctgctggagctgtgaagcccagcaaggccagtgacctggatgactacctgggcttcctgcccaccttcggcccctgctacatcaacctgtatggcagcccccgggagttcaccggcttcccagacccctacacagagctgaacacaggaaaaggagagggcgtggcctaccggggccgcctgctgctgagcctggagaccaagctggtggagcacagcgagcagaaggtggaggacctgcctgcagatgacatcctgcgggtggagaagtacctgcggcggaggaagtacagcctgtttgctgccttctacagcgccaccatgctgcaggatgtggatgatgccatccagtttgaggtgtccatcggcaactacggcaacaagtttgacatgacctgcctgcccctggccagcaccacccagtacagcagagctgtgtttgatggctgccactactactacctgccctggggcaatgtgaagcctgtggtggtgctgagcagctactgggaggacatcagccacagaattgagacccagaaccagctgctgggcattgctgaccggctggaggccggcctggagcaggtgcacctggccctgaaggcccagtgcagcacagaagatgtggacagcctggtggcccagctgacagatgagctgattgctggctgcagccagcccctgggggacatccacgagaccccatctgccacccacctggaccagtacctgtaccagctgcggacccaccacctgagccagatcacagaagctgccctggccctgaagctgggccacagcgagctgcctgctgccctggagcaggccgaggactggctgctgcggctgcgggccctggccgaggagccccagaacagcctgcctgacatcgtcatctggatgctgcagggcgacaagagggtggcctaccagagggtgcctgcccaccaggtgctcttcagcagaagaggagccaactactgcggcaagaactgtgggaagctgcagaccatcttcctgaagtaccccatggagaaggtgcctggggccaggatgcctgtgcagatccgggtgaagctgtggtttggcctgtctgtggatgagaaggagttcaaccagtttgctgagggcaagctgtctgtgtttgctgagacctatgaaaatgagaccaagctggccctggtgggcaactggggcaccaccggcctgacctaccccaagttcagtgatgtgacaggcaagatcaagctgcccaaggacagcttccggcccagcgctggctggacctgggccggggactggtttgtgtgcccagagaagaccctgctgcatgacatggatgctggccacctgagctttgtggaggaggtgtttgagaaccagacccggctgcccggcggccagtggatctacatgtctgacaactacacagatgtgaatggagagaaggtgctgcccaaggatgacatcgagtgccccctgggctggaagtgggaggatgaggagtggagcacagacctgaacagagctgtggatgagcagggctgggagtacagcatcaccatccccccagagaggaagcccaagcactgggtgcctgctgagaagatgtactacacccacagaagaagacgctgggtgcggctgcggcggcgggacctgagccagatggaggccctgaagaggcaccggcaggccgaggccgagggggagggctgggagtatgccagcctgtttggctggaagttccacctggagtacaggaagacagatgccttcagaagaagacgctggaggaggaggatggagcccctggagaagacaggccctgctgctgtgtttgccctggagggcgccctgggcggcgtgatggatgacaagtctgaggacagcatgtctgtgtccaccctgagctttggagtgaaccggcccaccatcagctgcatctttgattatggcaaccgctaccacctgcgctgctacatgtaccaggcccgggacctggccgccatggacaaggacagcttcagtgacccctatgccatcgtgtccttcctgcaccagagccagaagacagtggtggtgaagaacaccctgaaccccacctgggaccagaccctcatcttctatgaaattgagatctttggagagcccgccaccgtggccgagcagccccccagcatcgtggtggagctgtatgaccatgacacctatggagcagatgagttcatgggccgctgcatctgccagcccagcctggagaggatgccccggctggcctggttccccctgacccggggcagccagcccagcggggagctgctggccagctttgagctgatccagcgggagaagccagccatccaccacatccctggctttgaggtgcaggagaccagccgcatcctggatgaaagtgaggacacagacctgccctaccccccaccccagcgggaggccaacatctacatggtgccccagaacatcaagccagccctgcagaggacagccatcgagatcctggcctggggcctgaggaacatgaagagctaccagctggccaacatcagcagccccagcctggtggtggagtgtggcggccagacagtgcagagctgtgtgatccggaacctgaggaagaaccccaactttgacatctgcaccctcttcatggaggtgatgctgccccgggaggagctgtactgcccccccatcaccgtgaaggtgattgacaaccggcagtttggccggcggcctgtggtgggccagtgcaccatccgcagcctggagagcttcctgtgtgacccctacagcgctgagagccccagcccccagggcggcccagatgatgtgtccctgctgagccctggagaagatgtgctgattgatattgatgacaaggagcccctcatccccatccaggaggaggagttcatcgactggtggagcaagttctttgccagcatcggggagcgggagaagtgtggcagctacctggagaaggactttgacaccctgaaggtgtatgacacccagctggagaatgtggaggcctttgagggcctgagtgacttctgcaacaccttcaagctgtaccggggcaagacccaggaggagacagaggaccccagcgtgattggagagttcaagggcctcttcaagatctaccccctgcctgaagatcctgccatccccatgccaccccggcagttccaccagctggccgcccagggcccccaggagtgcctggtgcgcatctacatcgtgcgggccttcggcctgcagcccaaggaccccaatggaaaatgtgacccctacatcaagatcagcatcggcaagaagtctgtgtctgaccaggacaactacatcccctgcaccctggagcctgtgtttgggaagatgtttgagctgacctgcaccctgcccctggagaaggacctgaagatcaccctgtatgactatgacctgctgagcaaggatgagaagatcggggagaccgtggtggacctggagaaccggctgctgagcaagtttggagcccgctgtggcctgccccagacctactgtgtgtctggccccaaccagtggagggaccagctgcggcccagccagctgctgcacctgttctgccagcagcaccgggtgaaggcccctgtgtacagaacagacagagtgatgttccaggacaaggagtacagcattgaggagattgaggccggccgcatccccaacccccacctgggccctgtggaggagcggctggccctgcacgtgctgcagcagcagggcctggtgcctgagcacgtggagagccggcccctgtacagccccctgcagcctgacatcgagcagggcaagctgcagatgtgggtggacctcttccccaaggccctgggccggcccggcccccccttcaacatcaccccaagaagagcccggcgcttcttcctgcgctgcatcatctggaacaccagagatgtgatcctggatgacctgagcctgaccggggagaagatgtctgacatctacgtgaagggctggatgattggatttgaggagcacaagcagaagacagatgtgcactaccgcagcctgggcggggagggcaacttcaactggaggttcatcttcccctttgactacctgcctgctgagcaggtgtgcaccatcgccaagaaggatgccttctggaggctggacaagacagagagcaagatcccagcccgggtggtgttccagatctgggacaatgacaagttctcctttgatgacttcctgggcagcctgcagctggacctgaacaggatgcccaagccagccaagacagccaagaagtgcagcctggaccagctggatgatgccttccaccctgagtggtttgtgtccctgtttgagcagaagacagtgaagggctggtggccctgtgtggccgaggagggggagaagaagatcctggccggcaagctggagatgaccctggagatcgtggccgagagcgagcacgaggagaggcctgctggccagggcagagatgagcccaacatgaaccccaagctggaggacccccggcggccagacaccagcttcctgtggttcaccagcccctacaagaccatgaagttcatcctgtggaggcgcttccgctgggccatcatcctcttcatcatcctcttcatcctgctgctcttcctggccatcttcatctatgccttccccaactatgctgccatgaagctggtgaagcccttctcctag

SEQ ID NO: 3103 - DNA, 6306 bp, synthetic construct
  misc_feature 1..6306: note = source = /note="Description of Artificial Sequence: Synthetic coding sequence"
  source 1..6306: mol_type = other DNA
atgctgcgggtcttcatcctgtatgcagaaaatgtgcacaccccagacacagacatcagtgatgcctactgcagcgctgtgtttgctggggtgaagaagaggaccaaggtgatcaagaacagcgtgaaccctgtgtggaatgaaggatttgagtgggacctgaagggcatccccctggaccagggcagcgagctgcacgtggtggtgaaggaccacgagaccatgggcaggaaccgcttcctgggggaggccaaggtgcccctgcgggaggtgctggccacccccagcctgagcgccagcttcaatgcccccctgctggacaccaagaagcagcccactggagccagcctggtgctgcaggtgtcctacacccccctgcctggagctgtgcccctcttccccccacccacccccctggagcccagccccaccctgcctgacctggatgtggtggccgacaccggcggggaggaggacacagaggaccagggcctgactggagatgaggccgagcccttcctggaccagagcggcggccctggggcccccaccacccccaggaagctgcccagccggcccccaccccactacccaggcatcaagaggaagaggtctgcccccaccagcaggaagctgctgagtgacaagccccaggacttccagatccgggtgcaggtgattgagggccggcagctgcccggggtgaacatcaagcctgtggtgaaggtgacagctgctggccagaccaagaggacccgcatccacaagggcaacagccccctcttcaatgagaccctcttcttcaacctgtttgacagccctggagagctgtttgatgagcccatcttcatcaccgtggtggacagccgcagcctgaggacagatgccctgctgggggagttcaggatggatgtgggcaccatctaccgggagcccaggcatgcctacctgaggaagtggctgctgctgagtgaccctgatgacttctctgctggggcccggggctacctgaagaccagcctgtgtgtgctgggccctggagatgaggcccccctggagaggaaggaccccagcgaggacaaggaggacatcgagagcaacctgctgcggcccaccggggtggccctgcggggggcccacttctgcctgaaggtgttccgggcagaggacctgccccagatggatgatgctgtgatggacaacgtgaagcagatcttcggctttgagagcaacaagaagaacctggtggacccctttgtggaggtgtcctttgctgggaagatgctgtgcagcaagatcctggagaagacagccaacccccagtggaaccagaacatcaccctgcctgccatgttccccagcatgtgtgagaagatgaggatccgcatcatcgactgggaccggctgacccacaatgacatcgtggccaccacctacctgtccatgagcaagatcagcgcccctggaggagaaattgaggaggagcctgctggagctgtgaagcccagcaaggccagtgacctggatgactacctgggcttcctgcccaccttcggcccctgctacatcaacctgtatggcagcccccgggagttcaccggcttcccagacccctacacagagctgaacacaggcaagggggagggcgtggcctaccggggccgcctgctgctgagcctggagaccaagctggtggagcacagcgagcagaaggtggaggacctgcctgcagatgacatcctgcgggtggagaagtacctgcggcggaggaagtacagcctgtttgctgccttctacagcgccaccatgctgcaggatgtggatgatgccatccagtttgaggtgtccatcggcaactacggcaacaagtttgacatgacctgcctgcccctggccagcaccacccagtacagcagagctgtgtttgatggctgccactactactacctgccctggggcaatgtgaagcctgtggtggtgctgagcagctactgggaggacatcagccaccgcatcgagacccagaaccagctgctgggcattgctgaccggctggaggccggcctggagcaggtgcacctggccctgaaggcccagtgcagcacagaagatgtggacagcctggtggcccagctgacagatgagctgattgctggctgcagccagcccctgggggacatccacgagacccccagcgccacccacctggaccagtacctgtaccagctgcggacccaccacctgagccagatcacagaggccgccctggccctgaagctgggccacagcgagctgcctgctgccctggagcaggccgaggactggctgctgcggctgcgggccctggccgaggagccccagaacagcctgcctgacatcgtcatctggatgctgcagggcgacaagagggtggcctaccagagggtgcctgcccaccaggtgctcttcagccggcggggggccaactactgtgggaagaactgtgggaagctgcagaccatcttcctgaagtaccccatggagaaggtgcctggggccaggatgcctgtgcagatccgggtgaagctgtggtttggcctgtctgtggatgagaaggagttcaaccagtttgctgagggcaagctgtctgtgtttgctgagacctatgaaaatgagaccaagctggccctggtgggcaactggggcaccaccggcctgacctaccccaagttcagtgatgtgacaggcaagatcaagctgcccaaggacagcttccggcccagcgctggctggacctgggccggggactggtttgtgtgcccagagaagaccctgctgcatgacatggatgctggccacctgagctttgtggaggaggtgtttgagaaccagacccggctgcccggcggccagtggatctacatgtctgacaactacacagatgtgaatggagagaaggtgctgcccaaggatgacattgaatgtcccctgggctggaagtgggaggatgaggagtggagcacagacctgaacagagctgtggatgagcagggctgggagtacagcatcaccatccccccagagaggaagcccaagcactgggtgcctgctgagaagatgtactacacccacagaagaagacgctgggtgcggctgcggcggcgggacctgagccagatggaggccctgaagaggcaccggcaggccgaggccgagggggagggctgggagtatgccagcctgtttggctggaagttccacctggagtacaggaagacagatgccttcagaagaagacgctggaggaggaggatggagcccctggagaagacaggccctgctgctgtgtttgccctggagggcgccctgggcggcgtgatggatgacaagtcagaagattccatgtctgtgtccaccctgagctttggagtgaaccggcccaccatcagctgcatctttgattatggcaaccgctaccacctgcgctgctacatgtaccaggcccgggacctggccgccatggacaaggacagcttcagtgacccctatgccatcgtgtccttcctgcaccagagccagaagacagtggtggtgaagaacaccctgaaccccacctgggaccagaccctcatcttctatgaaattgagatctttggagagcccgccaccgtggccgagcagcccccatccatcgtggtggagctgtatgaccatgacacctacggggctgatgagttcatgggccgctgcatctgccagcccagcctggagaggatgccccggctggcctggttccccctgacccggggcagccagcccagcggggagctgctggccagctttgagctgatccagcgggagaagccagccatccaccacatccctggctttgaggtgcaggagaccagccgcatcctggatgaaagtgaggacacagacctgccctaccccccaccccagcgggaggccaacatctacatggtgccccagaacatcaagccagccctgcagaggacagccatcgagatcctggcctggggcctgaggaacatgaagagctaccagctggccaacatcagcagccccagcctggtggtggagtgtggcggccagacagtgcagagctgtgtgatccggaacctgaggaagaaccccaactttgacatctgcaccctcttcatggaggtgatgctgccccgggaggagctgtactgcccccccatcaccgtgaaggtgattgacaaccggcagtttggaagaagacctgtggtgggccagtgcaccatccgcagcctggagagcttcctgtgtgacccctacagcgctgagagccccagcccccagggcggcccagatgatgtgtccctgctgagccctggagaagatgtgctgattgatattgatgacaaggagcccctcatccccatccagctggctgatggcctgagcagcctggcccccaccaacacagccagcccccccagcagcccccatgaggaggagttcatcgactggtggagcaagttctttgccagcatcggggagcgggagaagtgtggcagctacctggagaaggactttgacaccctgaaggtgtatgacacccagctggagaatgtggaggcctttgagggcctgagtgacttctgcaacaccttcaagctgtaccggggcaagacccaggaggagacagaggaccccagcgtgattggagagttcaagggcctcttcaagatctaccccctgcctgaagatcctgccatccccatgccaccccggcagttccaccagctggccgcccagggcccccaggagtgcctggtgcgcatctacatcgtgcgggccttcggcctgcagcccaaggaccccaatggaaaatgtgacccctacatcaagatcagcatcggcaagaagtctgtgtctgaccaggacaactacatcccctgcaccctggagcctgtgtttgggaagatgtttgagctgacctgcaccctgcccctggagaaggacctgaagatcaccctgtatgactatgacctgctgagcaaggatgagaagatcggggagaccgtggtggacctggagaaccggctgctgagcaagtttggagcccgctgtggcctgccccagacctactgtgtgtctggccccaaccagtggagggaccagctgcggcccagccagctgctgcacctgttctgccagcagcaccgggtgaaggcccctgtgtacagaacagacagagtgatgttccaggacaaggagtacagcattgaggagattgaggccggccgcatccccaacccccacctgggccctgtggaggagcggctggccctgcacgtgctgcagcagcagggcctggtgcctgagcacgtggagagccggcccctgtacagccccctgcagcctgacatcgagcagggcaagctgcagatgtgggtggacctcttccccaaggccctgggccggcccggcccccccttcaacatcaccccaagaagagcccggcgcttcttcctgcgctgcatcatctggaacaccagagatgtgatcctggatgacctgagcctgaccggggagaagatgtctgacatctacgtgaagggctggatgattggatttgaggagcacaagcagaagacagatgtgcactaccgcagcctgggcggggagggcaacttcaactggaggttcatcttcccctttgactacctgcctgctgagcaggtgtgcaccatcgccaagaaggatgccttctggaggctggacaagacagagagcaagatcccagcccgggtggtgttccagatctgggacaatgacaagttctcctttgatgacttcctgggcagcctgcagctggacctgaacaggatgcccaagccagccaagacagccaagaagtgcagcctggaccagctggatgatgccttccaccctgagtggtttgtgtccctgtttgagcagaagacagtgaagggctggtggccctgtgtggccgaggagggggagaagaagatcctggccggcaagctggagatgaccctggagatcgtggccgagagcgagcacgaggagaggcctgctggccagggcagagatgagcccaacatgaaccccaagctggaggacccccggcggccagacaccagcttcctgtggttcaccagcccctacaagaccatgaagttcatcctgtggaggcgcttccgctgggccatcatcctcttcatcatcctcttcatcctgctgctcttcctggccatcttcatctatgccttccccaactatgctgccatgaagctggtgaagcccttctcctag

SEQ ID NO: 3104 - DNA, 447 bp, synthetic construct
  misc_feature 1..447: note = source = /note="Description of Artificial Sequence: Synthetic coding sequence"
  source 1..447: mol_type = other DNA
atgggctacccagaggtggagcggcgggagctgctgcctgctgctgccccccgggagcggggcagccagggctgcggctgcggcggggccccagcccgggccggggagggcaacagctgcctgctcttcctgggcttcttcggcctgagcctggccctgcacctgctgaccctgtgctgctacctggagctgcggtctgagctgcggcgggagagaggagctgagagccggctgggcggcagcggcaccccaggcaccagcggcaccctgagcagcctgggcggcctggaccctgacagccccatcaccagccacctgggccagcccagccccaagcagcagcccctggagcccggggaggccgccctgcacagcgacagccaggacggccaccaggactttgactacatcatctccttctcctatggcctgcagggcttctgctag

SEQ ID NO: 3105 - DNA, 1176 bp, synthetic construct
  misc_feature 1..1176: note = source = /note="Description of Artificial Sequence: Synthetic coding sequence"
  source 1..1176: mol_type = other DNA
atgggctacccagaggtggagcggcgggagctgctgcctgctgctgccccccgggagcggggcagccagggctgcggctgcggcggggccccagcccgggccggggagggcaacagctgcctgctcttcctgggcttcttcggcctgagcctggccctgcacctgctgaccctgtgctgctacctggagctgcggtctgagctgcggcgggagagaggagctgagagccggctgggcggcagcggcaccccaggcaccagcggcaccctgagcagcctgggcggcctggaccctgacagccccatcaccagccacctgggccagcccagccccaagcagcagcccctggagcccggggaggccgccctgcacagcgacagccaggacggccaccagatggccctgctgaacttcttcttcccagatgagaagccctacagcgaggaggagagccggcgggtgagaagaaacaagaggagcaagagcaatgaaggagcagatggccctgtgaagaacaagaagaagggcaagaaggccggccccccaggccccaatggacctcctggccccccaggccccccaggcccccagggccccccaggcatccctggcatccctggcatccctggcaccaccgtgatgggccccccaggccccccaggccccccaggcccccagggccccccaggcctgcagggccccagcggggctgctgacaaggccggcacccgggagaaccagcctgctgtggtgcacctgcagggccagggcagcgccatccaggtgaagaatgacctgtctggaggagtgctgaatgactggagccgcatcaccatgaaccccaaggtgttcaagctgcaccccaggtctggagagctggaggtgctggtggatggcacctacttcatctacagccaggtggaggtgtactacatcaacttcacagactttgccagctatgaggtggtggtggatgagaagcccttcctgcagtgcaccaggagcattgagaccgggaagaccaactacaacacctgctacacagctggggtgtgcctgctgaaggcccggcagaagattgctgtgaagatggtgcatgctgacatcagcatcaacatgagcaagcacaccaccttcttcggggccatccggctgggggaggccccagccagctag

SEQ ID NO: 3106 - DNA, 1170 bp, synthetic construct
  misc_feature 1..1170: note = source = /note="Description of Artificial Sequence: Synthetic coding sequence"
  source 1..1170: mol_type = other DNA
atgggctacccagaggtggagcggcgggagctgctgcctgctgctgccccccgggagcggggcagccagggctgcggctgcggcggggccccagcccgggccggggagggcaacagctgcctgctcttcctgggcttcttcggcctgagcctggccctgcacctgctgaccctgtgctgctacctggagctgcggtctgagctgcggcgggagagaggagctgagagccggctgggcggcagcggcaccccaggcaccagcggcaccctgagcagcctgggcggcctggaccctgacagccccatcaccagccacctgggccagcccagccccaagcagcagcccctggagcccggggaggccgccctgcacagcgacagccaggacggccaccagatggccctgctgaacttcttcttcccagatgagaagccctacagcgaggaggagagccggcgggtgagaagaaacaagaggagcaagagcaatgaaggagcagatggccctgtgaagaacaagaagaagggcaagaaggccggccccccaggccccaatggacctcctggccccccaggccccccaggcccccagggccccccaggcatccctggcatccctggcatccctggcaccaccgtgatgggccccccaggccccccaggccccccaggcccccagggccccccaggcctgcagggccccagcggggctgctgacaaggccggcacccgggagaaccagcctgctgtggtgcacctgcagggccagggcagcgccatccaggtgaagaatgacctgtctggaggagtgctgaatgactggagccgcatcaccatgaaccccaaggtgttcaagctgcaccccaggtctggagagctggaggtgctggtggatggcacctacttcatctacagccaggtgtactacatcaacttcacagactttgccagctatgaggtggtggtggatgagaagcccttcctgcagtgcaccaggagcattgagaccgggaagaccaactacaacacctgctacacagctggggtgtgcctgctgaaggcccggcagaagattgctgtgaagatggtgcatgctgacatcagcatcaacatgagcaagcacaccaccttcttcggggccatccggctgggggaggccccagccagctag

SEQ ID NO: 3107 - DNA, 408 bp, synthetic construct
  misc_feature 1..408: note = source = /note="Description of Artificial Sequence: Synthetic coding sequence"
  source 1..408: mol_type = other DNA
atgggctacccagaggtggagcggcgggagctgctgcctgctgctgccccccgggagcggggcagccagggctgcggctgcggcggggccccagcccgggccggggagggcaacagctgcctgctcttcctgggcttcttcggcctgagcctggccctgcacctgctgaccctgtgctgctacctggagctgcggtctgagctgcggcgggagagaggagctgagagccggctgggcggcagcggcaccccaggcaccagcggcaccctgagcagcctgggcggcctggaccctgacagccccatcaccagccacctgggccagcccagccccaagcagcagcccctggagcccggggaggccgccctgcacagcgacagccaggacggccaccagggccaccagtag

SEQ ID NO: 3108 - DNA, 1161 bp, synthetic construct
  misc_feature 1..1161: note = source = /note="Description of Artificial Sequence: Synthetic coding sequence"
  source 1..1161: mol_type = other DNA
atgggctacccagaggtggagcggcgggagctgctgcctgctgctgccccccgggagcggggcagccagggctgcggctgcggcggggccccagcccgggccggggagggcaacagctgcctgctcttcctgggcttcttcggcctgagcctggccctgcacctgctgaccctgtgctgctacctggagctgcggtctgagctgcggcgggagagaggagctgagagccggctgggcggcagcggcaccccaggcaccagcggcaccctgagcagcctgggcggcctggaccctgacagccccatcaccagccacctgggccagcccagccccaagcagcagcccctggagcccggggaggccgccctgcacagcgacagccaggacggccaccagatggccctgctgaacttcttcttcccagatgagaagccctacagcgaggaggagagccggcgggtgagaagaaacaagaggagcaagagcaatgaaggagcagatggccctgtgaagaacaagaagaagggcaagaaggccggccccccaggccccaatggacctcctggccccccaggccccccaggcccccagggccccccaggcatccctggcatccctggcatccctggcaccaccgtgatgggccccccaggccccccaggccccccaggcccccagggccccccaggcctgcagggccccagcggggctgctgacaaggccggcacccgggagaaccagcctgctgtggtgcacctgcagggccagggcagcgccatccaggtgaagaatggaggagtgctgaatgactggagccgcatcaccatgaaccccaaggtgttcaagctgcaccccaggtctggagagctggaggtgctggtggatggcacctacttcatctacagccaggtgtactacatcaacttcacagactttgccagctatgaggtggtggtggatgagaagcccttcctgcagtgcaccaggagcattgaaacaggcaagaccaactacaacacctgctacacagctggggtgtgcctgctgaaggcccggcagaagattgctgtgaagatggtgcacgccgacatcagcatcaacatgagcaagcacaccaccttctttggagccatccggctgggggaggccccagccagctag

SEQ ID NO: 3109 - DNA, 447 bp, synthetic construct; identical to SEQ ID NO: 3104
  misc_feature 1..447: note = source = /note="Description of Artificial Sequence: Synthetic coding sequence"
  source 1..447: mol_type = other DNA

SEQ ID NO: 3110 - DNA, 3429 bp, synthetic construct
  misc_feature 1..3429: note = source = /note="Description of Artificial Sequence: Synthetic coding sequence"
  source 1..3429: mol_type = other DNA
atgctggtgctgcgctgccgcctgggcaccagcttccccaagctggacaacctggtgcccaagggcaagatgaagatcctgctggtgttcctgggcctgctgggcaacagcgtggccatgcccatgcacatgcccaggatgcctggcttcagcagcaagtctgaggagatgatgagatacaaccagttcaacttcatgaatggcccccacatggcccacctgggccccttctttggaaatggcctgccccagcagttcccccagtaccagatgcccatgtggccccagcccccacccaacacctggcaccccaggaagagcagcgcccccaagaggcacaacaagacagaccagacccaggagacccagaagcccaaccagacccagagcaagaagccaccccagaagaggcccctgaagcagcccagccacaaccagccccagcctgaggaggaggcccagcccccccaggccttccccccatttggaaatggcctcttcccctaccagcagcccccctggcagatcccccagaggctgcccccacctggctacggccggccccccatcagcaatgaggagggcggcaacccctacttcggctacttcggctaccacggctttggaggccggcccccctactacagcgaggagatgtttgagcaggactttgagaagcccaaggaggaggacccccccaaggccgagagccctggaacagagcccacagccaacagcacagtgacagagaccaacagcacccagcccaaccccaagggcagccagggcggcaatgacaccagccccaccggcaacagcaccccaggcctgaacacaggcaacaaccccccagcccagaatggaattggccccctgcctgctgtgaatgccagcggccagggcggccctggcagccagatcccctggaggcccagccagcccaacatccgggagaaccacccctaccccaacatccggaacttccccagcggccggcagtggtacttcaccggcaccgtgatgggccaccggcagaaccggcccttctacagaaaccagcaggtgcagaggggcccccgctggaacttctttgcctgggagaggaagcaggtggcccggcccggcaaccctgtgtaccacaaggcctacccacccaccagccggggcaactaccccaactatgccggcaacccagccaacctgcggaggaagccccagggccccaacaagcaccctgtgggcaccaccgtggcccccctgggccccaagccaggccctgtggtgagaaatgagaagatccagaaccccaaggagaagcccctgggccccaaggagcagatcatcgtgcccaccaagaaccccaccagcccctggaggaacagccagcagtatgaggtgaacaagagcaactacaagctgccccacagcgagggctacatgcctgtgcccaacttcaacagcgtggaccagcacgagaacagctactaccccaggggggacagcaggaaggtgcccaacagtgatggccagacccagagccagaacctgcccaagggcatcgtgctgggcagcaggaggatgccctatgaaagtgagaccaaccagagcgagctgaagcacagcagctaccagcctgctgtgtacccagaggagatccccagccctgccaaggagcacttccctgctggcaggaacacctgggaccaccaggagatcagcccccccttcaaggaggaccccggccggcaggaggagcacctgccccaccccagccacggcagccggggctctgtgttctacccagagtacaacccctatgacccccgggagaacagcccctacctgcggggcaacacctgggatgaaagagatgacagccccaacaccatgggccagaaggagagccccctgtaccccatcaacaccccagaccagaaggagatcgtgccctacaatgaggaggaccctgtggaccccactggagatgaggtgtttcctggccagaaccgctggggcgaggagctgtccttcaagggcggccccaccgtgcgccactatgaaggagagcagtacaccagcaaccagcccaaggagtacctgccctacagcctggacaaccccagcaagccccgggaggacttctactacagcgagttctacccctggagcccagatgagaacttccccagctacaacacagccagcaccatgcccccacccatcgagagccggggctactacgtgaacaatgctgctggccctgaggagagcaccctcttccccagcagaaattcctgggaccaccgcatccaggcccagggccagcgggagcggcggccctacttcaacagaaacatctgggaccaggccacccacctgcagaaggccccagcccggcccccagaccagaagggcaaccagccctactacagcaacaccccagctggcctgcagaagaaccccatctggcatgaaggagagaacctgaactacggcatgcagatcaccaggatgaacagccctgagcgggagcacagcagcttccccaacttcatccccccatcctaccccagcggccagaaggaggcccacctgttccacctgagccagaggggcagctgctgtgccggcagcagcacaggccccaaggacaaccccctggccctgcaggactacacccccagctatggcctggcccctggagagaaccaggacaccagccccctgtacacagatggcagccacaccaagcagacccgggacatcatcagccccaccagcatcctgcccggccagaggaacagcagcgagaagcgggagagccagaaccccttcagagatgatgtgtccaccctgcggaggaacaccccctgcagcatcaagaaccagctgggccagaaggagatcatgcccttccctgaggccagcagcctgcagagcaagaacaccccctgcctgaagaatgacctgggcggagatggcaacaacatcctggagcaggtgtttgaggacaaccagctgaatgaaagaacagtggacctgaccccagagcagctggtgattggcaccccagatgagggcagcaaccctgagggcatccagagccaggtgcaggagaatgaaagtgagcggcagcagcagaggcccagcaacatcctgcacctgccctgcttcggcagcaagctggccaagcaccacagcagcaccaccggcacccccagcagtgatggccggcagagcccctttgatggagacagcatcacccccacagagaaccccaacaccctggtggagctggccacagaggagcagttcaagagcatcaacgtggaccccctggatgctgatgagcacagcccctttgagttcctgcagaggggcaccaacgtgcaggaccaggtgcaggactgcctgctgctgcaggcctag

SEQ ID NO: 3111 - DNA, 582 bp, synthetic construct
  misc_feature 1..582: note = source = /note="Description of Artificial Sequence: Synthetic coding sequence"
  source 1..582: mol_type = other DNA
atgggcgtgcatgaatgtcctgcctggctgtggctgctgctgagcctgctgagcctgcccctgggcctgcctgtgctgggcgccccacccaggctcatctgtgacagccgggtgctggagcgctacctgctggaggccaaggaggccgagaacatcaccaccggctgtgccgagcactgcagcctgaatgaaaacatcaccgtgcctgacaccaaggtgaacttctacgcctggaagaggatggaggtgggccagcaggccgtggaggtgtggcagggcctggccctgctgtctgaggccgtgctgcggggccaggccctgctggtgaacagcagccagccctgggagcccctgcagctgcacgtggacaaggctgtgtctggcctgcggagcctgaccaccctgctgcgggccctgggcgcccagaaggaggccatcagccccccagatgctgccagcgctgcccccctgcggaccatcacagctgacaccttcaggaagctgttccgggtgtacagcaacttcctgcggggcaagctgaagctgtacaccggggaggcctgcaggactggagacagatag

SEQ ID NO: 3112 - DNA, 192 bp, synthetic construct
  misc_feature 1..192: note = source = /note="Description of Artificial Sequence: Synthetic coding sequence"
  source 1..192: mol_type = other DNA
atgcccagctctgtgtcctggggcatcctgctgctggccggcctgtgctgcctggtgcctgtgtccctggcccatggagagggcaccttcaccagtgacctgagcaagcagatggaggaggaggccgtgcggctcttcatcgagtggctgaagaatggaggccccagcagcggggcccccccacccagctag

SEQ ID NO: 3113 - DNA, 1050 bp, synthetic construct
  misc_feature 1..1050: note = source = /note="Description of Artificial Sequence: Synthetic coding sequence"
  source 1..1050: mol_type = other DNA
atggaggccgtgaaggccgaggcctgggagggcgctgctgtggcccaggacctgctggccctgggctatggaggagtgcctggagctgccagcagaggagccagctgcccagacttccggggcctgtgtgtgcggctggccgctgagctggccaccctgggcgccctggagcagcagcgggaggccggggctgaggtgctgtctgctggagatggccctggagctgaggaggacttcctgcggcagctgggcagcctgctgcgggagctgcactgcccagaccgggccctgtgtggaggagatggagctgctgccctgcgggagcctggagctggcctgcggctgctgcgcttcctgtgcagcgagctgcaggccacccggctgctgtgcctgcggagcctgctggaccccagccccaggcctcccctgggggagggcgtggtggagggcgccggcatggtgcaggagctggacctgaccctgcaggccctgggcctgcccaggcctgcccctggcaccccagccagccagctgctgcaggagctgcacgccaagatcagcgagctgcagcccagcctgcccccaggcagcctgcagcccctgctgagctgcagcctggatgccccccgctgggaggccctggagagcctgagccagagcctgcgggaccagtaccgctgccgccgctgcctgctgctgaagaggctggacctgaccaccagcgccttccactggagcgacagagctgaggcccagggcgaggccatgagagctgtgctgatccccatccgggaggtgctgaccccagagagtgacatcagcatcgcccacgtgctggccgcccgggctgacctgagctgcctggtgcctgccacctctgtggccgtgagaagaggcacctgctgtgccatcaacaaggtgctgatgggaaatgtgcctgaccggggcggccggcccaatgagctggagccccccatgcccacctggaggagccggcgggaggatggcggcccccagtgctggggcaggaagaagaagaagaagaagtag

SEQ ID NO: 3114 - DNA, 804 bp, synthetic construct
  misc_feature 1..804: note = source = /note="Description of Artificial Sequence: Synthetic coding sequence"
  source 1..804: mol_type = other DNA
atggaggccgtgaaggccgaggcctgggagggcgctgctgtggcccaggacctgctggccctgggctatggaggagtgcctggagctgccagcagaggagccagctgcccagacttccggggcctgtgtgtgcggctggccgctgagctggccaccctgggcgccctggagcagcagcgggaggccggggctgaggtgctgtctgctggagatggccctggagctgaggaggacttcctgcggcagctgggcagcctgctgcgggagctgcactgcccagaccgggccctgtgtggaggagatggagctgctgccctgcgggagcctggagctggcctgcggctgctgcgcttcctgtgcagcgagctgcaggccacccggctgctgtgcctgcggagcctgctggaccccagccccaggcctcccctgggggagggcgtggtggagggcgccggcatggtgcaggagctggacctgaccctgcaggccctgggcctgcccaggcctgcccctggcaccccagccagccagctgctgcaggagctgcacgccaaggaggccctggagagcctgagccagagcctgcgggaccagtaccgctgccgccgctgcctgctgctgaagaggctggacctgaccaccagcgccttccactggagcgacagagctgaggtgctgatgggaaatgtgcctgaccggggcggccggcccaatgagctggagccccccatgcccacctggaggagccggcgggaggatggcggcccccagtgctggggcaggaagaagaagaagaagaagtag

SEQ ID NO: 3115 - DNA, 2601 bp, synthetic construct
  misc_feature 1..2601: note = source = /note="Description of Artificial Sequence: Synthetic coding sequence"
  source 1..2601: mol_type = other DNA
atgttctccatgagaattgtgtgcctggtgctgtctgtggtgggcacagcctggacagctgacagcggggagggggacttcctggccgagggcggcggcgtgcggggcccccgggtggtggagcggcaccagagcgcctgcaaggacagcgactggcccttctgcagtgatgaggactggaactacaagtgccccagcggctgcaggatgaagggcctgattgatgaggtgaaccaggacttcaccaaccgcatcaacaagctgaagaacagcctgtttgagtaccagaagaacaacaaggacagccacagcctgaccaccaacatcatggagatcctgcggggggacttcagcagcgccaacaacagagacaacacctacaacagagtgtctgaggacctgcggagccgcatcgaggtgctgaagaggaaggtgattgagaaggtgcagcacatccagctgctgcagaagaatgtgcgggcccagctggtggacatgaagaggctggaggtggacatcgacatcaagatccgcagctgccggggcagctgcagccgggccctggcccgggaggtggacctgaaggactatgaggaccagcagaagcagctggagcaggtgattgccaaggacctgctgcccagccgggaccggcagcacctgcccctcatcaagatgaagcctgtgcctgacctggtgcccggcaacttcaagagccagctgcagaaggtgcccccagagtggaaggccctgacagacatgccccagatgaggatggagctggagaggcctggaggaaatgagatcacccggggcggcagcaccagctatggaactggaagtgaaacagagagccccaggaaccccagcagcgctggctcctggaacagcggcagcagcggccctggcagcactggaaacagaaatcctggcagcagcggcactggaggaacagccacctggaagccaggcagcagcggccctggcagcacaggctcctggaacagcggcagcagcggcaccggcagcacaggcaaccagaaccctggcagcccccggcccggcagcacaggcacctggaaccctggcagcagcgagcggggcagcgctggccactggaccagcgagagctctgtgtctggcagcacaggccagtggcacagcgagagcggcagcttccggccagacagccctggcagcggaaatgcccggcccaacaacccagactggggcacctttgaggaggtgtctggaaatgtgtccccaggcacccggcgggagtaccacacagagaagctggtgaccagcaaaggagacaaggagctgaggacaggcaaggagaaggtgaccagcggcagcaccaccaccacccggcgcagctgcagcaagacagtgaccaagacagtcatcggcccagatggccacaaggaggtgaccaaggaggtggtgaccagtgaagatggcagtgactgcccagaggccatggacctgggcaccctgtctggaattggcaccctggatggcttccgccaccgccacccagatgaagctgccttctttgacacagccagcacaggcaagaccttccctggcttcttcagccccatgctgggggagtttgtgtctgaaacagagagccggggcagcgagagcggcatcttcaccaacaccaaggagagcagcagccaccaccctggcattgctgagttccccagccggggcaagagcagcagctacagcaagcagttcaccagcagcaccagctacaacagaggagacagcacctttgagagcaagagctacaagatggctgatgaagctggcagcgaggccgaccacgagggcacccacagcaccaagaggggccacgccaagagcaggcctgtgcgggactgtgatgatgtgctgcagacccaccccagcggcacccagagcggcatcttcaacatcaagctgcccggcagcagcaagatcttctctgtgtactgtgaccaggagaccagcctgggcggctggctgctgatccagcagaggatggatggcagcctgaacttcaacagaacctggcaggactacaagaggggcttcggcagcctgaatgatgaaggagagggggagttctggctgggcaatgactacctgcacctgctgacccagaggggctctgtgctgcgggtggagctggaggactgggccggaaatgaggcctatgcagagtaccacttccgggtgggcagcgaggccgagggctacgccctgcaggtgtcctcctatgagggcacagctggagatgccctgattgagggctctgtggaggagggcgctgagtacaccagccacaacaacatgcagttcagcacctttgacagagatgctgaccagtgggaggagaactgtgccgaggtgtatggaggcggctggtggtacaacaactgccaggccgccaacctgaatggcatctactacccaggcggcagctatgaccccaggaacaacagcccctatgaaattgaaaatggagtggtgtgggtgtccttcagaggagctgactacagcctgcgggctgtgaggatgaagatccggcccctggtgacccagtag

SEQ ID NO: 3116 - DNA, 1935 bp, synthetic construct
  misc_feature 1..1935: note = source = /note="Description of Artificial Sequence: Synthetic coding sequence"
  source 1..1935: mol_type = other DNA
atgttctccatgagaattgtgtgcctggtgctgtctgtggtgggcacagcctggacagctgacagcggggagggggacttcctggccgagggcggcggcgtgcggggcccccgggtggtggagcggcaccagagcgcctgcaaggacagcgactggcccttctgcagtgatgaggactggaactacaagtgccccagcggctgcaggatgaagggcctgattgatgaggtgaaccaggacttcaccaaccgcatcaacaagctgaagaacagcctgtttgagtaccagaagaacaacaaggacagccacagcctgaccaccaacatcatggagatcctgcggggggacttcagcagcgccaacaacagagacaacacctacaacagagtgtctgaggacctgcggagccgcatcgaggtgctgaagaggaaggtgattgagaaggtgcagcacatccagctgctgcagaagaatgtgcgggcccagctggtggacatgaagaggctggaggtggacatcgacatcaagatccgcagctgccggggcagctgcagccgggccctggcccgggaggtggacctgaaggactatgaggaccagcagaagcagctggagcaggtgattgccaaggacctgctgcccagccgggaccggcagcacctgcccctcatcaagatgaagcctgtgcctgacctggtgcccggcaacttcaagagccagctgcagaaggtgcccccagagtggaaggccctgacagacatgccccagatgaggatggagctggagaggcctggaggaaatgagatcacccggggcggcagcaccagctatggaactggaagtgaaacagagagccccaggaaccccagcagcgctggctcctggaacagcggcagcagcggccctggcagcactggaaacagaaatcctggcagcagcggcactggaggaacagccacctggaagccaggcagcagcggccctggcagcacaggctcctggaacagcggcagcagcggcaccggcagcacaggcaaccagaaccctggcagcccccggcccggcagcacaggcacctggaaccctggcagcagcgagcggggcagcgctggccactggaccagcgagagctctgtgtctggcagcacaggccagtggcacagcgagagcggcagcttccggccagacagccctggcagcggaaatgcccggcccaacaacccagactggggcacctttgaggaggtgtctggaaatgtgtccccaggcacccggcgggagtaccacacagagaagctggtgaccagcaaaggagacaaggagctgaggacaggcaaggagaaggtgaccagcggcagcaccaccaccacccggcgcagctgcagcaagacagtgaccaagacagtcatcggcccagatggccacaaggaggtgaccaaggaggtggtgaccagtgaagatggcagtgactgcccagaggccatggacctgggcaccctgtctggaattggcaccctggatggcttccgccaccgccacccagatgaagctgccttctttgacacagccagcacaggcaagaccttccctggcttcttcagccccatgctgggggagtttgtgtctgaaacagagagccggggcagcgagagcggcatcttcaccaacaccaaggagagcagcagccaccaccctggcattgctgagttccccagccggggcaagagcagcagctacagcaagcagttcaccagcagcaccagctacaacagaggagacagcacctttgagagcaagagctacaagatggctgatgaagctggcagcgaggccgaccacgagggcacccacagcaccaagaggggccacgccaagagcaggcctgtgcggggcatccacaccagccccctgggcaagcccagcctgagcccctag

SEQ ID NO: 3117 - DNA, 870 bp, synthetic construct
  misc_feature 1..870: note = source = /note="Description of Artificial Sequence: Synthetic coding sequence"
  source 1..870: mol_type = other DNA
atgttctccatgagaattgtgtgcctggtgctgtctgtggtgggcacagcctggacagctgacagcggggagggggacttcctggccgagggcggcggcgtgcggggcccccgggtggtggagcggcaccagagcgcctgcaaggacagcgactggcccttctgcagtgatgaggactggaactacaagtgccccagcggctgcaggatgaagggcctgattgatgaggtgaaccaggacttcaccaaccgcatcaacaagctgaagaacagcctgtttgagtaccagaagaacaacaaggacagccacagcctgaccaccaacatcatggagatcctgcggggggacttcagcagcgccaacaacagagacaacacctacaacagagtgtctgaggacctgcggagccgcatcgaggtgctgaagaggaaggtgattgagaaggtgcagcacatccagctgctgcagaagaatgtgcgggcccagctggtggacatgaagaggctggaggtggacatcgacatcaagatccgcagctgccggggcagctgcagccgggccctggcccgggaggtggacctgaaggactatgaggaccagcagaagcagctggagcaggtgattgccaaggacctgctgcctgtggtgaacctgcaggtgacagccaacaacctgctggtggcccgggtgaccacagaggagaccccccacctgaaggcccgggccatcaagtggcagatgaggcctgaggtgaagcccatcatgaaggagcacatcgccccccgggaggccatgctgaacctggccctgtctgaggtgtccaccctgctgctgtggggcagcctgccctgccccccccggctgtcctag

SEQ ID NO: 3118 - DNA, 1476 bp, synthetic construct
  misc_feature 1..1476: note = source = /note="Description of Artificial Sequence: Synthetic coding sequence"
  source 1..1476: mol_type = other DNA
atgaagaggatggtgtcctggagcttccacaagctgaagaccatgaagcacctgctgctgctgctgctgtgtgtgttcctggtgaagagccagggcgtgaatgacaatgaggagggcttcttcagcgcccggggccaccggcccctggacaagaagcgggaggaggcccccagcctgcggcctgcccccccacccatcagcggcggcggctaccgggcccggcctgccaaggctgctgccacccagaagaaggtggagaggaaggccccagatgctgggggctgcctgcacgccgaccctgacctgggcgtgctgtgccccaccggctgccagctgcaggaggccctgctgcagcaggagcggcccatccggaacagcgtggatgagctgaacaacaacgtggaggccgtgtcccagaccagcagcagcagcttccagtacatgtacctgctgaaggacctgtggcagaagaggcagaagcaggtgaaggacaatgaaaatgtggtgaatgagtacagcagcgagctggagaagcaccagctgtacattgatgagaccgtgaacagcaacatccccaccaacctgcgggtgctgcggagcatcctggagaacctgcggagcaagatccagaagctggagagtgatgtgtctgcccagatggagtactgcaggaccccctgcaccgtgtcctgcaacatccctgtggtgtctgggaaggaatgtgaggagatcatcagaaaaggaggagagaccagcgagatgtacctgatccagcctgacagctctgtgaagccctacagagtgtactgtgacatgaacacagaaaatggaggctggacagtcatccagaaccggcaggacggctctgtggactttggaaggaagtgggacccctacaagcagggctttggaaatgtggccaccaacacagatggcaagaactactgcggcctgcctggagagtactggctgggcaatgacaagatcagccagctgaccaggatgggccccacagagctgctgattgagatggaggactggaagggggacaaggtgaaggcccactacggcggcttcaccgtgcagaatgaggccaacaagtaccagatctctgtgaacaagtaccggggcacagctggaaatgccctgatggatggagccagccagctgatgggagaaaatagaaccatgaccatccacaacggcatgttcttcagcacctatgaccgggacaatgatggctggctgaccagtgaccccaggaagcagtgcagcaaagaagatggcggcggctggtggtacaaccgctgccacgccgccaaccccaacggccgctactactggggcggccagtacacctgggacatggccaagcatggaacagatgatggagtggtgtggatgaactggaagggctcctggtacagcatgaggaagatgtccatgaagatccggcccttcttcccccagcagtag

SEQ ID NO: 3119 - DNA, 1425 bp, synthetic construct
  misc_feature 1..1425: note = source = /note="Description of Artificial Sequence: Synthetic coding sequence"
  source 1..1425: mol_type = other DNA
atgaagaggatggtgtcctggagcttccacaagctgaagaccatgaagcacctgctgctgctgctgctgtgtgtgttcctggtgaagagccagggcgtgaatgacaatgaggagggcttcttcagcgcccggggccaccggcccctggacaagaagcgggaggaggcccggcctgccaaggccgccgccacccagaagaaggtggagaggaaggccccagatgctgggggctgcctgcatgctgaccctgacctgggcgtgctgtgccccaccggctgccagctgcaggaggccctgctgcagcaggagcggcccatcagaaattctgtggatgagctgaacaacaacgtggaggccgtgtcccagaccagcagcagcagcttccagtacatgtacctgctgaaggacctgtggcagaagaggcagaagcaggtgaaggacaatgaaaatgtggtgaatgagtacagcagcgagctggagaagcaccagctgtacattgatgaaacagtgaacagcaacatccccaccaacctgcgggtgctgcggagcatcctggagaacctgcggagcaagatccagaagctggagagtgatgtgtctgcccagatggagtactgcaggaccccctgcaccgtgtcctgcaacatccctgtggtgtctgggaaggaatgtgaggagatcatcaggaagggcggggagaccagcgagatgtacctgatccagcctgacagctctgtgaagccctacagagtgtactgtgacatgaacacagaaaatggaggctggacagtcatccagaaccggcaggacggctctgtggactttggaaggaagtgggacccctacaagcagggctttggaaatgtggccaccaacacagatggcaagaactactgcggcctgcccggggagtactggctgggcaatgacaagatcagccagctgaccaggatgggccccacagagctgctgattgagatggaggactggaagggggacaaggtgaaggcccactatggaggcttcaccgtgcagaatgaggccaacaagtaccagatctctgtgaacaagtaccggggcacagctggaaatgccctgatggatggagccagccagctgatgggagagaacagaaccatgaccatccacaacggcatgttcttcagcacctatgaccgggacaatgatggctggctgaccagtgaccccaggaagcagtgcagcaaggaggatggcggcggctggtggtacaaccgctgccacgccgccaaccccaacggccgctactactggggcggccagtacacctgggacatggccaagcacggcacagatgatggagtggtgtggatgaactggaagggctcctggtacagcatgaggaagatgtccatgaagatccggcccttcttcccccagcagtag

SEQ ID NO: 3120 - DNA, 1362 bp, synthetic construct
  misc_feature 1..1362: note = source = /note="Description of Artificial Sequence: Synthetic coding sequence"
  source 1..1362: mol_type = other DNA
atgtcctggagcctgcaccccaggaacctgatcctgtacttctacgccctgctcttcctgagcagcacctgtgtggcctacgtggccacccgggacaactgctgcatcctggatgaaagatttggcagctactgccccaccacctgtggcattgctgacttcctgagcacctaccagaccaaggtggacaaggacctgcagagcctggaggacatcctgcaccaggtggagaacaagaccagcgaggtgaagcagctgatcaaggccatccagctgacctacaacccagatgagagcagcaagcccaacatgattgatgctgccaccctgaagagcaggaagatgctggaggagatcatgaagtatgaggccagcatcctgacccatgacagcagcatccgctacctgcaggagatctacaacagcaacaaccagaagatcgtgaacctgaaggagaaggtggcccagctggaggcccagtgccaggagccctgcaaggacacagtgcagatccatgacatcaccgggaaggactgccaggacatcgccaacaagggggccaagcagagcggcctgtacttcatcaagcccctgaaggccaaccagcagttcctggtgtactgtgaaattgatggcagcggaaatggctggacagtgttccagaagaggctggatggctctgtggacttcaagaagaactggatccagtacaaggagggcttcggccacctgagccccaccggcaccacagagttctggctgggcaatgagaagatccacctgatcagcacccagagcgccatcccctatgccctgcgggtggagctggaggactggaatggccgcaccagcacagctgactatgccatgttcaaggtgggccctgaggccgacaagtaccgcctgacctacgcctactttgctggaggagatgctggagatgcctttgatggctttgattttggagatgaccccagcgacaagttcttcaccagccacaacggcatgcagttcagcacctgggacaatgacaatgacaagtttgagggcaactgtgccgagcaggacggcagcggctggtggatgaacaagtgccacgccggccacctgaatggagtgtactaccagggcggcacctacagcaaggccagcaccccaaatggctatgacaatggcatcatctgggccacctggaagacccgctggtacagcatgaagaagaccaccatgaagatcatccccttcaaccggctgaccatcggggagggccagcagcaccacctgggcggggccaagcaggtgcggcctgagcaccctgctgagacagaatatgacagcctgtacccagaagatgacctgtag

SEQ ID NO: 3121 - DNA, 1314 bp, synthetic construct
  misc_feature 1..1314: note = source = /note="Description of Artificial Sequence: Synthetic coding sequence"
  source 1..1314: mol_type = other DNA
atgtcctggagcctgcaccccaggaacctgatcctgtacttctacgccctgctcttcctgagcagcacctgtgtggcctacgtggccacccgggacaactgctgcatcctggatgaaagatttggcagctactgccccaccacctgtggcattgctgacttcctgagcacctaccagaccaaggtggacaaggacctgcagagcctggaggacatcctgcaccaggtggagaacaagaccagcgaggtgaagcagctgatcaaggccatccagctgacctacaacccagatgagagcagcaagcccaacatgattgatgctgccaccctgaagagcaggaagatgctggaggagatcatgaagtatgaggccagcatcctgacccatgacagcagcatccgctacctgcaggagatctacaacagcaacaaccagaagatcgtgaacctgaaggagaaggtggcccagctggaggcccagtgccaggagccctgcaaggacacagtgcagatccatgacatcaccgggaaggactgccaggacatcgccaacaagggggccaagcagagcggcctgtacttcatcaagcccctgaaggccaaccagcagttcctggtgtactgtgaaattgatggcagcggaaatggctggacagtgttccagaagaggctggatggctctgtggacttcaagaagaactggatccagtacaaggagggcttcggccacctgagccccaccggcaccacagagttctggctgggcaatgagaagatccacctgatcagcacccagagcgccatcccctatgccctgcgggtggagctggaggactggaatggccgcaccagcacagctgactatgccatgttcaaggtgggccctgaggccgacaagtaccgcctgacctacgcctactttgctggaggagatgctggagatgcctttgatggctttgattttggagatgaccccagcgacaagttcttcaccagccacaacggcatgcagttcagcacctgggacaatgacaatgacaagtttgagggcaactgtgccgagcaggacggcagcggctggtggatgaacaagtgccacgccggccacctgaatggagtgtactaccagggcggcacctacagcaaggccagcaccccaaatggctatgacaatggcatcatctgggccacctggaagacccgctggtacagcatgaagaagaccaccatgaagatcatccccttcaaccggctgaccatcggggagggccagcagcaccacctgggcggggccaagcaggccggagatgtgtag

SEQ ID NO: 3122 - DNA, 2892 bp, synthetic construct
  misc_feature 1..2892: note = source = /note="Description of Artificial Sequence: Synthetic coding sequence"
  source 1..2892: mol_type = other DNA
atgctgtctggagagaggaaggagggcggcagccccaggtttgggaagctgcacctgcctgtgggcctgtggatcaacagccccaggaagcagctggccaagctgggccgccgctggcccagcgctgcctctgtgaagagcagcagcagtgacaccggcagccgcagcagcgagcccctgcccccacctccaccccacgtggagctgcggcgggtgggcgctgtgaaggccgccggcggggccagcggcagccgggccaagaggatcagccagctgttccggggcagcggcaccggcaccaccggcagcagcggggccggcggccctggcacccctgggggcgcccagcgctgggccagcgagaagaagctgcctgagctggccgccggcgtggcccctgagccccccctggccacccgggccacagcccctcctggggtgctgaagatctttggagctggcctggccagcggggccaactacaagtctgtgctggccacagcccggagcacagcccgggagctggtggccgaggccctggagagatatggcctggccggcagccctgggggcggccctggagagagcagctgtgtggatgcctttgccctgtgtgatgccctgggccggcctgctgctgctggggtgggcagcggggagtggagggctgagcacctgcgggtgctgggggacagcgagcggcccctgctggtgcaggagctgtggagggcccggcccggctgggccaggagatttgagctgcggggccgggaggaggcccggcggctggagcaggaggccttcggggctgctgacagcgagggcaccggggcccccagctggaggccccagaagaacagaagccgggccgccagcggcggggccgccctggccagccctggccctggcaccggcagcggggccccagctggcagcggcggcaaggagaggtctgagaacctgagcctgcggcgctctgtgtctgagctgagcctgcagggcagaagaagacggcagcaggagcggcggcagcaggccctgtccatggcccctggagctgctgatgcccagatcggcacagctgaccccggggactttgaccagctgacccagtgcctgatccaggcccccagcaaccggccctacttcctgctgctgcagggctaccaggatgcccaggactttgtggtgtatgtgatgacccgggagcagcacgtgtttggccggggcggcaacagcagcggccggggcggcagccctgccccctacgtggacaccttcctgaatgccccagacatcctgcccaggcactgcaccgtgcgggccggccctgagcacccagccatggtgcggcccagcagaggagcccctgtgacccacaacggctgcctgctgctgcgggaggccgagctgcaccctggggacctgctgggcctgggggagcacttcctgttcatgtacaaggaccccaggactggaggcagcggccctgcccggcccccctggctgcctgcccggcctggggccaccccacctggccctggctgggccttcagctgccgcctgtgtggccggggcctgcaggagcggggggaggccctggccgcctacctggatggccgggagcctgtgctgcgcttccggccccgggaggaggaggccctgctgggggagatcgtgcgggctgctgctgctggcagcggggacctgccccccctgggccctgccaccctgctggccctgtgtgtgcagcacagcgcccgggagctggagctgggccacctgccccggctgctgggccgcctggcccggctcatcaaggaggccgtgtgggagaagatcaaggagattggagaccggcagcctgagaaccaccctgagggcgtgcctgaggtgcccctgaccccagaggccgtgtctgtggagctgcggcccctgatgctgtggatggccaacaccacagagctgctgagctttgtgcaggagaaggtgctggagatggagaaggaggccgaccaggaggacccccagctgtgcaatgacctggagctgtgtgatgaggccatggccctgctggatgaagtcatcatgtgcaccttccagcagagcgtgtactacctgaccaagaccctgtacagcaccctgcctgccctgctggacagcaaccccttcaccgctggagctgagctgcccggccctggagctgagctgggcgccatgcctcctggcctgcggcccaccctgggcgtcttccaggccgccctggagctgaccagccagtgtgagctgcacccagacctggtgtcccagaccttcggctacctgttcttcttcagcaatgccagcctgctgaacagcctgatggagcggggccagggccggcccttctaccagtggagcagagctgtgcagatccgcaccaacctggacctggtgctggactggctgcagggcgccggcctgggggacatcgccacagagttcttcaggaagctgtccatggctgtgaacctgctgtgtgtgcccaggaccagcctgctgaaggcctcctggagcagcctgaggacagaccaccccaccctgaccccagcccagctgcaccacctgctgagccactaccagctgggccctggccggggccccccagctgcctgggaccccccacctgctgagcgggaggccgtggacacaggagacatctttgagagcttcagcagccaccccccactcatcctgcccctgggcagcagccggctgcggctgaccggccctgtgacagatgatgccctgcaccgggagctgcggcggctgcggcggctgctgtgggacctggagcagcaggagctgcctgccaactacagacatggcccccctgtggccaccagcccctag

SEQ ID NO: 3123 - DNA, 630 bp, synthetic construct
  misc_feature 1..630: note = source = /note="Description of Artificial Sequence: Synthetic coding sequence"
  source 1..630: mol_type = other DNA
atggacagtgatgagaccggctttgagcacagcggcctgtgggtgtctgtgctggccggcctgctgctgggcgcctgccaggcccaccccatcccagacagcagccccctgctgcagtttggaggccaggtgcggcagcgctacctgtacacagatgatgcccagcagacagaggcccacctggagatcagagaagatggcaccgtgggcggcgctgctgaccagagccctgagagcctgctgcagctgaaggccctgaagccaggagtcatccagatcctgggcgtgaagaccagccgcttcctgtgccagaggccagatggagccctgtatggcagcctgcactttgatcctgaggcctgcagcttccgggagctgctgctggaggatggctacaacgtgtaccagagcgaggcccacggcctgcccctgcacctgcccggcaacaagagcccccaccgggaccctgccccccggggccctgcccgcttcctgcccctgcccggcctgcccccagccctgcctgagcccccaggcatcctggccccccagcccccagatgtgggcagcagtgaccccctgtccatggtgggccccagccagggccgcagccccagctatgccagctag

SEQ ID NO: 3124 - DNA, 321 bp, synthetic construct
  misc_feature 1..321: note = source = /note="Description of Artificial Sequence: Synthetic coding sequence"
  source 1..321: mol_type = other DNA
atgctgcgcttcatccaggaggtgaacaccaccaccaggagctgtgccctgtgggacctggaggaggacacagagtacatcgtgcacgtgcaggccatcagcatccagggccagagccctgccagcgagcctgtgctcttcaagaccccccgggaggccgagaagatggccagcaagaacaaggatgaggtgaccatgaaggagatgggcaggaaccagcagctgaggactggagaggtgctgatcatcgtggtggtgctcttcatgtgggccggggtcatcgccctcttctgccggcagtatgacatcatcgaggcctag

SEQ ID NO: 3125 - DNA, 414 bp, synthetic construct
  misc_feature 1..414: note = source = /note="Description of Artificial Sequence: Synthetic coding sequence"
  source 1..414: mol_type = other DNA
atgctgcgcttcatccaggaggtgaacaccaccaccaggagctgtgccctgtgggacctggaggaggacacagagtacatcgtgcacgtgcaggccatcagcatccagggccagagccctgccagcgagcctgtgctcttcaagaccccccgggaggccgagaagatggccagcaagaacaaggatgaggtgaccatgaaggagatgggcaggaaccagcagctgaggactggagaggtgctgatcatcgtggtggtgctcttcatgtgggccggggtcatcgccctcttctgccggcagtatgacatcatcaaggacaatgagcccaacaacaacaaggagaagaccaagagcgccagcgagaccagcaccccagagcaccagggcggcggcctgctgcggagcaagatctag

SEQ ID NO: 3126 - DNA, 390 bp, synthetic construct
  misc_feature 1..390: note = source = /note="Description of Artificial Sequence: Synthetic coding sequence"
  source 1..390: mol_type = other DNA
atgaagaccctgcagttcttcttcctgttctgctgctggaaggccatctgctgcaacagctgtgagctgaccaacatcaccatcgccatcgagaaggaggagtgccgcttctgcatcagcatcaacaccacctggtgtgccggctactgctacacccgggacctggtgtacaaggaccctgcccggcccaagatccagaagacctgcaccttcaaggagctggtgtatgagaccgtgcgggtgcccggctgtgcccaccacgccgacagcctgtacacctaccctgtggccacccagtgccactgtgggaaatgtgacagcgacagcacagactgcaccgtgcggggcctgggccccagctactgcagctttggagagatgaaggagtag

SEQ ID NO: 3127 - DNA, 390 bp, synthetic construct; identical to SEQ ID NO: 3126
  misc_feature 1..390: note = source = /note="Description of Artificial Sequence: Synthetic coding sequence"
  source 1..390: mol_type = other DNA

SEQ ID NO: 3128 - DNA, 390 bp, synthetic construct; identical to SEQ ID NO: 3126
  misc_feature 1..390: note = source = /note="Description of Artificial Sequence: Synthetic coding sequence"
  source 1..390: mol_type = other DNA

SEQ ID NO: 3129 - DNA, 1260 bp, synthetic construct
  misc_feature 1..1260: note = source = /note="Description of Artificial Sequence: Synthetic coding sequence"
  source 1..1260: mol_type = other DNA
atgtccttcatccctgtggccgaggacagcgacttccccatccacaacctgccctatggagtcttcagcaccaggggggacccccggccccgcatcggcgtggccatcggggaccagatcctggacctgagcatcatcaagcacctgttcaccggccctgtgctgagcaagcaccaggatgtgttcaaccagcccaccctgaacagcttcatgggcctgggccaggccgcctggaaggaggcccgggtcttcctgcagaacctgctgtctgtgtcccaggcccggctgagagatgacacagagctgaggaaatgtgccttcatcagccaggccagcgccaccatgcacctgcctgccaccatcggggactacacagacttctacagcagccggcagcacgccaccaacgtgggcatcatgttccgggacaaggaaaatgccctgatgcccaactggctgcacctgcctgtgggctaccacggccgggccagctctgtggtggtgtctggcacccccatccggcggcccatgggccagatgaagccagatgacagcaagccccctgtgtatggagcctgcaagctgctggacatggagctggagatggccttctttgtgggccctggcaaccggctgggggagcccatccccatcagcaaggcccacgagcacatcttcggcatggtgctgatgaatgactggagcgcccgggacatccagaagtgggagtatgtgcccctgggccccttcctgggcaagagctttggcaccaccgtgagcccctgggtggtgcccatggatgccctgatgccctttgctgtgcccaaccccaagcaggacccccggcccctgccctacctgtgccatgatgagccctacacctttgacatcaacctgtctgtgaacctgaagggggagggcatgagccaggccgccaccatctgcaagagcaacttcaagtacatgtactggaccatgctgcagcagctgacccaccacagcgtgaatggctgcaacctgcggcctggggacctgctggccagcggcaccatcagcggccctgagccagaaaattttggctccatgctggagctgtcctggaagggcaccaagcccatcgacctgggcaatggccagaccaggaagttcctgctggatggagatgaggtgatcatcaccggctactgccagggagatggctacagaattggatttggccagtgtgccggcaaggtgctgcctgccctgctgcccagctag

SEQ ID NO: 3130 - DNA, 1260 bp, synthetic construct; identical to SEQ ID NO: 3129
  misc_feature 1..1260: note = source = /note="Description of Artificial Sequence: Synthetic coding sequence"
  source 1..1260: mol_type = other DNA

SEQ ID NO: 3131 - DNA, 1260 bp, synthetic construct; identical to SEQ ID NO: 3129
  misc_feature 1..1260: note = source = /note="Description of Artificial Sequence: Synthetic coding sequence"
  source 1..1260: mol_type = other DNA

SEQ ID NO: 3132 - DNA, 759 bp, synthetic construct
  misc_feature 1..759: note = source = /note="Description of Artificial Sequence: Synthetic coding sequence"
  source 1..759: mol_type = other DNA
atggaggccatgtggctgctgtgtgtggccctggccgtgctggcctggggcttcctgtgggtgtgggacagcagcgagaggatgaagagccgggagcagggcggccgcctgggcgctgagagcaggaccctgctggtgattgcccacccagatgatgaggccatgttctttgcccccaccgtgctgggcctggcccggctgcggcactgggtgtacctgctgtgcttctctgctggcaactactacaaccagggcgagaccaggaagaaggagctgctgcagagctgtgatgtgctgggcatccccctgagctctgtgatgatcatcgacaacagagacttcccagatgaccccggcatgcagtgggacacagagcacgtggcccgggtgctgctgcagcacatcgaggtgaatggcatcaacctggtggtgacctttgatgctgggggcgtgtctggccacagcaaccacatcgccctgtatgctgctgtgcgggccctgcacagcgagggcaagctgcccaagggctgcagcgtgctgaccctgcagagcgtgaatgtgctgaggaagtacatcagcctgctggacctgcccctgagcctgctgcacacccaggatgtgctgtttgtgctgaacagcaaggaggtggcccaggccaagaaggccatgagctgccacaggagccagctgctgtggttccggcggctgtacatcatcttcagccgctacatgaggatcaacagcctgtccttcctgtag

SEQ ID NO: 3133 - DNA, 1203 bp, synthetic construct
  misc_feature 1..1203: note = source = /note="Description of Artificial Sequence: Synthetic coding sequence"
  source 1..1203: mol_type = other DNA
atggccgccctgcggcagccccaggtggccgagctgctggccgaggcccggcgggccttccgggaggagtttggagctgagcctgagctggccgtgtctgcccctggccgggtgaacctgattggagagcacacagactacaaccagggcctggtgctgcccatgagggacaggctcttccccaccctggagggcaggaagaggggcagcggccgggagcgggtgcggggccgcctgctggcccaggcccggcccctgggcgctggggccccccggctgcagcccggctccatgttccccctgaactgtgaggccctgtgtgccacccagaagggcaccctgcgggccagcggccacagaggagcccccacagctgacctgggggagaggagcctgctggcccagcctgtgcagttcacagaggaggagaccggcggggccttccggcccatctgcagcctgggcagcgcccaggccagcagccccccctgccccacagcccagggccgggtgcaggacggcctggtgtccctgctgaccaccagcgagggcgcagatgagccccagaggctgcagttccccctgcccacagcccagaggagcctggagcccggcaccccccgctgggccaactacgtgaagggcgtcatccagtactacccagctgcccccctgcccggcttctctgctgtggtggtgtcctctgtgcccctgggcggcggcctgagcagcagcgccagcctggaggtggccacctacaccttcctgcagcagctgtgcccagattctggcaccatcgccgcccgggcccaggtgtgccagcaggccgagcacagctttgctggcatgccctgtggcatcatggaccagttcatcagcctgatgggccagaagggccacgccctgctgattgactgccgcagcctggagaccagcctggtgcccctgagtgaccccaagctggccgtgctgatcaccaacagcaatgtgcgccacagcctggccagcagcgagtaccctgtgagaagacggcagtgtgaggaggtggcccgggccctgggcaaggagagcctgcgggaggtgcagctggaggagctggaggccgcccgggacctggtgtccaaggagggcttcagaagagcccggcacgtggtgggggagatcagaagaacagcagatggagccaaggtgctgtgcctgtag

SEQ ID NO: 3134 - DNA, 1269 bp, synthetic construct
  misc_feature 1..1269: note = source = /note="Description of Artificial Sequence: Synthetic coding sequence"
  source 1..1269: mol_type = other DNA
atgtgtgccccacccaggggggcccctcctgagcacccagcccccaccggcctgtgccgcagcagctgtgccgagctgcaggcccgggtgatggccgccctgcggcagccccaggtggccgagctgctggccgaggcccggcgggccttccgggaggagtttggagctgagcctgagctggccgtgtctgcccctggccgggtgaacctgattggagagcacacagactacaaccagggcctggtgctgcccatggccctggagctgatgacagtgctggtgggcagccccaggaaggatggcctggtgtccctgctgaccaccagcgagggcgcagatgagccccagaggctgcagttccccctgcccacagcccagaggagcctggagcccggcaccccccgctgggccaactacgtgaagggcgtcatccagtactacccagctgcccccctgcccggcttctctgctgtggtggtgtcctctgtgcccctgggcggcggcctgagcagcagcgccagcctggaggtggccacctacaccttcctgcagcagctgtgcccagacagcggcaccatcgccgcccgggcccaggtgtgccagcaggccgagcacagctttgctggcatgccctgtggcatcatggaccagttcatcagcctgatgggccagaagggccacgccctgctgattgactgccgcagcctggagaccagcctggtgcccctgagtgaccccaagctggccgtgctgatcaccaacagcaatgtgcgccacagcctggccagcagcgagtaccctgtgagaagacggcagtgtgaggaggtggcccgggccctgggcaaggagagcctgcgggaggtgcagctggaggagctggaggccgcccgggacctggtgtccaaggagggcttccggcgggcccggcacgtggtgggggagatccggaggacagcccaggccgctgctgccctgcggcggggggactaccgggccttcggccgcctgatggtggagagccacaggagcctgagagatgattatgaggtgtcctgcccagagctggaccagctggtggaggccgccctggccgtgcctggggtgtatggcagcaggatgactggaggcggctttggaggctgcaccgtgaccctgctggaggccagcgctgcccctcatgccatgaggcacatccaggagcactacggcggcacagccaccttctacctgagccaggccgcagatggagccaaggtgctgtgcctgtag

SEQ ID NO: 3135 - DNA, 1179 bp, synthetic construct
  misc_feature 1..1179: note = source = /note="Description of Artificial Sequence: Synthetic coding sequence"
  source 1..1179: mol_type = other DNA
atggccgccctgcggcagccccaggtggccgagctgctggccgaggcccggcgggccttccgggaggagtttggagctgagcctgagctggccgtgtctgcccctggccgggtgaacctgattggagagcacacagactacaaccagggcctggtgctgcccatggccctggagctgatgacagtgctggtgggcagccccaggaaggatggcctggtgtccctgctgaccaccagcgagggcgcagatgagccccagaggctgcagttccccctgcccacagcccagaggagcctggagcccggcaccccccgctgggccaactacgtgaagggcgtcatccagtactacccagctgcccccctgcccggcttctctgctgtggtggtgtcctctgtgcccctgggcggcggcctgagcagcagcgccagcctggaggtggccacctacaccttcctgcagcagctgtgcccagacagcggcaccatcgccgcccgggcccaggtgtgccagcaggccgagcacagctttgctggcatgccctgtggcatcatggaccagttcatcagcctgatgggccagaagggccacgccctgctgattgactgccgcagcctggagaccagcctggtgcccctgagtgaccccaagctggccgtgctgatcaccaacagcaatgtgcgccacagcctggccagcagcgagtaccctgtgagaagacggcagtgtgaggaggtggcccgggccctgggcaaggagagcctgcgggaggtgcagctggaggagctggaggccgcccgggacctggtgtccaaggagggcttccggcgggcccggcacgtggtgggggagatccggaggacagcccaggccgctgctgccctgcggcggggggactaccgggccttcggccgcctgatggtggagagccacaggagcctgagagatgattatgaggtgtcctgcccagagctggaccagctggtggaggccgccctggccgtgcctggggtgtatggcagcaggatgactggaggcggctttggaggctgcaccgtgaccctgctggaggccagcgctgcccctcatgccatgaggcacatccaggagcactacggcggcacagccaccttctacctgagccaggccgcagatggagccaaggtgctgtgcctgtag

SEQ ID NO: 3136 - DNA, 1569 bp, synthetic construct
  misc_feature 1..1569: note = source = /note="Description of Artificial Sequence: Synthetic coding sequence"
  source 1..1569: mol_type = other DNA
atggctgctgtggtggccgccacccgctggtggcagctgctgctggtgctgtctgctgctggcatgggcgccagcggggccccccagccccccaacatcctgctgctgctgatggatgacatgggctggggagacctgggcgtgtatggagagcccagccgggagacccccaacctggacaggatggctgctgagggcctgctcttccccaacttctacagcgccaaccccctgtgcagccccagccgggccgccctgctgaccggccgcctgcccatcagaaatggcttctacaccaccaatgcccacgccagaaatgcctacaccccccaggagatcgtgggcggcatcccagacagcgagcagctgctgcctgagctgctgaagaaggccggctacgtgtccaagatcgtgggcaagtggcacctgggccaccggccccagttccaccccctgaagcacggctttgatgagtggtttggcagccccaactgccacttcggcccctatgacaacaaggcccggcccaacatccctgtgtacagagactgggagatggtgggccgctactatgaggagttccccatcaacctgaagacaggagaggccaacctgacccagatctacctgcaggaggccctggacttcatcaagaggcaggcccggcaccaccccttcttcctgtactgggccgtggatgccacccacgcccctgtgtatgccagcaagcccttcctgggcaccagccagaggggccgctatggagatgctgtgcgggagattgatgacagcatcggcaagatcctggagctgctgcaggacctgcacgtggccgacaacacctttgtgttcttcaccagtgacaatggagctgccctgatcagcgcccctgagcagggcggcagcaatggccccttcctgtgtgggaagcagaccacctttgagggcggcatgagggagcccgccctggcctggtggccaggccacgtgacagctggccaggtgagccaccagctgggcagcatcatggacctcttcaccaccagcctggccctggccggcctgaccccacccagcgaccgggccattgatggcctgaacctgctgcccaccctgctgcagggccgcctgatggaccggcccatcttctactacagaggagacaccctgatggccgccaccctgggccagcacaaggcccacttctggacctggaccaacagctgggagaacttccggcagggcatcgacttctgccccggccagaatgtgtctggagtgaccacccacaacctggaggaccacaccaagctgcccctcatcttccacctgggccgggaccccggggagcgcttccccctgagctttgccagcgctgagtaccaggaggccctgagccgcatcacctctgtggtgcagcagcaccaggaggccctggtgcctgcccagccccagctgaatgtgtgcaactgggccgtgatgaactgggcccctcctggctgtgagaagctgggcaagtgcctgaccccacctgagagcatccccaagaagtgcctgtggagccactag

SEQ ID NO: 3137 - DNA, 261 bp, synthetic construct
  misc_feature 1..261: note = source = /note="Description of Artificial Sequence: Synthetic coding sequence"
  source 1..261: mol_type = other DNA
atggctgctgtggtggccgccacccgctggtggcagctgctgctggtgctgtctgctgctggcatgggcgccagcggggccccccagccccccaacatcctgctgctgctgatggatgaccggggccgccactgcagccaggacggctaccccagcgccatggccagcaccccacccacccccatgcctgagacccccacccacagaagaaggctgtgggccgccagccagaccaggagcagcagctgccgctccttctag

SEQ ID NO: 3138 - DNA, 1344 bp, synthetic construct
  misc_feature 1..1344: note = source = /note="Description of Artificial Sequence: Synthetic coding sequence"
  source 1..1344: mol_type = other DNA
atggctgctgtggtggccgccacccgctggtggcagctgctgctggtgctgtctgctgctggcatgggcgccagcggggcccctggccagagggcctacaccccccaggagatcgtgggcggcatcccagattctgagcagctgctgcctgagctgctgaagaaggccggctacgtgtccaagatcgtgggcaagtggcacctgggccaccggccccagttccaccccctgaagcacggctttgatgagtggtttggcagccccaactgccacttcggcccctatgacaacaaggcccggcccaacatccctgtgtacagagactgggagatggtgggccgctactatgaggagttccccatcaacctgaagacaggagaggccaacctgacccagatctacctgcaggaggccctggacttcatcaagaggcaggcccggcaccaccccttcttcctgtactgggccgtggatgccacccacgcccctgtgtatgccagcaagcccttcctgggcaccagccagaggggccgctatggagatgctgtgcgggagattgatgacagcatcggcaagatcctggagctgctgcaggacctgcacgtggccgacaacacctttgtgttcttcaccagtgacaacggggccgccctgatcagcgcccctgagcagggcggcagcaatggccccttcctgtgtgggaagcagaccacctttgaaggaggcatgagggagcccgccctggcctggtggccaggccacgtgacagctggccaggtgagccaccagctgggcagcatcatggacctcttcaccaccagcctggccctggccggcctgaccccacccagcgaccgggccattgatggcctgaacctgctgcccaccctgctgcagggccgcctgatggaccggcccatcttctactacagaggagacaccctgatggccgccaccctgggccagcacaaggcccacttctggacctggaccaacagctgggagaacttccggcagggcatcgacttctgccccggccagaatgtgtctggagtgaccacccacaacctggaggaccacaccaagctgcccctcatcttccacctgggccgggaccctggagagcgcttccccctgagctttgccagcgctgagtaccaggaggccctgagccgcatcacctctgtggtgcagcagcaccaggaggccctggtgcctgcccagccccagctgaatgtgtgcaactgggccgtgatgaactgggcccctcctggctgtgagaagctgggcaagtgcctgaccccacctgagagcatccccaagaagtgcctgtggagccactag

SEQ ID NO: 3139 - DNA, 1140 bp, synthetic construct
  misc_feature 1..1140: note = source = /note="Description of Artificial Sequence: Synthetic coding sequence"
  source 1..1140: mol_type = other DNA
atgagccgcagcggcacagacccccagcagaggcagcaggccagcgaggctgatgctgctgctgccaccttccgggccaatgaccaccagcacatccgctacaaccccctgcaggatgagtgggtgctggtgtctgcccacaggatgaagaggccctggcagggccaggtggagccccagctgctgaagacagtgcccaggcatgaccccctgaaccccctgtgccctggggccatccgggccaacggggaggtgaacccccagtatgacagcaccttcctgtttgacaatgacttccctgccctgcagccagatgcccccagccctggccccagcgaccaccccctcttccaggccaagagcgcccggggcgtgtgcaaggtgatgtgcttccacccctggagcgatgtgaccctgcccctgatgtctgtgcctgagatccgggctgtggtggatgcctgggcctctgtgacagaggagctgggcgcccagtacccctgggtgcagatctttgagaacaagggggccatgatgggctgcagcaacccccacccccactgccaggtgtgggccagcagcttcctgcctgacatcgcccagcgggaggagaggagccagcaggcctacaagagccagcacggggagcccctgctgatggagtacagccggcaggagctgctgaggaaggagcggctggtgctgaccagcgagcactggctggtgctggtgcccttctgggccacctggccctaccagaccctgctgctgccccggcggcacgtgcggcggctgcctgagctgaccccagctgagagagatgacctggccagcatcatgaagaagctgctgaccaagtatgacaacctgtttgagaccagcttcccctacagcatgggctggcatggagcccccactggaagtgaagctggggccaactggaaccactggcagctgcacgcccactactacccacccctgctgcggagcgccaccgtgaggaagttcatggtgggctatgagatgctggcccaggcccagagggacctgaccccagagcaggccgctgagcggctgcgggccctgcctgaggtgcactaccacctgggccagaaggaccgggagacagccaccatcgcctag

SEQ ID NO: 3140 - DNA, 813 bp, synthetic construct
  misc_feature 1..813: note = source = /note="Description of Artificial Sequence: Synthetic coding sequence"
  source 1..813: mol_type = other DNA
atgaccctgagcaccctgtgtgtgctgggccccagcgagcccacagagagcaaggtgatgtgcttccacccctggagcgatgtgaccctgcccctgatgtctgtgcctgagatccgggctgtggtggatgcctgggcctctgtgacagaggagctgggcgcccagtacccctgggtgcagatctttgaaaataaaggagccatgatgggctgcagcaacccccacccccactgccaggtgtgggccagcagcttcctgcctgacatcgcccagcgggaggagaggagccagcaggcctacaagagccagcacggggagcccctgctgatggagtacagccggcaggagctgctgaggaaggagcggctggtgctgaccagcgagcactggctggtgctggtgcccttctgggccacctggccctaccagaccctgctgctgcccaggagacatgtgcggcggctgcctgagctgaccccagctgagagagatgacctggccagcatcatgaagaagctgctgaccaagtatgacaacctgtttgagaccagcttcccctacagcatgggctggcacggggcccccaccggcagcgaggccggggccaactggaaccactggcagctgcacgcccactactacccacccctgctgcggagcgccaccgtgaggaagttcatggtgggctatgagatgctggcccaggcccagagggacctgaccccagagcaggccgctgagcggctgcgggccctgcctgaggtgcactaccacctgggccagaaggaccgggagacagccaccatcgcctag

SEQ ID NO: 3141 - DNA, 255 bp, synthetic construct
  misc_feature 1..255: note = source = /note="Description of Artificial Sequence: Synthetic coding sequence"
  source 1..255: mol_type = other DNA
atgagccgcagcggcacagacccccagcagaggcagcaggccagcgaggctgatgctgctgctgccaccttccgggccaatgaccaccagcacatccgctacaaccccctgcaggatgagtgggtgctggtgtctgcccacaggatgaagaggccctggcagggccaggtggagccccagctgctgaagacagtgcccaggcatgaccccctgaaccccctgtgccctggggccatccgggccaacggggagtag

SEQ ID NO: 3142 - DNA, 2229 bp, synthetic construct
  misc_feature 1..2229: note = source = /note="Description of Artificial Sequence: Synthetic coding sequence"
  source 1..2229: mol_type = other DNA
atgagcccccagaagagggtgaagaatgtgcaggcccagaacagaaccagccagggcagcagcagcttccagaccaccctgagcgcctggaaggtgaagcaggaccccagcaacagcaagaacatcagcaagcacggccagaacaaccctgtgggggactatgagcacgcagatgaccaggccgaggaggatgccctgcagatggctgtgggctactttgagaagggccccatcaaggccagccagaacaaggacaagaccctggagaagcacctgaagacagtggagaatgtggcctggaagaatggcctggccagcgaggagattgacatcctgctgaacatcgccctgagcggcaagtttggaaatgctgtgaacacccgcatcctgaagtgcatgatcccagccaccgtcatcagtgaagattctgtggtgaaggctgtgtcctggctgtgtgtgggcaaatgttctggcagcaccaaggtgctcttctaccgctggctggtggccatgtttgacttcatcgacaggaaggagcagatcaacctgctgtatggcttcttctttgccagcctgcaggatgatgccctgtgcccctacgtgtgccacctgctgtacctgctgaccaagaaggaaaatgtgaagcccttccgggtgaggaagctgctggacctgcaggccaagatgggcatgcagccccacctgcaggccctgctgagcctgtacaagttctttgccccagccctgatctctgtgtccctgcctgtgaggaagaagatctacttcaagaacagcgagaacctgtggaagacagccctgctggccgtgaagcagaggaacagaggccccagccctgagcccctgaagctgatgctgggccctgccaacgtgcggcccctgaagaggaagtggaacagcctgagcgtcatccctgtgctgaacagcagcagctacaccaaggaatgtgggaagaaggagatgagcctgagtgactgcctgaacagaagtggcagcttccccctggagcagctgcagagcttcccccagctgctgcagaacatccactgcctggagctgcccagccagatgggctctgtgctgaacaacagcctgctgctgcactacatcaactgtgtgagagatgagcctgtgctgctgcgcttctactactggctgagccagaccctgcaggaggagtgcatctggtacaaggtgaacaactatgagcacggcaaggagttcaccaacttcctggacaccatcatccgggcagagtgcttcctgcaggagggcttctacagctgtgaggccttcctgtacaagagcctgcccctgtgggatggcctgtgctgccgcagccagttcctgcagctggtgtcctggatccccttcagcagcttcagcgaggtgaagcccctgctgtttgaccacctggcccagctgttcttcaccagcaccatctacttcaagtgcagcgtgctgcagagcctgaaggagctgctgcagaactggctgctgtggctgtccatggacatccacatgaagcctgtgaccaacagccccctggagaccaccctgggcggctccatgaacagcgtgtccaagctgatccactacgtgggctggctgagcaccacagccatgaggctggagagcaacaacaccttcctgctgcacttcatcctggacttctatgagaaggtgtgtgacatctacatcaactacaacctgcccctggtggtgctcttccccccaggcatcttctacagcgccctgctgagcctggacaccagcatcctgaaccagctgtgcttcatcatgcaccgctacaggaagaacctgacagctgccaagaagaatgagctggtgcagaagaccaagtctgagttcaacttcagcagcaagacctaccaggagttcaaccactacctgacctccatggtgggctgcctgtggaccagcaagccctttgggaagggcatctacattgatcctgagatcctggagaagacaggagtggccgagtacaagaacagcctgaatgtggtgcaccaccccagcttcctgtcctatgctgtgtccttcctgctgcagggcaagaagtggagctggtacctggactacctgttcagccagggcctgcagggcctgaagctgttcatccgcagctctgtgcaccacagcagcatccccagggctgagggcatcaactgcaacaaccagtactag

SEQ ID NO: 3143 - DNA, 636 bp, synthetic construct
  misc_feature 1..636: note = source = /note="Description of Artificial Sequence: Synthetic coding sequence"
  source 1..636: mol_type = other DNA
atgaagctgtgggatgtggtggccgtgtgcctggtgctgctgcacacagccagcgccttccccctgcctgctgggaagaggcctcctgaggccccagctgaggacaggagcctgggcagaagaagagccccctttgccctgagcagtgacagcaacatgcctgaggactacccagaccagtttgatgatgtgatggacttcatccaggccaccatcaagaggctgaagaggagcccagacaagcagatggctgtgctgccccggcgggagaggaaccggcaggccgctgctgccaaccctgagaacagccggggcaagggccggcggggccagaggggcaagaacagaggctgtgtgctgacagccatccacctgaatgtgacagacctgggcctgggctatgagaccaaggaggagctgatcttccgctactgcagcggcagctgtgatgctgctgagaccacctatgacaagatcctgaagaacctgagcaggaacagaaggctggtgtctgacaaggtgggccaggcctgctgccggcccatcgcctttgatgatgacctgtccttcctggatgacaacctggtgtaccacatcctgaggaagcacagcgccaagagatgtggctgcatctag

SEQ ID NO: 3144 - DNA, 558 bp, synthetic construct
  misc_feature 1..558: note = source = /note="Description of Artificial Sequence: Synthetic coding sequence"
  source 1..558: mol_type = other DNA
atgaagctgtgggatgtggtggccgtgtgcctggtgctgctgcacacagccagcgccttccccctgcctgctgccaacatgcctgaggactacccagaccagtttgatgatgtgatggacttcatccaggccaccatcaagaggctgaagaggagcccagacaagcagatggctgtgctgccccggcgggagaggaaccggcaggccgctgctgccaaccctgagaacagccggggcaagggccggcggggccagaggggcaagaacagaggctgtgtgctgacagccatccacctgaatgtgacagacctgggcctgggctatgagaccaaggaggagctgatcttccgctactgcagcggcagctgtgatgctgctgagaccacctatgacaagatcctgaagaacctgagcaggaacagaaggctggtgtctgacaaggtgggccaggcctgctgccggcccatcgcctttgatgatgacctgtccttcctggatgacaacctggtgtaccacatcctgaggaagcacagcgccaagagatgtggctgcatctag

SEQ ID NO: 3145 - DNA, 687 bp, synthetic construct
  misc_feature 1..687: note = source = /note="Description of Artificial Sequence: Synthetic coding sequence"
  source 1..687: mol_type = other DNA
atgcagagcctgcccaacagcaatggagctgctgctggccgggacttcaagatgaagctgtgggatgtggtggccgtgtgcctggtgctgctgcacacagccagcgccttccccctgcctgctgggaagaggcctcctgaggccccagcagaagatagaagcctgggcagaagaagagccccctttgccctgagcagtgacagcaacatgcctgaggactacccagaccagtttgatgatgtgatggacttcatccaggccaccatcaagaggctgaagaggagcccagacaagcagatggctgtgctgccccggcgggagaggaaccggcaggccgccgccgccaaccctgagaacagccggggcaaaggaagaagaggccagaggggcaagaacagaggctgtgtgctgacagccatccacctgaatgtgacagacctgggcctgggctatgagaccaaggaggagctgatcttccgctactgcagcggcagctgtgatgctgctgagaccacctatgacaagatcctgaagaacctgagcaggaacagaaggctggtgtctgacaaggtgggccaggcctgctgccggcccatcgcctttgatgatgacctgtccttcctggatgacaacctggtgtaccacatcctgaggaagcacagcgccaagagatgtggctgcatctag

SEQ ID NO: 3146 - DNA, 186 bp, synthetic construct
  misc_feature 1..186: note = source = /note="Description of Artificial Sequence: Synthetic coding sequence"
  source 1..186: mol_type = other DNA
atgaagctgtgggatgtggtggccgtgtgcctggtgctgctgcacacagccagcgccttccccctgcctgctgccaacatgcctgaggactacccagaccagtttgatgatgtgatggacttcatccaggccaccatcaagaggctgaagaggagcccagacaagcagatggctgtgctgccctag

SEQ ID NO: 3147 - DNA, 186 bp, synthetic construct; identical to SEQ ID NO: 3146
  misc_feature 1..186: note = source = /note="Description of Artificial Sequence: Synthetic coding sequence"
  source 1..186: mol_type = other DNA

SEQ ID NO: 3148 - DNA, 558 bp, synthetic construct; identical to SEQ ID NO: 3144
  misc_feature 1..558: note = source = /note="Description of Artificial Sequence: Synthetic coding sequence"
  source 1..558: mol_type = other DNA

SEQ ID NO: 3149 - DNA, 609 bp, synthetic construct
  misc_feature 1..609: note = source = /note="Description of Artificial Sequence: Synthetic coding sequence"
  source 1..609: mol_type = other DNA
atgcagagcctgcccaacagcaatggagctgctgctggccgggacttcaagatgaagctgtgggatgtggtggccgtgtgcctggtgctgctgcacacagccagcgccttccccctgcctgctgccaacatgcctgaggactacccagaccagtttgatgatgtgatggacttcatccaggccaccatcaagaggctgaagaggagcccagacaagcagatggctgtgctgccccggcgggagaggaaccggcaggccgccgccgccaaccctgagaacagccggggcaaaggaagaagaggccagaggggcaagaacagaggctgtgtgctgacagccatccacctgaatgtgacagacctgggcctgggctatgagaccaaggaggagctgatcttccgctactgcagcggcagctgtgatgctgctgagaccacctatgacaagatcctgaagaacctgagcaggaacagaaggctggtgtctgacaaggtgggccaggcctgctgccggcccatcgcctttgatgatgacctgtccttcctggatgacaacctggtgtaccacatcctgaggaagcacagcgccaagagatgtggctgcatctag

SEQ ID NO: 3150 - DNA, 543 bp, synthetic construct
  misc_feature 1..543: note = source = /note="Description of Artificial Sequence: Synthetic coding sequence"
  source 1..543: mol_type = other DNA
atgaagagcatctactttgtggccggcctgtttgtgatgctggtgcagggctcctggcagaggagcctgcaggacacagaggagaagagccgctccttcagcgccagccaggccgaccccctgagtgaccctgaccagatgaatgaagacaagaggcacagccagggcaccttcaccagtgactacagcaagtacctggacagcagaagagcccaggactttgtgcagtggctgatgaacaccaagaggaacagaaacaacatcgccaagagacatgatgaatttgaaagacatgctgagggcaccttcaccagtgatgtgtcctcctacctggagggccaggccgccaaggagttcatcgcctggctggtgaagggccggggcagaagagacttccctgaggaggtggccatcgtggaggagctgggcagaagacatgctgatggcagcttcagtgatgagatgaacaccatcctggacaacctggccgcccgggacttcatcaactggctgatccagaccaagatcacagacaggaagtag

SEQ ID NO: 3151 - DNA, 543 bp, synthetic construct; identical to SEQ ID NO: 3150
  misc_feature 1..543: note = source = /note="Description of Artificial Sequence: Synthetic coding sequence"
  source 1..543: mol_type = other DNA

SEQ ID NO: 3152 - DNA, 2262 bp, synthetic construct
  misc_feature 1..2262: note = source = /note="Description of Artificial Sequence: Synthetic coding sequence"
  source 1..2262: mol_type = other DNA
cgggccccagacagaagaggcagcccccggctggccagcacccggctgggcgccctgcggctgcggcccagcagaagagtgcctgcccgggccccagccccagcccaggcccccctgcccctgggcccccggctgctgggcctgcggaggaacatggccgcccccatgaccccagctgcccggccagaagattatgaagctgccctgaatgctgccctggctgatgtgcctgagctggcccggctgctggagattgacccctacctgaagccctatgctgtggacttccagaggcgctacaagcagttcagccagatcctgaagaacatcggggagaatgaaggaggcatcgacaagttcagccggggctatgagagctttggagtgcaccgctgtgctgatggcggcctgtactgcaaggagtgggcccctggagctgagggcgtcttcctgaccggggacttcaacggctggaaccccttctcctacccctacaagaagctggactatggcaagtgggagctgtacatcccccccaagcagaacaagtctgtgctggtgccccacggcagcaagctgaaggtggtgatcaccagcaagtctggagagatcctgtaccgcatcagcccctgggccaagtatgtggtgcgggagggggacaacgtgaactatgactggatccactgggaccctgagcacagctatgagttcaagcacagccggcccaagaagcccaggagcctgcgcatctatgagagccacgtgggcatcagcagccatgagggcaaggtggccagctacaagcacttcacctgcaatgtgctgccccgcatcaagggcctgggctacaactgcatccagctgatggccatcatggagcacgcctactatgccagctttggctaccagatcaccagcttctttgctgccagcagccgctatggcaccccagaggagctgcaggagctggtggacacagcccacagcatgggcatcatcgtgctgctggatgtggtgcacagccacgccagcaagaacagcgcagatggcctgaacatgtttgatggaacagacagctgctacttccacagcggcccccggggcacccatgacctgtgggacagccggctgtttgcctacagctcctgggagatcctgcgcttcctgctgagcaacatccgctggtggctggaggagtacagatttgatggcttccgctttgatggagtgacctccatgctgtaccaccaccacggcgtgggccagggcttcagcggggactacagcgagtacttcggcctgcaggtggatgaagatgccctgacctacctgatgctggccaaccacctggtgcacaccctgtgcccagacagcatcaccatcgcagaagatgtgtctggcatgcctgccctgtgcagccccatcagccagggcggcggcggctttgactaccgcctggccatggccatcccagacaagtggatccagctgctgaaggagttcaaggatgaggactggaacatgggagacatcgtgtacaccctgaccaacagacgctacctggagaagtgcatcgcctatgcagagagccatgaccaggccctggtgggggacaagagcctggccttctggctgatggatgctgagatgtacaccaacatgtctgtgctgacccccttcacccctgtgattgaccggggcatccagctgcacaagatgatccgcctcatcacccacggcctgggcggggagggctacctgaacttcatgggaaatgaatttggccaccctgagtggctggacttccccaggaaaggaaataatgaaagctaccactacgcccggcggcagttccacctgacagatgatgacctgctgcgctacaagttcctgaacaactttgaccgggacatgaaccggctggaggagagatatggctggctggccgccccccaggcctacgtgtctgagaagcatgagggcaacaagatcatcgcctttgagcgggccggcctgctcttcatcttcaacttccaccccagcaagagctacacagactacagagtgggcacagccctgcccgggaagttcaagatcgtgctggacagtgatgctgctgaatatggaggccaccagaggctggaccacagcacagacttcttcagcgaggcctttgagcacaacggccggccctacagcctgctggtgtacatccccagccgggtggccctgatcctgcagaatgtggacctgcccaactag

SEQ ID NO: 3153 - DNA, 2109 bp, synthetic construct
  misc_feature 1..2109: note = source = /note="Description of Artificial Sequence: Synthetic coding sequence"
  source 1..2109: mol_type = other DNA
atggccgcccccatgaccccagctgcccggcctgaggactatgaggccgccctgaatgctgccctggctgatgtgcctgagctggcccggctgctggagattgacccctacctgaagccctatgctgtggacttccagaggcgctacaagcagttcagccagatcctgaagaacattggagaaaatgaaggaggcatcgacaagttcagccggggctatgagagctttggagtgcaccgctgtgctgatggcggcctgtactgcaaggagtgggcccctggagctgagggcgtcttcctgactggagacttcaacggctggaaccccttctcctacccctacaagaagctggactatggcaagtgggagctgtacatcccccccaagcagaacaagtctgtgctggtgccccacggcagcaagctgaaggtggtgatcaccagcaagagcggggagatcctgtaccgcatcagcccctgggccaagtatgtggtgcgggagggggacaacgtgaactatgactggatccactgggaccctgagcacagctatgagttcaagcacagccggcccaagaagcccaggagcctgcgcatctatgagagccacgtgggcatcagcagccatgagggcaaggtggccagctacaagcacttcacctgcaatgtgctgccccgcatcaagggcctgggctacaactgcatccagctgatggccatcatggagcacgcctactatgccagctttggctaccagatcaccagcttctttgctgccagcagccgctatggcaccccagaggagctgcaggagctggtggacacagcccacagcatgggcatcatcgtgctgctggatgtggtgcacagccacgccagcaagaacagcgcagatggcctgaacatgtttgatggaacagacagctgctacttccacagcggcccccggggcacccatgacctgtgggacagccggctgtttgcctacagctcctgggagatcctgcgcttcctgctgagcaacatccgctggtggctggaggagtacagatttgatggcttccgctttgatggagtgacctccatgctgtaccaccaccacggcgtgggccagggcttcagcggggactacagcgagtacttcggcctgcaggtggatgaagatgccctgacctacctgatgctggccaaccacctggtgcacaccctgtgcccagacagcatcaccatcgccgaggatgtgtctggcatgcctgccctgtgcagccccatcagccagggcggcggcggctttgactaccgcctggccatggccatcccagacaagtggatccagctgctgaaggagttcaaggatgaggactggaacatgggagacatcgtgtacaccctgaccaacagacgctacctggagaagtgcatcgcctatgcagagagccatgaccaggccctggtgggggacaagagcctggccttctggctgatggatgctgagatgtacaccaacatgtctgtgctgacccccttcacccctgtgattgaccggggcatccagctgcacaagatgatccgcctcatcacccacggcctgggcggggagggctacctgaacttcatgggaaatgaatttggccaccctgagtggctggacttccccaggaagggcaacaatgaaagctaccactacgcccggcggcagttccacctgacagatgatgacctgctgcgctacaagttcctgaacaactttgaccgggacatgaaccggctggaggagagatatggctggctggccgccccccaggcctacgtgtctgagaagcatgagggcaacaagatcatcgcctttgaaagagctggcctgctcttcatcttcaacttccaccccagcaagagctacacagactacagagtgggcacagccctgcccgggaagttcaagatcgtgctggacagtgatgctgctgaatatggaggccaccagaggctggaccacagcacagacttcttcagcgaggcctttgagcacaacggccggccctacagcctgctggtgtacatccccagccgggtggccctgatcctgcagaatgtggacctgcccaactag

SEQ ID NO: 3154 - DNA, 1398 bp, synthetic construct
  misc_feature 1..1398: note = source = /note="Description of Artificial Sequence: Synthetic coding sequence"
  source 1..1398: mol_type = other DNA
atggccatcatggagcacgcctactatgccagctttggctaccagatcaccagcttctttgctgccagcagccgctatggcaccccagaggagctgcaggagctggtggacacagcccacagcatgggcatcatcgtgctgctggatgtggtgcacagccacgccagcaagaacagcgcagatggcctgaacatgtttgatggaacagacagctgctacttccacagcggcccccggggcacccatgacctgtgggacagccggctgtttgcctacagctcctgggagatcctgcgcttcctgctgagcaacatccgctggtggctggaggagtacagatttgatggcttccgctttgatggagtgacctccatgctgtaccaccaccacggcgtgggccagggcttcagcggggactacagcgagtacttcggcctgcaggtggatgaagatgccctgacctacctgatgctggccaaccacctggtgcacaccctgtgcccagacagcatcaccatcgcagaagatgtgtctggcatgcctgccctgtgcagccccatcagccagggcggcggcggctttgactaccgcctggccatggccatcccagacaagtggatccagctgctgaaggagttcaaggatgaggactggaacatgggagacatcgtgtacaccctgaccaacagacgctacctggagaagtgcatcgcctatgcagagagccatgaccaggccctggtgggggacaagagcctggccttctggctgatggatgctgagatgtacaccaacatgtctgtgctgacccccttcacccctgtgattgaccggggcatccagctgcacaagatgatccgcctcatcacccacggcctgggcggggagggctacctgaacttcatgggaaatgaatttggccaccctgagtggctggacttccccaggaaaggaaataatgaaagctaccactacgcccggcggcagttccacctgacagatgatgacctgctgcgctacaagttcctgaacaactttgaccgggacatgaaccggctggaggagagatatggctggctggccgccccccaggcctacgtgtctgagaagcatgagggcaacaagatcatcgcctttgagcgggccggcctgctcttcatcttcaacttccaccccagcaagagctacacagactacagagtgggcacagccctgcccgggaagttcaagatcgtgctggacagtgatgctgctgaatatggaggccaccagaggctggaccacagcacagacttcttcagcgaggcctttgagcacaacggccggccctacagcctgctggtgtacatccccagccgggtggccctgatcctgcagaatgtggacctgcccaactag

SEQ ID NO: 3155 - DNA, 1074 bp, synthetic construct
  misc_feature 1..1074: note = source = /note="Description of Artificial Sequence: Synthetic coding sequence"
  source 1..1074: mol_type = other DNA
atggaggagggcatgaatgtgctgcatgactttggcatccagagcacccactacctgcaggtgaactaccaggacagccaggactggttcatcctggtgtctgtgattgctgacctgagaaatgccttctacgtgctcttccccatctggttccacctgcaggaggccgtgggcatcaagctgctgtgggtggccgtgattggagactggctgaacctggtgttcaagtggatcctgtttggccagaggccctactggtgggtgctggacacagactactacagcaacacctctgtgcccctcatcaagcagtttcctgtgacctgtgaaacaggccctggcagccccagcggccacgccatgggcacagctggggtgtactacgtgatggtgaccagcaccctgagcatcttccagggcaagatcaagcccacctaccgcttccgctgcctgaatgtcatcctgtggctgggcttctgggccgtgcagctgaatgtgtgcctgagccgcatctacctggccgcccacttcccccaccaggtggtggccggcgtgctgtctggaattgctgtggccgagaccttcagccacatccacagcatctacaatgccagcctgaagaagtacttcctgatcaccttcttcctgttctcctttgccatcggcttctacctgctgctgaagggcctgggcgtggacctgctgtggaccctggagaaggcccagcgctggtgtgagcagcctgagtgggtgcacatcgacaccaccccatttgccagcctgctgaagaacctgggcaccctgtttggcctgggcctggccctgaacagctccatgtaccgggagagctgcaagggcaagctgagcaagtggctgcccttccggctgagcagcatcgtggccagcctggtgctgctgcacgtgtttgacagcctgaagccacccagccaggtggagctggtgttctacgtgctgtccttctgcaagtctgctgtggtgcccctggcctctgtgtctgtcatcccctactgcctggcccaggtgctgggccagccccacaagaagagcctgtag

SEQ ID NO: 3156 - DNA, 2859 bp, synthetic construct
  misc_feature 1..2859: note = source = /note="Description of Artificial Sequence: Synthetic coding sequence"
  source 1..2859: mol_type = other DNA
atgggcgtgcgccaccccccctgcagccaccggctgctggccgtgtgtgccctggtgtccctggccacagctgccctgctgggccacatcctgctgcatgacttcctgctggtgccccgggagctgagcggcagcagccctgtgctggaggagacccacccagcccaccagcagggcgccagcaggcctggccccagagatgcccaggcccaccctggccggcccagggctgtgcccacccagtgtgatgtgccccccaacagcagatttgactgtgccccagacaaggccatcacccaggagcagtgtgaggcccggggctgctgctacatcccagccaagcagggcctgcagggcgcccagatgggccagccctggtgcttcttcccccccagctaccccagctacaagctggagaacctgagcagcagcgagatgggctacacagccaccctgaccaggaccacccccaccttcttccccaaggacatcctgaccctgcggctggatgtgatgatggagacagagaaccggctgcacttcaccatcaaggaccctgccaacagaagatatgaggtgcccctggagacccctcatgtgcacagccgggcccccagccccctgtacagcgtggagttcagcgaggagcccttcggcgtgattgtgcggcggcagctggatggccgggtgctgctgaacaccaccgtggcccccctcttctttgctgaccagttcctgcagctgagcaccagcctgcccagccagtacatcaccggcctggccgagcacctgagccccctgatgctgagcacctcctggacccgcatcaccctgtggaacagagacctggcccccacccctggggccaacctgtatggcagccaccccttctacctggccctggaggatggcggcagcgcccacggcgtcttcctgctgaacagcaatgccatggatgtggtgctgcagcccagccctgccctgtcctggaggagcactggaggcatcctggatgtgtacatcttcctgggccctgagcccaagtctgtggtgcagcagtacctggatgtggtgggctaccccttcatgccaccctactggggcctgggcttccacctgtgccgctggggctacagcagcacagccatcacccggcaggtggtggagaacatgacccgggcccacttccccctggatgtgcagtggaatgacctggactacatggacagcagaagagacttcaccttcaacaaggatggcttccgggacttccctgccatggtgcaggagctgcaccagggcggccgccgctacatgatgattgtggaccctgccatcagcagcagcggccctgctggcagctaccggccctatgatgagggcctgcggcggggcgtcttcatcaccaatgagaccggccagcccctgattggcaaggtgtggccaggcagcacagccttcccagacttcaccaaccccacagccctggcctggtgggaggacatggtggccgagttccatgaccaggtgccctttgatggcatgtggattgacatgaatgagcccagcaacttcatccggggctctgaagatggctgccccaacaatgagctggagaaccccccctacgtgcctggggtggtgggcggcaccctgcaggccgccaccatctgtgccagcagccaccagttcctgagcacccactacaacctgcacaacctgtatggcctgacagaggccatcgccagccaccgggccctggtgaaggcccggggcacccggcccttcgtcatcagccgcagcacctttgctggccacggccgctatgccggccactggacaggagatgtgtggagctcctgggagcagctggccagctctgtgcctgagatcctgcagttcaacctgctgggcgtgcccctggtgggcgcagatgtgtgtggcttcctgggcaacaccagcgaggagctgtgtgtgcgctggacccagctgggcgccttctaccccttcatgaggaaccacaacagcctgctgagcctgccccaggagccctacagcttcagcgagcccgcccagcaggccatgaggaaggccctgaccctgcgctatgccctgctgccccacctgtacaccctcttccaccaggcccacgtggccggggagaccgtggcccggcccctcttcctggagttccccaaggacagcagcacctggacagtggaccaccagctgctgtggggcgaggccctgctgatcacccctgtgctgcaggccggcaaggccgaggtgacaggctacttccccctgggcacctggtatgacctgcagacagtgcctgtggaggccctgggcagcctgcccccacctcctgctgccccccgggagcccgccatccacagcgagggccagtgggtgaccctgcctgcccccctggacaccatcaacgtgcacctgcgggccggctacatcatccccctgcagggccctggcctgaccaccacagagagccggcagcagcccatggccctggccgtggccctgaccaagggcggggaggcccggggggagctgttctgggatgatggagagagcctggaggtgctggagcggggggcctacacccaggtgatcttcctggccaggaacaacaccatcgtgaatgagctggtgcgggtgaccagcgagggcgccggcctgcagctgcagaaggtgacagtgctgggcgtggccacagccccccagcaggtgctgagcaatggagtgcctgtgagcaacttcacctacagcccagacaccaaggtgctggacatctgtgtgtccctgctgatgggagagcagttcctggtgtcctggtgctag

SEQ ID NO: 3157 - DNA, 2859 bp, synthetic construct; identical to SEQ ID NO: 3156
  misc_feature 1..2859: note = source = /note="Description of Artificial Sequence: Synthetic coding sequence"
  source 1..2859: mol_type = other DNA

SEQ ID NO: 3158 - DNA, 1611 bp, synthetic construct
  misc_feature 1..1611: note = source = /note="Description of Artificial Sequence: Synthetic coding sequence"
  source 1..1611: mol_type = other DNA
atggagttcagcagccccagccgggaggagtgccccaagcccctgagccgggtgtccatcatggccggcagcctgaccggcctgctgctgctgcaggccgtgtcctgggccagcggggcccggccctgcatccccaagagctttggctacagctctgtggtgtgtgtgtgcaatgccacctactgtgacagctttgatcctcccaccttccctgccctgggcaccttcagccgctatgagagcaccaggagcggccgcaggatggagctgtccatgggccccatccaggccaaccacacaggcaccggcctgctgctgaccctgcagcctgagcagaagttccagaaggtgaagggctttggaggagccatgacagatgctgctgccctgaacatcctggccctgagccccccagcccagaacctgctgctgaagagctacttcagcgaggagggcatcggctacaacatcatccgggtgcccatggccagctgtgacttcagcatccgcacctacacctatgctgacaccccagatgacttccagctgcacaacttcagcctgcctgaggaggacaccaagctgaagatccccctcatccaccgggccctgcagctggcccagaggcctgtgtccctgctggccagcccctggaccagccccacctggctgaagaccaatggagctgtgaatggcaagggcagcctgaagggccagcccggggacatctaccaccagacctgggcccgctactttgtgaagttcctggatgcctatgcagagcacaagctgcagttctgggccgtgacagcagaaaatgagcccagcgctggcctgctgagcggctaccccttccagtgcctgggcttcaccccagagcaccagagggacttcatcgcccgggacctgggccccaccctggccaacagcacccaccacaacgtgcggctgctgatgctggatgaccagaggctgctgctgccccactgggccaaggtggtgctgacagatcctgaggccgccaagtatgtgcatggaattgctgtgcactggtacctggacttcctggccccagccaaggccaccctgggggagacccacaggctcttccccaacaccatgctgtttgccagcgaggcctgtgtgggcagcaagttctgggagcagagcgtgcggctgggctcctgggaccggggcatgcagtacagccacagcatcatcaccaacctgctgtaccacgtggtgggctggacagactggaacctggccctgaaccctgagggcggccccaactgggtgaggaactttgtggacagccccatcatcgtggacatcaccaaggacaccttctacaagcagcccatgttctaccacctgggccacttcagcaagttcatccctgagggcagccagagggtgggcctggtggccagccagaagaatgacctggatgctgtggccctgatgcacccagatggcagcgctgtggtggtggtgctgaacagaagcagcaaggatgtgcccctgaccatcaaggaccctgctgtgggcttcctggagaccatcagccctggctacagcatccacacctacctgtggaggcggcagtag

SEQ ID NO: 3159 - DNA, 1611 bp, synthetic construct; identical to SEQ ID NO: 3158
  misc_feature 1..1611: note = source = /note="Description of Artificial Sequence: Synthetic coding sequence"
  source 1..1611: mol_type = other DNA

SEQ ID NO: 3160 - DNA, 1566 bp, synthetic construct
  misc_feature 1..1566: note = source = /note="Description of Artificial Sequence: Synthetic coding sequence"
  source 1..1566: mol_type = other DNA
atggagttcagcagccccagccgggaggagtgccccaagcccctgagccgggtgtccatcatggccggcagcctgaccggcctgctgctgctgcaggccgtgtcctgggccagcggggcccggccctgcatccccaagagctttggctacagctctgtggtgtgtgtgtgcaatgccacctactgtgacagctttgatcctcccaccttccctgccctgggcaccttcagccgctatgagagcaccaggagcggccgcaggatggagctgtccatgggccccatccaggccaaccacacaggcaccggcctgctgctgaccctgcagccagatgctgctgccctgaacatcctggccctgagccccccagcccagaacctgctgctgaagagctacttcagcgaggagggcatcggctacaacatcatccgggtgcccatggccagctgtgacttcagcatccgcacctacacctacgccgacaccccagatgacttccagctgcacaacttcagcctgcctgaggaggacaccaagctgaagatccccctcatccaccgggccctgcagctggcccagaggcctgtgtccctgctggccagcccctggaccagccccacctggctgaagaccaacggggctgtgaatggcaagggcagcctgaagggccagcccggggacatctaccaccagacctgggcccgctactttgtgaagttcctggatgcctatgcagagcacaagctgcagttctgggccgtgacagcagaaaatgagcccagcgctggcctgctgagcggctaccccttccagtgcctgggcttcaccccagagcaccagagggacttcatcgcccgggacctgggccccaccctggccaacagcacccaccacaacgtgcggctgctgatgctggatgaccagaggctgctgctgccccactgggccaaggtggtgctgacagatcctgaggccgccaagtatgtgcacggcattgctgtgcactggtacctggacttcctggccccagccaaggccaccctgggggagacccacaggctcttccccaacaccatgctgtttgccagcgaggcctgtgtgggcagcaagttctgggagcagagcgtgcggctgggctcctgggaccggggcatgcagtacagccacagcatcatcaccaacctgctgtaccacgtggtgggctggacagactggaacctggccctgaaccctgagggcggccccaactgggtgaggaactttgtggacagccccatcatcgtggacatcaccaaggacaccttctacaagcagcccatgttctaccacctgggccacttcagcaagttcatccctgagggcagccagagggtgggcctggtggccagccagaagaatgacctggatgctgtggccctgatgcacccagatggcagcgctgtggtggtggtgctgaacagaagcagcaaggatgtgcccctgaccatcaaggaccctgctgtgggcttcctggagaccatcagccctggctacagcatccacacctacctgtggaggcggcagtag

SEQ ID NO: 3161 - DNA, 1464 bp, synthetic construct
  misc_feature 1..1464: note = source = /note="Description of Artificial Sequence: Synthetic coding sequence"
  source 1..1464: mol_type = other DNA
atggagttcagcagccccagccgggaggagtgccccaagcccctgagccgggtgtccatcatggccggcagcctgaccggcctgctgctgctgcaggccgtgtcctgggccagcggggcccggccctgcatccccaagagctttggctacagctctgtggtgtgtgtgtgcaatgccacctactgtgacagctttgatcctcccaccttccctgccctgggcaccttcagccgctatgagagcaccaggagcggccgcaggatggagctgtccatgggccccatccaggccaaccacacaggcaccggcatcggctacaacatcatccgggtgcccatggccagctgtgacttcagcatccgcacctacacctacgccgacaccccagatgacttccagctgcacaacttcagcctgcctgaggaggacaccaagctgaagatccccctcatccaccgggccctgcagctggcccagaggcctgtgtccctgctggccagcccctggaccagccccacctggctgaagaccaacggggctgtgaatggcaagggcagcctgaagggccagcccggggacatctaccaccagacctgggcccgctactttgtgaagttcctggatgcctatgcagagcacaagctgcagttctgggccgtgacagcagaaaatgagcccagcgctggcctgctgagcggctaccccttccagtgcctgggcttcaccccagagcaccagagggacttcatcgcccgggacctgggccccaccctggccaacagcacccaccacaacgtgcggctgctgatgctggatgaccagaggctgctgctgccccactgggccaaggtggtgctgacagatcctgaggccgccaagtatgtgcacggcattgctgtgcactggtacctggacttcctggccccagccaaggccaccctgggggagacccacaggctcttccccaacaccatgctgtttgccagcgaggcctgtgtgggcagcaagttctgggagcagagcgtgcggctgggctcctgggaccggggcatgcagtacagccacagcatcatcaccaacctgctgtaccacgtggtgggctggacagactggaacctggccctgaaccctgagggcggccccaactgggtgaggaactttgtggacagccccatcatcgtggacatcaccaaggacaccttctacaagcagcccatgttctaccacctgggccacttcagcaagttcatccctgagggcagccagagggtgggcctggtggccagccagaagaatgacctggatgctgtggccctgatgcacccagatggcagcgctgtggtggtggtgctgaacagaagcagcaaggatgtgcccctgaccatcaaggaccctgctgtgggcttcctggagaccatcagccctggctacagcatccacacctacctgtggaggcggcagtag

SEQ ID NO: 3162 - DNA, 1350 bp, synthetic construct
  misc_feature 1..1350: note = source = /note="Description of Artificial Sequence: Synthetic coding sequence"
  source 1..1350: mol_type = other DNA
atggagctgtccatgggccccatccaggccaaccacactggaacaggcctgctgctgaccctgcagcctgagcagaagttccagaaggtgaagggctttggaggagccatgacagatgctgctgccctgaacatcctggccctgagccccccagcccagaacctgctgctgaagagctacttcagcgaggagggcatcggctacaacatcatccgggtgcccatggccagctgtgacttcagcatccgcacctacacctacgccgacaccccagatgacttccagctgcacaacttcagcctgcctgaggaggacaccaagctgaagatccccctcatccaccgggccctgcagctggcccagaggcctgtgtccctgctggccagcccctggaccagccccacctggctgaagaccaacggggctgtgaatggcaagggcagcctgaagggccagcccggggacatctaccaccagacctgggcccgctactttgtgaagttcctggatgcctatgcagagcacaagctgcagttctgggccgtgacagcagaaaatgagcccagcgctggcctgctgagcggctaccccttccagtgcctgggcttcaccccagagcaccagagggacttcatcgcccgggacctgggccccaccctggccaacagcacccaccacaacgtgcggctgctgatgctggatgaccagaggctgctgctgccccactgggccaaggtggtgctgacagatcctgaggccgccaagtatgtgcacggcattgctgtgcactggtacctggacttcctggccccagccaaggccaccctgggggagacccacaggctcttccccaacaccatgctgtttgccagcgaggcctgtgtgggcagcaagttctgggagcagagcgtgcggctgggctcctgggaccggggcatgcagtacagccacagcatcatcaccaacctgctgtaccacgtggtgggctggacagactggaacctggccctgaaccctgagggcggccccaactgggtgaggaactttgtggacagccccatcatcgtggacatcaccaaggacaccttctacaagcagcccatgttctaccacctgggccacttcagcaagttcatccctgagggcagccagagggtgggcctggtggccagccagaagaatgacctggatgctgtggccctgatgcacccagatggcagcgctgtggtggtggtgctgaacagaagcagcaaggatgtgcccctgaccatcaaggaccctgctgtgggcttcctggagaccatcagccctggctacagcatccacacctacctgtggaggcggcagtag

SEQ ID NO: 3163 - DNA, 1482 bp, synthetic construct
  misc_feature 1..1482: note = source = /note="Description of Artificial Sequence: Synthetic coding sequence"
  source 1..1482: mol_type = other DNA
atgaccctgcggggctggagcttccaggtgctgcctgagagcaatgccacctactgtgacagctttgacccccccaccttccctgccctgggcaccttcagccgctatgagagcaccaggtctggaagaaggatggagctgtccatgggccccatccaggccaaccacactggaacaggcctgctgctgaccctgcagcctgagcagaagttccagaaggtgaagggctttggaggagccatgacagatgctgctgccctgaacatcctggccctgagccccccagcccagaacctgctgctgaagagctacttcagcgaggagggcatcggctacaacatcatccgggtgcccatggccagctgtgacttcagcatccgcacctacacctacgccgacaccccagatgacttccagctgcacaacttcagcctgcctgaggaggacaccaagctgaagatccccctcatccaccgggccctgcagctggcccagaggcctgtgtccctgctggccagcccctggaccagccccacctggctgaagaccaacggggctgtgaatggcaagggcagcctgaagggccagcccggggacatctaccaccagacctgggcccgctactttgtgaagttcctggatgcctatgcagagcacaagctgcagttctgggccgtgacagcagaaaatgagcccagcgctggcctgctgagcggctaccccttccagtgcctgggcttcaccccagagcaccagagggacttcatcgcccgggacctgggccccaccctggccaacagcacccaccacaacgtgcggctgctgatgctggatgaccagaggctgctgctgccccactgggccaaggtggtgctgacagatcctgaggccgccaagtatgtgcacggcattgctgtgcactggtacctggacttcctggccccagccaaggccaccctgggggagacccacaggctcttccccaacaccatgctgtttgccagcgaggcctgtgtgggcagcaagttctgggagcagagcgtgcggctgggctcctgggaccggggcatgcagtacagccacagcatcatcaccaacctgctgtaccacgtggtgggctggacagactggaacctggccctgaaccctgagggcggccccaactgggtgaggaactttgtggacagccccatcatcgtggacatcaccaaggacaccttctacaagcagcccatgttctaccacctgggccacttcagcaagttcatccctgagggcagccagagggtgggcctggtggccagccagaagaatgacctggatgctgtggccctgatgcacccagatggcagcgctgtggtggtggtgctgaacagaagcagcaaggatgtgcccctgaccatcaaggaccctgctgtgggcttcctggagaccatcagccctggctacagcatccacacctacctgtggaggcggcagtag

SEQ ID NO: 3164 - DNA, 1272 bp, synthetic construct
  misc_feature 1..1272: note = source = /note="Description of Artificial Sequence: Synthetic coding sequence"
  source 1..1272: mol_type = other DNA
atggagttcagcagccccagccgggaggagtgccccaagcccctgagccgggtgtccatcatggccggcagcctgaccggcctgctgctgctgcaggccgtgtcctgggccagcggcatcggctacaacatcatccgggtgcccatggccagctgtgacttcagcatccgcacctacacctacgccgacaccccagatgacttccagctgcacaacttcagcctgcctgaggaggacaccaagctgaagatccccctcatccaccgggccctgcagctggcccagaggcctgtgtccctgctggccagcccctggaccagccccacctggctgaagaccaacggggctgtgaatggcaagggcagcctgaagggccagcccggggacatctaccaccagacctgggcccgctactttgtgaagttcctggatgcctatgcagagcacaagctgcagttctgggccgtgacagcagaaaatgagcccagcgctggcctgctgagcggctaccccttccagtgcctgggcttcaccccagagcaccagagggacttcatcgcccgggacctgggccccaccctggccaacagcacccaccacaacgtgcggctgctgatgctggatgaccagaggctgctgctgccccactgggccaaggtggtgctgacagatcctgaggccgccaagtatgtgcacggcattgctgtgcactggtacctggacttcctggccccagccaaggccaccctgggggagacccacaggctcttccccaacaccatgctgtttgccagcgaggcctgtgtgggcagcaagttctgggagcagagcgtgcggctgggctcctgggaccggggcatgcagtacagccacagcatcatcaccaacctgctgtaccacgtggtgggctggacagactggaacctggccctgaaccctgagggcggccccaactgggtgaggaactttgtggacagccccatcatcgtggacatcaccaaggacaccttctacaagcagcccatgttctaccacctgggccacttcagcaagttcatccctgagggcagccagagggtgggcctggtggccagccagaagaatgacctggatgctgtggccctgatgcacccagatggcagcgctgtggtggtggtgctgaacagaagcagcaaggatgtgcccctgaccatcaaggaccctgctgtgggcttcctggagaccatcagccctggctacagcatccacacctacctgtggaggcggcagtag

SEQ ID NO: 3165 - DNA, 2112 bp, synthetic construct
  misc_feature 1..2112: note = source = /note="Description of Artificial Sequence: Synthetic coding sequence"
  source 1..2112: mol_type = other DNA
atgctgcggggccgcagcctgtctgtgaccagcctgggcggcctgccccagtgggaggtggaggagctgcctgtggaggagctgctgctgtttgaggtggcctgggaggtgaccaacaaggtgggcggcatctacaccgtcatccagaccaaggccaagaccacagcagatgagtggggcgagaactacttcctgattggcccctactttgagcacaacatgaagacccaggtggagcagtgtgagcctgtgaatgatgctgtgagaagagctgtggatgccatgaacaagcacggctgccaggtgcacttcggccgctggctgattgagggcagcccctacgtggtgctgtttgacatcggctacagcgcctggaacctggaccgctggaagggggacctgtgggaggcctgcagcgtgggcatcccctaccatgaccgggaggccaatgacatgctgatcttcggcagcctgacagcctggttcctgaaggaggtgacagaccacgcagatggcaagtatgtggtggcccagttccacgagtggcaggccggcatcggcctcatcctgagccgggccaggaagctgcccatcgccaccatcttcaccacccacgccaccctgctgggccgctacctgtgtgccgccaacatcgacttctacaaccacctggacaagttcaacatcgacaaggaggccggggagcggcagatctaccaccgctactgcatggagcgggcctctgtgcactgtgcccacgtgttcaccaccgtgtctgagatcacagccatcgaggccgagcacatgctgaagaggaagccagatgtggtgacccccaacggcctgaatgtgaagaagttctctgctgtgcatgagttccagaacctgcacgccatgtacaaggcccgcatccaggactttgtgcggggccacttctacggccacctggactttgacctggagaagaccctcttcctgttcatcgccggccgctatgagttcagcaacaagggagctgacatcttcctggagagcctgagccggctgaacttcctgctgaggatgcacaagagtgacatcaccgtgatggtgttcttcatcatgcctgccaagaccaacaacttcaacgtggagaccctgaagggccaggccgtgaggaagcagctgtgggatgtggcccacagcgtgaaggagaagtttgggaagaagctgtatgatgccctgctgcggggggagatcccagacctgaatgacatcctggacagagatgacctgaccatcatgaagagggccatcttcagcacccagaggcagagcctgccccctgtgaccacccacaacatgattgatgacagcacagaccccatcctgagcaccatcagaagaattggcctcttcaacaacagaacagacagagtgaaggtgatcctgcaccctgagttcctgagcagcaccagccccctgctgcccatggactatgaggagtttgtgcggggctgccacctgggcgtcttccccagctactatgagccctggggctacaccccagctgagtgcaccgtgatgggcatccccagcgtgaccaccaacctgagcggcttcggctgcttcatgcaggagcacgtggccgaccccacagcctacggcatctacatcgtggaccggcgcttccgcagcccagatgacagctgcaaccagctgaccaagttcctgtatggcttctgcaagcagagccggcggcagaggatcatccagaggaacagaacagagcggctgagtgacctgctggactggagatacctgggccgctactaccagcacgcccggcacctgaccctgagccgggccttcccagacaagttccacgtggagctgaccagcccccccaccacagagggcttcaagtacccccggcccagctctgtgccccccagccccagcggcagccaggccagcagcccccagagcagtgatgtggaggatgaggtggaggatgaaagatatgatgaggaggaggaggccgagcgggaccggctgaacatcaagagccccttcagcctgagccacgtgccccacggcaagaagaagctgcacggggagtacaagaactag

SEQ ID NO: 3166 - DNA, 351 bp, synthetic construct
  misc_feature 1..351: note = source = /note="Description of Artificial Sequence: Synthetic coding sequence"
  source 1..351: mol_type = other DNA
atggactactacagaaaatatgctgccatcttcctggtgaccctgagcgtcttcctgcacgtgctgcacagcgccccagatgtgcaggactgcccagaatgtaccctgcaggagaaccccttcttcagccagcccggggcccccatcctgcagtgcatgggctgctgcttcagccgggcctaccccacccccctgcggagcaagaagaccatgctggtgcagaagaatgtgaccagcgagagcacctgctgcgtggccaagagctacaacagagtgacagtgatgggcggcttcaaggtggagaaccacacagcctgccactgcagcacctgctactaccacaagagctag

SEQ ID NO: 3167 - DNA, 654 bp, synthetic construct
  misc_feature 1..654: note = source = /note="Description of Artificial Sequence: Synthetic coding sequence"
  source 1..654: mol_type = other DNA
atggccaccggcagcaggaccagcctgctgctggccttcggcctgctgtgcctgccctggctgcaggagggcagcgccttccccaccatccccctgagccggctgtttgacaatgccatgctgcgggcccaccggctgcaccagctggcctttgacacctaccaggagtttgaggaggcctacatccccaaggagcagaagtacagcttcctgcagaacccccagaccagcctgtgcttcagcgagagcatccccacccccagcaaccgggaggagacccagcagaagagcaacctggagctgctgcgcatcagcctgctgctgatccagagctggctggagcctgtgcagttcctgcggtctgtgtttgccaacagcctggtgtatggagccagtgacagcaatgtgtatgacctgctgaaggacctggaggagggcatccagaccctgatgggccgcctggaggatggcagccccaggacaggccagatcttcaagcagacctacagcaagtttgacaccaacagccacaatgatgatgccctgctgaagaactacggcctgctgtactgcttcaggaaggacatggacaaggtggagaccttcctgagaattgtgcagtgccgctctgtggagggcagctgtggcttctag

SEQ ID NO: 3168 - DNA, 369 bp, synthetic construct
  misc_feature 1..369: note = source = /note="Description of Artificial Sequence: Synthetic coding sequence"
  source 1..369: mol_type = other DNA
atggccaccggcagcaggaccagcctgctgctggccttcggcctgctgtgcctgccctggctgcaggagggcagcgccttccccaccatccccctgagccggctgtttgacaatgccatgctgcgggcccaccggctgcaccagctggcctttgacacctaccaggagttccggctggaggatggcagccccaggacaggccagatcttcaagcagacctacagcaagtttgacaccaacagccacaatgatgatgccctgctgaagaactacggcctgctgtactgcttcaggaaggacatggacaaggtggagaccttcctgcgcatcgtgcagtgccgctctgtggagggcagctgtggcttctag

SEQ ID NO: 3169 - DNA, 534 bp, synthetic construct
  misc_feature 1..534: note = source = /note="Description of Artificial Sequence: Synthetic coding sequence"
  source 1..534: mol_type = other DNA
atggccaccggcagcaggaccagcctgctgctggccttcggcctgctgtgcctgccctggctgcaggagggcagcgccttccccaccatccccctgagccggctgtttgacaatgccatgctgcgggcccaccggctgcaccagctggcctttgacacctaccaggagttcaacctggagctgctgcgcatcagcctgctgctgatccagagctggctggagcctgtgcagttcctgcggtctgtgtttgccaacagcctggtgtatggagccagtgacagcaatgtgtatgacctgctgaaggacctggaggagggcatccagaccctgatgggccgcctggaggatggcagccccaggacaggccagatcttcaagcagacctacagcaagtttgacaccaacagccacaatgatgatgccctgctgaagaactacggcctgctgtactgcttcaggaaggacatggacaaggtggagaccttcctgagaattgtgcagtgccgctctgtggagggcagctgtggcttctag

SEQ ID NO: 3170 - DNA, 609 bp, synthetic construct
  misc_feature 1..609: note = source = /note="Description of Artificial Sequence: Synthetic coding sequence"
  source 1..609: mol_type = other DNA
atggccaccggcagcaggaccagcctgctgctggccttcggcctgctgtgcctgccctggctgcaggagggcagcgccttccccaccatccccctgagccggctgtttgacaatgccatgctgcgggcccaccggctgcaccagctggcctttgacacctaccaggagttcaacccccagaccagcctgtgcttcagcgagagcatccccacccccagcaaccgggaggagacccagcagaagagcaacctggagctgctgcgcatcagcctgctgctgatccagagctggctggagcctgtgcagttcctgcggtctgtgtttgccaacagcctggtgtatggagccagtgacagcaatgtgtatgacctgctgaaggacctggaggagggcatccagaccctgatgggccgcctggaggatggcagccccaggacaggccagatcttcaagcagacctacagcaagtttgacaccaacagccacaatgatgatgccctgctgaagaactacggcctgctgtactgcttcaggaaggacatggacaaggtggagaccttcctgcgcatcgtgcagtgccgctctgtggagggcagctgtggcttctag

SEQ ID NO: 3171 - DNA, 771 bp, synthetic construct
  misc_feature 1..771: note = source = /note="Description of Artificial Sequence: Synthetic coding sequence"
  source 1..771: mol_type = other DNA
atggctgctggcagcaggaccagcctgctgctggccttcggcctgctgtgcctgtcctggctgcaggagggcagcgccttccccaccatccccctgagccggctgtttgacaatgccatgctgcgggcccggcggctgtaccagctggcctatgacacctaccaggagtttgaggaggcctacatcctgaaggagcagaagtacagcttcctgcagaacccccagaccagcctgtgcttcagcgagagcatccccacccccagcaacagagtgaagacccagcagaagagcaacctggagctgctgcgcatcagcctgctgctgatccagagctggctggagcctgtgcagctgctgcggtctgtgtttgccaacagcctggtgtatggagccagtgacagcaatgtgtaccgccacctgaaggacctggaggagggcatccagaccctgatgtgggtgcgggtggcccctggcatccccaaccctggggcccccctggccagccgggactggggcgagaagcactgctgccccctcttcagcagccaggccctgacccaggagaacagcccctacagcagcttccccctggtgaaccccccaggcctgagcctgcagcctggaggagagggcggcaagtggatgaatgaaagaggccgggagcagtgccccagcgcctggcccctgctgctcttcctgcactttgctgaggccggccgctggcagcccccagactgggccgacctgcagagcgtgctgcagcaggtgtag

SEQ ID NO: 3172 - DNA, 654 bp, synthetic construct
  misc_feature 1..654: note = source = /note="Description of Artificial Sequence: Synthetic coding sequence"
  source 1..654: mol_type = other DNA
atggctgctggcagcaggaccagcctgctgctggccttcggcctgctgtgcctgtcctggctgcaggagggcagcgccttccccaccatccccctgagccggctgtttgacaatgccatgctgcgggcccggcggctgtaccagctggcctatgacacctaccaggagtttgaggaggcctacatcctgaaggagcagaagtacagcttcctgcagaacccccagaccagcctgtgcttcagcgagagcatccccacccccagcaacagagtgaagacccagcagaagagcaacctggagctgctgcgcatcagcctgctgctgatccagagctggctggagcctgtgcagctgctgcggtctgtgtttgccaacagcctggtgtatggagccagtgacagcaatgtgtaccgccacctgaaggacctggaggagggcatccagaccctgatgtggaggctggaggatggcagccccaggacaggccagatcttcaaccagagctacagcaagtttgacaccaagagccacaatgatgatgccctgctgaagaactacggcctgctgtactgcttcaggaaggacatggacaaggtggagaccttcctgagaattgtgcagtgccgctctgtggagggcagctgtggcttctag

SEQ ID NO: 3173 - DNA, 609 bp, synthetic construct
  misc_feature 1..609: note = source = /note="Description of Artificial Sequence: Synthetic coding sequence"
  source 1..609: mol_type = other DNA
atggctgctggcagcaggaccagcctgctgctggccttcggcctgctgtgcctgtcctggctgcaggagggcagcgccttccccaccatccccctgagccggctgtttgacaatgccatgctgcgggcccggcggctgtaccagctggcctatgacacctaccaggagttcaacccccagaccagcctgtgcttcagcgagagcatccccacccccagcaacagagtgaagacccagcagaagagcaacctggagctgctgcgcatcagcctgctgctgatccagagctggctggagcctgtgcagctgctgcggtctgtgtttgccaacagcctggtgtatggagccagtgacagcaatgtgtaccgccacctgaaggacctggaggagggcatccagaccctgatgtggaggctggaggatggcagccccaggacaggccagatcttcaaccagagctacagcaagtttgacaccaagagccacaatgatgatgccctgctgaagaactacggcctgctgtactgcttcaggaaggacatggacaaggtggagaccttcctgcgcatcgtgcagtgccgctctgtggagggcagctgtggcttctag

SEQ ID NO: 3174 - DNA, 738 bp, synthetic construct
  misc_feature 1..738: note = source = /note="Description of Artificial Sequence: Synthetic coding sequence"
  source 1..738: mol_type = other DNA
atggctgctggcagcaggaccagcctgctgctggccttcggcctgctgtgcctgtcctggctgcaggagggcagcgccttccccaccatccccctgagccggctgtttgacaatgccatgctgcgggcccggcggctgtaccagctggcctatgacacctaccaggagtttgaggaggcctacatcctgaaggagcagaagtacagcttcctgcagaacccccagaccagcctgtgcttcagcgagagcatccccacccccagcaacagagtgaagacccagcagaagagcaacctggagctgctgcgcatcagcctgctgctgatccagagctggctggagcctgtgcagctgctgcggtctgtgtttgccaacagcctggtgtatggagccagtgacagcaatgtgtaccgccacctgaaggacctggaggagggcatccagaccctgattggctggaagatggccgcccctggcctgggccgcagcagcatcagccccacagccagcctgacccagaacagaaccaccatgacccactgcagcaggaccaccggctgcagcacagccagcggccgcacctggaccaggagccgccacagctgtgccagctgcagcgctgccctgtggagggctgctgtggccagcagctgccctgggggcatccctgtgaccccaccccagtgcctgtcctggagctggaaggtgctgctgcagtgccccccagccctgtcctag

SEQ ID NO: 3175 - DNA, 753 bp, synthetic construct
  misc_feature 1..753: note = source = /note="Description of Artificial Sequence: Synthetic coding sequence"
  source 1..753: mol_type = other DNA
atggagaagggccctgtgcgggccccagctgagaagcccaggggggcccgctgcagcaatggcttccctgagcgggaccccccccggcccggccccagcaggcctgctgagaagccacccaggcctgaggccaagagcgcccagcctgcagatggctggaagggggagcggcccaggtctgaggaggacaatgagctgaacctgcccaacctggccgccgcctacagcagcatcctgagcagcctgggggagaacccccagaggcagggcctgctgaagaccccctggagggctgccagcgccatgcagttcttcaccaagggctaccaggagaccatcagtgatgtgctgaatgatgccatctttgatgaggaccatgatgagatggtgattgtgaaggacatcgacatgttctccatgtgtgagcaccacctggtgccctttgtgggcaaggtgcacatcggctacctgcccaacaagcaggtgctgggcctgagcaagctggccagaattgtggagatctacagccggcggctgcaggtgcaggagcggctgaccaagcagattgctgtggccatcacagaggccctgcggcctgctggggtgggcgtggtggtggaggccacccacatgtgcatggtgatgagaggagtgcagaagatgaacagcaagacagtgaccagcaccatgctgggcgtcttccgggaggaccccaagacccgggaggagttcctgaccctcatccgctcctag

SEQ ID NO: 3176 - DNA, 693 bp, synthetic construct
  misc_feature 1..693: note = source = /note="Description of Artificial Sequence: Synthetic coding sequence"
  source 1..693: mol_type = other DNA
atggagaagggccctgtgcgggccccagctgagaagcccaggggggcccgctgcagcaatggcttccctgagcgggaccccccccggcccggccccagcaggcctgctgagaagccacccaggcctgaggccaagagcgcccagcctgcagatggctggaagggggagcggcccaggtctgaggaggacaatgagctgaacctgcccaacctggccgccgcctacagcagcatcctgagcagcctgggggagaacccccagaggcagggcctgctgaagaccccctggagggctgccagcgccatgcagttcttcaccaagggctaccaggagaccatcagtgatgtgctgaatgatgccatctttgatgaggaccatgatgagatggtgattgtgaaggacatcgacatgttctccatgtgtgagcaccacctggtgccctttgtgggcaaggtgcacatcggctacctgcccaacaagcaggtgctgggcctgagcaagctggccagaattgtggagatctacagccggcggctgcaggtgcaggagcggctgaccaagcagattgctgtggccatcacagaggccctgcggcctgctggggtgggcgtggtggtggaggccaccaagagcaacaagtacaacaagggcctgagctacttcctgctggccaccttcctgtggcagtactag

SEQ ID NO: 3177 - DNA, 753 bp, synthetic construct; identical to SEQ ID NO: 3175
  misc_feature 1..753: note = source = /note="Description of Artificial Sequence: Synthetic coding sequence"
  source 1..753: mol_type = other DNA

SEQ ID NO: 3178 - DNA, 642 bp, synthetic construct
  misc_feature 1..642: note = source = /note="Description of Artificial Sequence: Synthetic coding sequence"
  source 1..642: mol_type = other DNA
atggagaagggccctgtgcgggccccagctgagaagcccaggggggcccgctgcagcaatggcttccctgagcgggaccccccccggcccggccccagcaggcctgctgagaagccacccaggcctgaggccaagagcgcccagcctgcagatggctggaagggggagcggcccaggtctgaggaggacaatgagctgaacctgcccaacctggccgccgcctacagcagcatcctgagcagcctgggggagaacccccagaggcagggcctgctgaagaccccctggagggctgccagcgccatgcagttcttcaccaagggctaccaggagaccatcagtgatgtgctgaatgatgccatctttgatgaggaccatgatgagatggtgattgtgaaggacatcgacatgttctccatgtgtgagcaccacctggtgccctttgtgggcaaggtgcacatcggctacctgcccaacaagcaggtgctgggcctgagcaagctggccagaattgtggagatctacagccggcggctgcaggtgcaggagcggctgaccaagcagattgctgtggccatcacagaggccctgcggcctgctggggtgggcgtggtggtggaggccaccagcgctgagccctag

SEQ ID NO: 3179 - DNA, 702 bp, synthetic construct
  misc_feature 1..702: note = source = /note="Description of Artificial Sequence: Synthetic coding sequence"
  source 1..702: mol_type = other DNA
atggagaagggccctgtgcgggccccagctgagaagcccaggggggcccgctgcagcaatggcttccctgagcgggaccccccccggcccggccccagcaggcctgctgagaagccacccaggcctgaggccaagagcgcccagcctgcagatggctggaagggggagcggcccaggtctgaggaggacaatgagctgaacctgcccaacctggccgccgcctacagcagcatcctgagcagcctgggggagaacccccagaggcagggcctgctgaagaccccctggagggctgccagcgccatgcagttcttcaccaagggctaccaggagaccatcagtgatgtgctgaatgatgccatctttgatgaggaccatgatgagatggtgattgtgaaggacatcgacatgttctccatgtgtgagcaccacctggtgccctttgtgggcaaggtgcacatcggctacctgcccaacaagcaggtgctgggcctgagcaagctggccagaattgtggagatctacagccggcggctgcaggtgcaggagcggctgaccaagcagattgctgtggccatcacagaggccctgcggcctgctggggtgggcgtggtggtggaggccaccaagagcaacaagtacaacaagggcctgagccccctgctgagcagctgccacctgtttgtggccatcctgaagtag

SEQ ID NO: 3180 - DNA, 1014 bp, synthetic construct
  misc_feature 1..1014: note = source = /note="Description of Artificial Sequence: Synthetic coding sequence"
  source 1..1014: mol_type = other DNA
atgggcccccgggcccggcctgccctgctgctgctgatgctgctgcagacagctgtgctgcagggccgcctgctgcggagccacagcctgcactacctgttcatgggcgccagcgagcaggacctgggcctgagcctgtttgaggccctgggctacgtggatgaccagctgtttgtgttctatgaccacgagagccggcgggtggagcccaggaccccctgggtgagcagccgcatcagcagccagatgtggctgcagctgagccagagcctgaagggctgggaccacatgttcaccgtggacttctggaccatcatggagaaccacaaccacagcaaggagagccacaccctgcaggtgatcctgggctgtgagatgcaggaggacaacagcacagagggctactggaagtatggctatgatggccaggaccacctggagttctgcccagacaccctggactggagggctgctgagccccgggcctggcccaccaagctggagtgggagcggcacaagatccgggcccggcagaacagagcctacctggagcgggactgcccagcccagctgcagcagctgctggagctgggccggggcgtgctggaccagcaggtgccccccctggtgaaggtgacccaccacgtgaccagctctgtgaccaccctgcgctgccgggccctgaactactacccccagaacatcaccatgaagtggctgaaggacaagcagcccatggatgccaaggagtttgagcccaaggatgtgctgcccaatggagatggcacctaccagggctggatcaccctggccgtgcccccaggagaggagcagcgctacacctgccaggtggagcaccctggcctggaccagcccctcatcgtcatctgggagcccagccccagcggcaccctggtgattggagtcatctctggaattgctgtgtttgtggtgatcctcttcatcggcatcctcttcatcatcctgaggaagaggcagggcagcagcttctag

SEQ ID NO: 3181 - DNA, 771 bp, synthetic construct
  misc_feature 1..771: note = source = /note="Description of Artificial Sequence: Synthetic coding sequence"
  source 1..771: mol_type = other DNA
atgggcccccgggcccggcctgccctgctgctgctgatgctgctgcagacagctgtgctgcagggccgcctgctgcggagccacagcctgcactacctgttcatgggcgccagcgagcaggacctgggcctgagcctgtttgaggccctgggctacgtggatgaccagctgtttgtgttctatgaccacgagagccggcgggtggagcccaggaccccctgggtgagcagccgcatcagcagccagatgtggctgcagctgagccagagcctgaagggctgggaccacatgttcaccgtggacttctggaccatcatggagaaccacaaccacagcaaggtgccccccctggtgaaggtgacccaccacgtgaccagctctgtgaccaccctgcgctgccgggccctgaactactacccccagaacatcaccatgaagtggctgaaggacaagcagcccatggatgccaaggagtttgagcccaaggatgtgctgcccaatggagatggcacctaccagggctggatcaccctggccgtgcccccaggagaggagcagcgctacacctgccaggtggagcaccctggcctggaccagcccctcatcgtcatctgggagcccagccccagcggcaccctggtgattggagtcatctctggaattgctgtgtttgtggtgatcctcttcatcggcatcctcttcatcatcctgaggaagaggcagggcagcagaggagccatgggccactacgtgctggccgagcgggagtag

SEQ ID NO: 3182 - DNA, 729 bp, synthetic construct
  misc_feature 1..729: note = source = /note="Description of Artificial Sequence: Synthetic coding sequence"
  source 1..729: mol_type = other DNA
atgggcccccgggcccggcctgccctgctgctgctgatgctgctgcagacagctgtgctgcagggccgcctgctgcggagccacagcctgcactacctgttcatgggcgccagcgagcaggacctgggcctgagcctgtttgaggccctgggctacgtggatgaccagctgtttgtgttctatgaccacgagagccggcgggtggagcccaggaccccctgggtgagcagccgcatcagcagccagatgtggctgcagctgagccagagcctgaagggctgggaccacatgttcaccgtggacttctggaccatcatggagaaccacaaccacagcaaggtgaccaccctgcgctgccgggccctgaactactacccccagaacatcaccatgaagtggctgaaggacaagcagcccatggatgccaaggagtttgagcccaaggatgtgctgcccaatggagatggcacctaccagggctggatcaccctggccgtgcccccaggagaggagcagcgctacacctgccaggtggagcaccctggcctggaccagcccctcatcgtcatctgggagcccagccccagcggcaccctggtgattggagtcatctctggaattgctgtgtttgtggtgatcctcttcatcggcatcctcttcatcatcctgaggaagaggcagggcagcagaggagccatgggccactacgtgctggccgagcgggagtag

SEQ ID NO: 3183 - DNA, 783 bp, synthetic construct
  misc_feature 1..783: note = source = /note="Description of Artificial Sequence: Synthetic coding sequence"
  source 1..783: mol_type = other DNA
atgggcccccgggcccggcctgccctgctgctgctgatgctgctgcagacagctgtgctgcagggccgcctgctgcagagccacaccctgcaggtgatcctgggctgtgagatgcaggaggacaacagcacagagggctactggaagtatggctatgatggccaggaccacctggagttctgcccagacaccctggactggagggctgctgagccccgggcctggcccaccaagctggagtgggagcggcacaagatccgggcccggcagaacagagcctacctggagcgggactgcccagcccagctgcagcagctgctggagctgggccggggcgtgctggaccagcaggtgccccccctggtgaaggtgacccaccacgtgaccagctctgtgaccaccctgcgctgccgggccctgaactactacccccagaacatcaccatgaagtggctgaaggacaagcagcccatggatgccaaggagtttgagcccaaggatgtgctgcccaatggagatggcacctaccagggctggatcaccctggccgtgcccccaggagaggagcagcgctacacctgccaggtggagcaccctggcctggaccagcccctcatcgtcatctgggagcccagccccagcggcaccctggtgattggagtcatctctggaattgctgtgtttgtggtgatcctcttcatcggcatcctcttcatcatcctgaggaagaggcagggcagcagaggagccatgggccactacgtgctggccgagcgggagtag

SEQ ID NO: 3184 - DNA, 231 bp, synthetic construct
  misc_feature 1..231: note = source = /note="Description of Artificial Sequence: Synthetic coding sequence"
  source 1..231: mol_type = other DNA
atgggcccccgggcccggcctgccctgctgctgctgatgctgctgcagacagctgtgctgcagggccgcctgctgcagcccagccccagcggcaccctggtgattggagtcatctctggaattgctgtgtttgtggtgatcctcttcatcggcatcctcttcatcatcctgaggaagaggcagggcagcagaggagccatgggccactacgtgctggccgagcgggagtag

SEQ ID NO: 3185 - DNA, 507 bp, synthetic construct
  misc_feature 1..507: note = source = /note="Description of Artificial Sequence: Synthetic coding sequence"
  source 1..507: mol_type = other DNA
atgggcccccgggcccggcctgccctgctgctgctgatgctgctgcagacagctgtgctgcagggccgcctgctgctgccccccctggtgaaggtgacccaccacgtgaccagctctgtgaccaccctgcgctgccgggccctgaactactacccccagaacatcaccatgaagtggctgaaggacaagcagcccatggatgccaaggagtttgagcccaaggatgtgctgcccaatggagatggcacctaccagggctggatcaccctggccgtgcccccaggagaggagcagcgctacacctgccaggtggagcaccctggcctggaccagcccctcatcgtcatctgggagcccagccccagcggcaccctggtgattggagtcatctctggaattgctgtgtttgtggtgatcctcttcatcggcatcctcttcatcatcctgaggaagaggcagggcagcagaggagccatgggccactacgtgctggccgagcgggagtag

SEQ ID NO: 3186 - DNA, 1047 bp, synthetic construct
  misc_feature 1..1047: note = source = /note="Description of Artificial Sequence: Synthetic coding sequence"
  source 1..1047: mol_type = other DNA
atgggcccccgggcccggcctgccctgctgctgctgatgctgctgcagacagctgtgctgcagggccgcctgctgcggagccacagcctgcactacctgttcatgggcgccagcgagcaggacctgggcctgagcctgtttgaggccctgggctacgtggatgaccagctgtttgtgttctatgaccacgagagccggcgggtggagcccaggaccccctgggtgagcagccgcatcagcagccagatgtggctgcagctgagccagagcctgaagggctgggaccacatgttcaccgtggacttctggaccatcatggagaaccacaaccacagcaaggagagccacaccctgcaggtgatcctgggctgtgagatgcaggaggacaacagcacagagggctactggaagtatggctatgatggccaggaccacctggagttctgcccagacaccctggactggagggctgctgagccccgggcctggcccaccaagctggagtgggagcggcacaagatccgggcccggcagaacagagcctacctggagcgggactgcccagcccagctgcagcagctgctggagctgggccggggcgtgctggaccagcaggtgccccccctggtgaaggtgacccaccacgtgaccagctctgtgaccaccctgcgctgccgggccctgaactactacccccagaacatcaccatgaagtggctgaaggacaagcagcccatggatgccaaggagtttgagcccaaggatgtgctgcccaatggagatggcacctaccagggctggatcaccctggccgtgcccccaggagaggagcagcgctacacctgccaggtggagcaccctggcctggaccagcccctcatcgtcatctgggagcccagccccagcggcaccctggtgattggagtcatctctggaattgctgtgtttgtggtgatcctcttcatcggcatcctcttcatcatcctgaggaagaggcagggcagcagaggagccatgggccactacgtgctggccgagcgggagtag

SEQ ID NO: 3187 - DNA, 978 bp, synthetic construct
  misc_feature 1..978: note = source = /note="Description of Artificial Sequence: Synthetic coding sequence"
  source 1..978: mol_type = other DNA
atgggcccccgggcccggcctgccctgctgctgctgatgctgctgcagacagctgtgctgcagggccgcctgctgcccctgggctacgtggatgaccagctgtttgtgttctatgaccacgagagcagaagagtggagcccaggaccccctgggtgagcagccgcatcagcagccagatgtggctgcagctgagccagagcctgaagggctgggaccacatgttcaccgtggacttctggaccatcatggagaaccacaaccacagcaaggagagccacaccctgcaggtgatcctgggctgtgagatgcaggaggacaacagcacagagggctactggaagtatggctatgatggccaggaccacctggagttctgcccagacaccctggactggagggctgctgagccccgggcctggcccaccaagctggagtgggagcggcacaagatccgggcccggcagaacagagcctacctggagcgggactgcccagcccagctgcagcagctgctggagctgggccggggcgtgctggaccagcaggtgccccccctggtgaaggtgacccaccacgtgaccagctctgtgaccaccctgcgctgccgggccctgaactactacccccagaacatcaccatgaagtggctgaaggacaagcagcccatggatgccaaggagtttgagcccaaggatgtgctgcccaatggagatggcacctaccagggctggatcaccctggccgtgcccccaggagaggagcagcgctacacctgccaggtggagcaccctggcctggaccagcccctgattgtcatctgggagcccagccccagcggcaccctggtgattggagtcatcagcggcattgctgtgtttgtggtgatcctcttcatcggcatcctcttcatcatcctgaggaagaggcagggcagcagaggagccatgggccactacgtgctggccgagcgggagtag

SEQ ID NO: 3188 - DNA, 1005 bp, synthetic construct
  misc_feature 1..1005: note = source = /note="Description of Artificial Sequence: Synthetic coding sequence"
  source 1..1005: mol_type = other DNA
atgggcccccgggcccggcctgccctgctgctgctgatgctgctgcagacagctgtgctgcagggccgcctgctgcggagccacagcctgcactacctgttcatgggcgccagcgagcaggacctgggcctgagcctgtttgaggccctgggctacgtggatgaccagctgtttgtgttctatgaccacgagagccggcgggtggagcccaggaccccctgggtgagcagccgcatcagcagccagatgtggctgcagctgagccagagcctgaagggctgggaccacatgttcaccgtggacttctggaccatcatggagaaccacaaccacagcaaggagagccacaccctgcaggtgatcctgggctgtgagatgcaggaggacaacagcacagagggctactggaagtatggctatgatggccaggaccacctggagttctgcccagacaccctggactggagggctgctgagccccgggcctggcccaccaagctggagtgggagcggcacaagatccgggcccggcagaacagagcctacctggagcgggactgcccagcccagctgcagcagctgctggagctgggccggggcgtgctggaccagcaggtgaccaccctgcgctgccgggccctgaactactacccccagaacatcaccatgaagtggctgaaggacaagcagcccatggatgccaaggagtttgagcccaaggatgtgctgcccaatggagatggcacctaccagggctggatcaccctggccgtgcccccaggagaggagcagcgctacacctgccaggtggagcaccctggcctggaccagcccctcatcgtcatctgggagcccagccccagcggcaccctggtgattggagtcatctctggaattgctgtgtttgtggtgatcctcttcatcggcatcctcttcatcatcctgaggaagaggcagggcagcagaggagccatgggccactacgtgctggccgagcgggagtag

SEQ ID NO: 3189 - DNA, 1038 bp, synthetic construct
  misc_feature 1..1038: note = source = /note="Description of Artificial Sequence: Synthetic coding sequence"
  source 1..1038: mol_type = other DNA
atgggcccccgggcccggcctgccctgctgctgctgatgctgctgcagacagctgtgctgcagggccgcctgctgcggagccacagcctgcactacctgttcatgggcgccagcgagcaggacctgggcctgagcctgtttgaggccctgggctacgtggatgaccagctgtttgtgttctatgaccacgagagccggcgggtggagcccaggaccccctgggtgagcagccgcatcagcagccagatgtggctgcagctgagccagagcctgaagggctgggaccacatgttcaccgtggacttctggaccatcatggagaaccacaaccacagcaaggagagccacaccctgcaggtgatcctgggctgtgagatgcaggaggacaacagcacagagggctactggaagtatggctatgatggccaggaccacctggagttctgcccagacaccctggactggagggctgctgagccccgggcctggcccaccaagctggagtgggagcggcacaagatccgggcccggcagaacagagcctacctggagcgggactgcccagcccagctgcagcagctgctggagctgggccggggcgtgctggaccagcaggagggcagcgagagcagcagcctgcccgggaaggtgaccaccctgcgctgccgggccctgaactactacccccagaacatcaccatgaagtggctgaaggacaagcagcccatggatgccaaggagtttgagcccaaggatgtgctgcccaatggagatggcacctaccagggctggatcaccctggccgtgcccccaggagaggagcagcgctacacctgccaggtggagcaccctggcctggaccagcccctgattgtcatctgggagcccagccccagcggcaccctggtgattggagtcatcagcggcattgctgtgtttgtggtgatcctcttcatcggcatcctcttcatcatcctgaggaagaggcagggcagcagaggagccatgggccactacgtgctggccgagcgggagtag

SEQ ID NO: 3190 - DNA, 741 bp, synthetic construct
  misc_feature 1..741: note = source = /note="Description of Artificial Sequence: Synthetic coding sequence"
  source 1..741: mol_type = other DNA
atgggcccccgggcccggcctgccctgctgctgctgatgctgctgcagacagctgtgctgcagggccgcctgctgcagagccacaccctgcaggtgatcctgggctgtgagatgcaggaggacaacagcacagagggctactggaagtatggctatgatggccaggaccacctggagttctgcccagacaccctggactggagggctgctgagccccgggcctggcccaccaagctggagtgggagcggcacaagatccgggcccggcagaacagagcctacctggagcgggactgcccagcccagctgcagcagctgctggagctgggccggggcgtgctggaccagcaggtgaccaccctgcgctgccgggccctgaactactacccccagaacatcaccatgaagtggctgaaggacaagcagcccatggatgccaaggagtttgagcccaaggatgtgctgcccaatggagatggcacctaccagggctggatcaccctggccgtgcccccaggagaggagcagcgctacacctgccaggtggagcaccctggcctggaccagcccctcatcgtcatctgggagcccagccccagcggcaccctggtgattggagtcatctctggaattgctgtgtttgtggtgatcctcttcatcggcatcctcttcatcatcctgaggaagaggcagggcagcagaggagccatgggccactacgtgctggccgagcgggagtag

SEQ ID NO: 3191 - DNA, 486 bp, synthetic construct
  misc_feature 1..486: note = source = /note="Description of Artificial Sequence: Synthetic coding sequence"
  source 1..486: mol_type = other DNA
atgggcccccgggcccggcctgccctgctgctgctgatgctgctgcagacagctgtgctgcagggccgcctgctgcggagccacagcctgcactacctgttcatgggcgccagcgagcaggacctgggcctgagcctgtttgaggccctgggctacgtggatgaccagctgtttgtgttctatgaccacgagagccggcgggtggagcccaggaccccctgggtgagcagccgcatcagcagccagatgtggctgcagctgagccagagcctgaagggctgggaccacatgttcaccgtggacttctggaccatcatggagaaccacaaccacagcaaggagagccacaccctgcaggtgatcctgggctgtgagatgcaggaggacaacagcacagagggctactggaagtatggctatgatggccaggtgctgcaggacaccatctacagcagcgaggtgagcagcctgggcatcaagttctag

SEQ ID NO: 3192 - DNA, 366 bp, synthetic construct
  misc_feature 1..366: note = source = /note="Description of Artificial Sequence: Synthetic coding sequence"
  source 1..366: mol_type = other DNA
atggagaaccacaaccacagcaaggagagccacaccctgcaggtgatcctgggctgtgagatgcaggaggacaacagcacagagggctactggaagtatggctatgatggccaggaccacctggagttctgcccagacaccctggactggagggctgctgagccccgggcctggcccaccaagctggagtgggagcggcacaagatccgggcccggcagaacagagcctacctggagcgggactgcccagcccagctgcagcagctgctggagctgggccggggcgtgctggaccagcaggtgccccccctggtgaaggtgacccaccacgtgagccacccagcccagcccagcaaggagagctag

SEQ ID NO: 3193 - DNA, 1281 bp, synthetic construct
  misc_feature 1..1281: note = source = /note="Description of Artificial Sequence: Synthetic coding sequence"
  source 1..1281: mol_type = other DNA
atgggagagcccggccagagccccagccccaggagcagccacggcagcccccccaccctgagcaccctgaccctgctgctgctgctgtgtggccacgcccacagccagtgcaagatcctgcgctgcaatgcagaatatgtgagcagcaccctgagcctgcggggcggcggcagcagcggggccctgcggggcggcggcggcggcggccggggcggcggcgtgggcagcggcggcctgtgccgggccctgcggagctatgccctgtgcaccaggagaacagcccggacctgccgcggggacctggccttccacagcgctgtgcacggcatcgaggacctgatgatccagcacaactgcagccggcagggccccacagcccctcctccaccccggggccctgccctgcccggggccggcagcggcctgcctgccccagacccctgtgactatgagggccgcttcagccggctgcacggccggcccccaggcttcctgcactgtgccagctttggagacccccacgtgcgctccttccaccaccacttccacacctgccgggtgcagggcgcctggcccctgctggacaatgacttcctgtttgtgcaggccaccagcagccccatggccctgggcgccaatgccacagccaccaggaagctgaccatcatcttcaagaacatgcaggagtgcatcgaccagaaggtgtaccaggccgaggtggacaacctgcctgtggcctttgaagatggcagcatcaatggaggagacaggcctgggggcagcagcctgagcatccagacagccaaccctggcaaccacgtggagatccaggccgcctacatcggcaccaccatcatcatccggcagacagctggccagctgtccttcagcatcaaggtggccgaggatgtggccatggccttctctgctgagcaggacctgcagctgtgtgtgggcggctgcccccccagccagaggctgagccgctctgagaggaacagaagaggagccatcaccatcgacacagcccggcggctgtgcaaggagggcctgcctgtggaggatgcctacttccacagctgtgtgtttgatgtgctgatcagcggggaccccaacttcaccgtggccgcccaggccgccctggaggatgcccgggccttcctgcctgacctggagaagctgcacctgttccccagtgatgctggggtgcccctgagcagcgccaccctgctggcccccctgctgagcggcctgtttgtgctgtggctgtgcatccagtag

SEQ ID NO: 3194 - DNA, 942 bp, synthetic construct
  misc_feature 1..942: note = source = /note="Description of Artificial Sequence: Synthetic coding sequence"
  source 1..942: mol_type = other DNA
atgatccagcacaactgcagccggcagggccccacagcccctcctccaccccggggccctgccctgcctggagctggcagcggcctgcctgccccagacccctgtgactatgagggccgcttcagccggctgcacggccggcccccaggcttcctgcactgtgccagctttggagacccccacgtgcgctccttccaccaccacttccacacctgccgggtgcagggcgcctggcccctgctggacaatgacttcctgtttgtgcaggccaccagcagccccatggccctgggcgccaatgccacagccaccaggaagctgaccatcatcttcaagaacatgcaggagtgcatcgaccagaaggtgtaccaggccgaggtggacaacctgcctgtggcctttgaagatggcagcatcaatggaggagacaggcctgggggcagcagcctgagcatccagacagccaaccctggcaaccacgtggagatccaggccgcctacatcggcaccaccatcatcatccggcagacagctggccagctgtccttcagcatcaaggtggctgaagatgtggccatggccttctctgctgagcaggacctgcagctgtgtgtgggcggctgcccccccagccagaggctgagccgctcagaaagaaacagaagaggagccatcaccatcgacacagcccggcggctgtgcaaggagggcctgcctgtggaggatgcctacttccacagctgtgtgtttgatgtgctgatcagcggggaccccaacttcaccgtggccgcccaggccgccctggaggatgcccgggccttcctgcctgacctggagaagctgcacctgttccccagtgatgctggggtgcccctgagcagcgccaccctgctggcccccctgctgagcggcctgtttgtgctgtggctgtgcatccagtag

SEQ ID NO: 3195 - DNA, 282 bp, synthetic construct
  misc_feature 1..282: note = source = /note="Description of Artificial Sequence: Synthetic coding sequence"
  source 1..282: mol_type = other DNA
atgggagagcccggccagagccccagccccaggagcagccacggcagcccccccaccctgagcaccctgaccctgctgctgctgctgtgtggccacgcccacagccagtgcaagatcctgcgctgcaatgcagaatatgtgagcagcaccctgagcctgcggggcggcggcagcagcggggccctgcggggcggcggcggcggcggccggggcggcggcgtgggcagcggcggcctgtgccgggccctgcggagctatgccctgtgcaccaggagaacatag

SEQ ID NO: 3196 - DNA, 603 bp, synthetic construct
  misc_feature 1..603: note = source = /note="Description of Artificial Sequence: Synthetic coding sequence"
  source 1..603: mol_type = other DNA
atgcaggagtgcatcgaccagaaggtgtaccaggccgaggtggacaacctgcctgtggcctttgaagatggcagcatcaatggaggagacaggcctgggggcagcagcctgagcatccagacagccaaccctggcaaccacgtggagatccaggccgcctacatcggcaccaccatcatcatccggcagacagctggccagctgtccttcagcatcaaggtggccgaggatgtggccatggccttctctgctgagcaggacctgcagctgtgtgtgggcggctgcccccccagccagaggctgagccgctctgagaggaacagaagaggagccatcaccatcgacacagcccggcggctgtgcaaggagggcctgcctgtggaggatgcctacttccacagctgtgtgtttgatgtgctgatcagcggggaccccaacttcaccgtggccgcccaggccgccctggaggatgcccgggccttcctgcctgacctggagaagctgcacctgttccccagtgatgctggggtgcccctgagcagcgccaccctgctggcccccctgctgagcggcctgtttgtgctgtggctgtgcatccagtag

SEQ ID NO: 3197 - DNA, 603 bp, synthetic construct; identical to SEQ ID NO: 3196
  misc_feature 1..603: note = source = /note="Description of Artificial Sequence: Synthetic coding sequence"
  source 1..603: mol_type = other DNA

SEQ ID NO: 3198 - DNA, 603 bp, synthetic construct; identical to SEQ ID NO: 3196
  misc_feature 1..603: note = source = /note="Description of Artificial Sequence: Synthetic coding sequence"
  source 1..603: mol_type = other DNA

SEQ ID NO: 3199 - DNA, 603 bp, synthetic construct; identical to SEQ ID NO: 3196
  misc_feature 1..603: note = source = /note="Description of Artificial Sequence: Synthetic coding sequence"
  source 1..603: mol_type = other DNA

SEQ ID NO: 3200 - DNA, 1905 bp, synthetic construct
  misc_feature 1..1905: note = source = /note="Description of Artificial Sequence: Synthetic coding sequence"
  source 1..1905: mol_type = other DNA
atgcccagcgacctggccaagaagaaggccgccaagaagaaggaggccgccaaggcccggcagaggcccaggaaaggacatgaagaaaatggagatgtggtgacagagccccaggtggccgagaagaatgaggccaacggccgggagaccacagaggtggacctgctgaccaaggagctggaggactttgagatgaagaaggctgctgcccgggctgtgactggagtgctggccagccaccccaacagcacagatgtgcacatcatcaacctgagcctgaccttccacggccaggagctgctgagtgacaccaagctggagctgaacagcggccgccgctatggcctgattggcctgaatggcatcggcaagtccatgctgctgagcgccatcggcaagcgggaggtgcccatccctgagcacatcgacatctaccacctgacccgggagatgccacccagcgacaagacccccctgcactgtgtgatggaggtggacacagagcgggccatgctggagaaggaggccgagcggctggcccatgaagatgctgaatgtgagaagctgatggagctgtatgagcggctggaggagctggatgctgacaaggccgagatgagggccagccgcatcctgcacggcctgggcttcaccccagccatgcagaggaagaagctgaaggacttcagcggcggctggaggatgagggtggccctggcccgggccctcttcatccggcccttcatgctgctgctggatgagcccaccaaccacctggacctggatgcctgtgtgtggctggaggaggagctgaagaccttcaagaggatcctggtgctggtgagccacagccaggacttcctgaatggagtgtgcaccaacatcatccacatgcacaacaagaagctgaagtactacacaggcaactatgaccagtatgtgaagacccggctggagctggaggagaaccagatgaagcgcttccactgggagcaggaccagatcgcccacatgaagaactacatcgccaggtttggacatggcagcgccaagctggcccggcaggcccagagcaaggagaagaccctgcagaagatgatggccagcggcctgacagagcgggtggtgtctgacaagaccctgtccttctacttccccccctgtgggaagatccccccacctgtgatcatggtgcagaatgtgtccttcaagtacaccaaggatggcccctgcatctacaacaacctggagtttggcatcgacctggacaccagggtggccctggtgggccccaacggggccggcaagagcaccctgctgaagctgctgaccggggagctgctgcccacagatggcatgatcaggaagcacagccacgtgaagattggccgctaccaccagcacctgcaggagcagctggacctggacctgagccccctggagtacatgatgaagtgctacccagagatcaaggagaaggaggagatgaggaagatcatcggccgctatggcctgaccgggaagcagcaggtgagccccatccggaacctgagtgatggccagaagtgccgggtgtgcctggcctggctggcctggcagaacccccacatgctgttcctggatgagcccaccaaccacctggacatcgagaccattgatgccctggctgatgccatcaatgaatttgagggcggcatgatgctggtgtcccatgacttccgcctcatccagcaggtggcccaggagatctgggtgtgtgagaagcagaccatcaccaagtggccaggggacatcctggcctacaaggagcacctgaagagcaagctggtggatgaggagccccagctgaccaagaggacccacaacgtgtgcaccctgaccctggccagcctgccccggccctag

SEQ ID NO: 3201 - DNA, 555 bp, synthetic construct
  misc_feature 1..555: note = source = /note="Description of Artificial Sequence: Synthetic coding sequence"
  source 1..555: mol_type = other DNA
atgtgggtgaccaagctgctgcctgccctgctgctgcagcacgtgctgctgcacctgctgctgctgcccatcgccatcccctatgcagagggccagaggaagagaagaaacaccatccacgagttcaagaagagcgccaagaccaccctcatcaagattgatcctgccctgaagatcaagaccaagaaggtgaacacagctgaccagtgtgccaaccgctgcaccaggaacaagggcctgcccttcacctgcaaggcctttgtgtttgacaaggccaggaagcagtgcctgtggttccccttcaacagcatgagcagcggcgtgaagaaggagtttggccacgagtttgacctgtatgagaacaaggactacatccggaactgcatcatcggcaagggccgcagctacaagggcaccgtgtccatcaccaagagcggcatcaagtgccagccctggagctccatgatcccccatgagcacagcggaggagatgactgcctggtggagagcaccttctacagcatccccttctggggccacaacagcgccaggtag

SEQ ID NO: 3202 - DNA, 891 bp, synthetic construct
  misc_feature 1..891: note = source = /note="Description of Artificial Sequence: Synthetic coding sequence"
  source 1..891: mol_type = other DNA
atgtgggtgaccaagctgctgcctgccctgctgctgcagcacgtgctgctgcacctgctgctgctgcccatcgccatcccctatgcagagggccagaggaagagaagaaacaccatccacgagttcaagaagagcgccaagaccaccctcatcaagattgatcctgccctgaagatcaagaccaagaaggtgaacacagctgaccagtgtgccaaccgctgcaccaggaacaagggcctgcccttcacctgcaaggcctttgtgtttgacaaggccaggaagcagtgcctgtggttccccttcaacagcatgagcagcggcgtgaagaaggagtttggccacgagtttgacctgtatgagaacaaggactacatccggaactgcatcatcggcaagggccgcagctacaagggcaccgtgtccatcaccaagagcggcatcaagtgccagccctggagctccatgatcccccatgagcacagcttcctgcccagcagctaccggggcaaggacctgcaggagaactactgcaggaaccccagaggagaggagggcggcccctggtgcttcaccagcaaccctgaggtgcgctatgaggtgtgtgacatcccccagtgcagcgaggtggagtgcatgacctgcaatggagagagctaccggggcctgatggaccacacagagagcggcaagatctgccagcgctgggaccaccagaccccccaccgccacaagttcctgcctgagcgctacccagacaagggctttgatgacaactactgcagaaatccagatggccagccccggccctggtgctacaccctggacccccacacccgctgggagtactgtgccatcaagacctgtggggacatcacctgggccctgaactag

SEQ ID NO: 3203 - DNA, 426 bp, synthetic construct
  misc_feature 1..426: note = source = /note="Description of Artificial Sequence: Synthetic coding sequence"
  source 1..426: mol_type = other DNA
atgtgggtgaccaagctgctgcctgccctgctgctgcagcacgtgctgctgcacctgctgctgctgcccatcgccatcccctatgcagagggccagaggaagagaagaaacaccatccacgagttcaagaagagcgccaagaccaccctcatcaagattgatcctgccctgaagatcaagaccaagaaggtgaacacagctgaccagtgtgccaaccgctgcaccaggaacaagggcctgcccttcacctgcaaggcctttgtgtttgacaaggccaggaagcagtgcctgtggttccccttcaacagcatgagcagcggcgtgaagaaggagtttggccacgagtttgacctgtatgagaacaaggactacatccggaactgcatcatcggcaagggccgcagctacaagggcaccgtgtcctag

SEQ ID NO: 3204 - DNA, 357 bp, synthetic construct
  misc_feature 1..357: note = source = /note="Description of Artificial Sequence: Synthetic coding sequence"
  source 1..357: mol_type = other DNA
atgtgggtgaccaagctgctgcctgccctgctgctgcagcacgtgctgctgcacctgctgctgctgcccatcgccatcccctatgcagagggccagaggaagagaagaaacaccatccacgagttcaagaagagcgccaagaccaccctcatcaagattgatcctgccctgaagatcaagaccaagaaggtgaacacagctgaccagtgtgccaaccgctgcaccaggaacaagggcctgcccttcacctgcaaggcctttgtgtttgacaaggccaggaagcagtgcctgtggttccccttcaacagcatgagcagcggcgtgaagaaggagtttggccacgagtttgacctgtag

SEQ ID NO: 3205 - DNA, 633 bp, synthetic construct
  misc_feature 1..633: note = source = /note="Description of Artificial Sequence: Synthetic coding sequence"
  source 1..633: mol_type = other DNA
atgtgggtgaccaagctgctgcctgccctgctgctgcagcacgtgctgctgcacctgctgctgctgcccatcgccatcccctatgcagagggccagaggaagagaagaaacaccatccacgagttcaagaagagcgccaagaccaccctcatcaagattgatcctgccctgaagatcaagaccaagaaggtgaacacagctgaccagtgtgccaaccgctgcaccaggaacaagggcctgcccttcacctgcaaggcctttgtgtttgacaaggccaggaagcagtgcctgtggttccccttcaacagcatgagcagcggcgtgaagaaggagtttggccacgagtttgacctgtatgagaacaaggactacatccggaactgcatcatcggcaagggccgcagctacaagggcaccgtgtccatcaccaagagcggcatcaagtgccagccctggagctccatgatcccccatgagcacagcttcctgcccagcagctaccggggcaaggacctgcaggagaactactgcaggaaccccagaggagaggagggcggcccctggtgcttcaccagcaaccctgaggtgcgctatgaggtgtgtgacatcccccagtgcagcgagggcaagtag

SEQ ID NO: 3206 - DNA, 873 bp, synthetic construct
  misc_feature 1..873: note = source = /note="Description of Artificial Sequence: Synthetic coding sequence"
  source 1..873: mol_type = other DNA
atgtgggtgaccaagctgctgcctgccctgctgctgcagcacgtgctgctgcacctgctgctgctgcccatcgccatcccctatgcagagggccagaggaagagaagaaacaccatccacgagttcaagaagagcgccaagaccaccctcatcaagattgatcctgccctgaagatcaagaccaagaaggtgaacacagctgaccagtgtgccaaccgctgcaccaggaacaagggcctgcccttcacctgcaaggcctttgtgtttgacaaggccaggaagcagtgcctgtggttccccttcaacagcatgagcagcggcgtgaagaaggagtttggccacgagtttgacctgtatgagaacaaggactacatccggaactgcatcatcggcaagggccgcagctacaagggcaccgtgtccatcaccaagagcggcatcaagtgccagccctggagctccatgatcccccatgagcacagcttcctgcccagcagctaccggggcaaggacctgcaggagaactactgcaggaaccccagaggagaggagggcggcccctggtgcttcaccagcaaccctgaggtgcgctatgaggtgtgtgacatcccccagtgcagcgaggtggagtgcatgacctgcaatggagagagctaccggggcctgatggaccacacagagagcggcaagatctgccagcgctgggaccaccagaccccccaccgccacaagttcctgcctgagcgctacccagacaagggctttgatgacaactactgcagaaatccagatggccagccccggccctggtgctacaccctggacccccacacccgctgggagtactgtgccatcaagacctgtgagacctag

SEQ ID NO: 3207 - DNA, 858 bp, synthetic construct
  misc_feature 1..858: note = source = /note="Description of Artificial Sequence: Synthetic coding sequence"
  source 1..858: mol_type = other DNA
atgtgggtgaccaagctgctgcctgccctgctgctgcagcacgtgctgctgcacctgctgctgctgcccatcgccatcccctatgcagagggccagaggaagagaagaaacaccatccacgagttcaagaagagcgccaagaccaccctcatcaagattgatcctgccctgaagatcaagaccaagaaggtgaacacagctgaccagtgtgccaaccgctgcaccaggaacaagggcctgcccttcacctgcaaggcctttgtgtttgacaaggccaggaagcagtgcctgtggttccccttcaacagcatgagcagcggcgtgaagaaggagtttggccacgagtttgacctgtatgagaacaaggactacatccggaactgcatcatcggcaagggccgcagctacaagggcaccgtgtccatcaccaagagcggcatcaagtgccagccctggagctccatgatcccccatgagcacagctaccggggcaaggacctgcaggagaactactgcaggaaccccagaggagaggagggcggcccctggtgcttcaccagcaaccctgaggtgcgctatgaggtgtgtgacatcccccagtgcagcgaggtggagtgcatgacctgcaatggagagagctaccggggcctgatggaccacacagaaagtggcaagatctgccagcgctgggaccaccagaccccccaccgccacaagttcctgcctgagcgctacccagacaagggctttgatgacaactactgcaggaacccagatggccagccccggccctggtgctacaccctggacccccacacccgctgggagtactgtgccatcaagacctgtgagacctag

SEQ ID NO: 3208 - DNA, 2172 bp, synthetic construct
  misc_feature 1..2172: note = source = /note="Description of Artificial Sequence: Synthetic coding sequence"
  source 1..2172: mol_type = other DNA
atgtgggtgaccaagctgctgcctgccctgctgctgcagcacgtgctgctgcacctgctgctgctgcccatcgccatcccctatgcagagggccagaggaagagaagaaacaccatccacgagttcaagaagagcgccaagaccaccctcatcaagattgatcctgccctgaagatcaagaccaagaaggtgaacacagctgaccagtgtgccaaccgctgcaccaggaacaagggcctgcccttcacctgcaaggcctttgtgtttgacaaggccaggaagcagtgcctgtggttccccttcaacagcatgagcagcggcgtgaagaaggagtttggccacgagtttgacctgtatgagaacaaggactacatccggaactgcatcatcggcaagggccgcagctacaagggcaccgtgtccatcaccaagagcggcatcaagtgccagccctggagctccatgatcccccatgagcacagctaccggggcaaggacctgcaggagaactactgcaggaaccccagaggagaggagggcggcccctggtgcttcaccagcaaccctgaggtgcgctatgaggtgtgtgacatcccccagtgcagcgaggtggagtgcatgacctgcaatggagagagctaccggggcctgatggaccacacagaaagtggcaagatctgccagcgctgggaccaccagaccccccaccgccacaagttcctgcctgagcgctacccagacaagggctttgatgacaactactgcaggaacccagatggccagccccggccctggtgctacaccctggacccccacacccgctgggagtactgtgccatcaagacctgtgccgacaacaccatgaatgacacagatgtgcccctggagaccacagagtgcatccagggccagggcgagggctaccggggcaccgtgaacaccatctggaatggcatcccctgccagcgctgggacagccagtacccccatgaacatgacatgaccccagagaacttcaagtgcaaggacctgcgggagaactactgcaggaacccagatggcagcgagagcccctggtgcttcaccacagaccccaacatccgggtgggctactgcagccagatccccaactgtgacatgagccacggccaggactgctacagaggaaatggcaagaactacatgggcaacctgagccagaccaggagcggcctgacctgcagcatgtgggacaagaacatggaggacctgcaccgccacatcttctgggagccagatgccagcaagctgaatgaaaactactgcaggaacccagatgatgatgcccacggcccctggtgctacacaggcaaccccctcatcccctgggactactgccccatcagccgctgtgagggggacaccacccccaccatcgtgaacctggaccaccctgtgatcagctgtgccaagaccaagcagctgcgggtggtgaatggcatccccaccaggaccaacatcggctggatggtgtccctgcgctacagaaacaagcacatctgtggcggcagcctcatcaaggagagctgggtgctgacagcccggcagtgcttccccagccgggacctgaaggactatgaggcctggctgggcatccatgatgtgcacggcagaggagatgagaagtgcaagcaggtgctgaatgtgtcccagctggtgtatggccctgagggcagtgacctggtgctgatgaagctggcccggcctgctgtgctggatgactttgtgtccaccatcgacctgcccaactacggctgcaccatccctgagaagaccagctgcagcgtgtatggctggggctacacaggcctcatcaactatgatggcctgctgcgggtggcccacctgtacatcatgggaaatgagaagtgcagccagcaccaccggggcaaggtgaccctgaatgaaagtgagatctgtgccggggctgagaagattggcagcggcccctgtgagggggactatggaggccccctggtgtgtgagcagcacaagatgaggatggtgctgggcgtcatcgtgcccggccggggctgtgccatccccaaccggcccggcatctttgtgcgggtggcctactatgccaagtggatccacaagatcatcctgacctacaaggtgccccagagctag

SEQ ID NO: 3209 - DNA, 363 bp, synthetic construct
  misc_feature 1..363: note = source = /note="Description of Artificial Sequence: Synthetic coding sequence"
  source 1..363: mol_type = other DNA
atgaatggagaggagaagagctgcagcggctatggaggcccagatgccatggatggcaagctggtgtccagtgatgatgatgacttcatcgtgaagcgggagcacacccgggccagcggcatcaggaaggctgtgctgagcggccctggccagagcgcagaaaatgaaacagaccaggtgaacttccgggagatccccccacgctgctaccccaagcacgccaaggcctgcatctacttcacctacaaggtgcactacagcaacagcagcacagagatccctgagttcctgacagccctggaggtgctgatggccagtgacttcctggacatctacatcttcctgttcttcctgttcttctag

SEQ ID NO: 3210 - DNA, 255 bp, synthetic construct
  misc_feature 1..255: note = source = /note="Description of Artificial Sequence: Synthetic coding sequence"
  source 1..255: mol_type = other DNA
atggccctgagcagccagatctgggccgcctgcctgctgctgctgctgctgctggccagcctgaccagcggctctgtgttcccccagcagacaggccagctggccgagctgcagccccaggacagagctggggcccgggcctcctggatgcccatgttccagaggagaagaagaagagacacccacttccccatctgcatcttctgctgcggctgctgccacaggagcaaatgtggcatgtgctgcaagacctag

SEQ ID NO: 3211 - DNA, 1422 bp, synthetic construct
  misc_feature 1..1422: note = source = /note="Description of Artificial Sequence: Synthetic coding sequence"
  source 1..1422: mol_type = other DNA
atggctgtgatggcccccaggaccctggtgctgctgctgagcggggccctggccctgacccagacctgggccgaggtgcagctggtggagagcggcggcggcctggtgcagcccggcggcagcctgcggctgagctgtgccgccagcggcttcaacatcaaggacacctacatccactgggtgcggcaggcccctgggaagggcctggagtgggtggcccgcatctaccccaccaacggctacaccaggtatgctgacagcgtgaagggccgcttcaccatctctgctgacaccagcaagaacacagcctacctgcagatgaacagcctgcgggcagaggacacagctgtgtactactgcagccgctggggcggagatggcttctacgccatggactactggggccagggcaccctggtgacagtgagcagcgccagcaccaagggccccagcgtcttccccctggcccccagcagcaagagcaccagcggcggcacagctgccctgggctgcctggtgaaggactacttccctgagcctgtgacagtgtcctggaacagcggggccctgaccagcggcgtgcacaccttccctgctgtgctgcagagcagcggcctgtacagcctgagctctgtggtgacagtgcccagcagcagcctgggcacccagacctacatctgcaatgtgaaccacaagcccagcaacaccaaggtggacaagaaggtggagcccaagagctgtgacaagacccacacctgccccccctgcccagcccctgagctgctgggcggccccagcgtcttcctgtttcctcccaagcccaaggacaccctgatgatcagcaggaccccagaggtgacctgtgtggtggtggatgtgtcccatgaggaccctgaggtgaagttcaactggtacgtggatggagtggaggtgcacaatgccaagaccaagccccgggaggagcagtacaacagcacctacagagtggtgtctgtgctgactgtgctgcaccaggactggctgaatggcaaggagtacaagtgcaaggtgagcaacaaggccctgcctgcccccatcgagaagaccatcagcaaggccaagggccagccccgggagccccaggtgtacaccctgccccccagcagagatgagctgaccaagaaccaggtgtccctgacctgcctggtgaagggcttctaccccagcgacattgctgtggagtgggagagcaatggccagcctgagaacaactacaagaccaccccacctgtgctggacagtgatggcagcttcttcctgtacagcaagctgactgtggacaagagccgctggcagcagggcaatgtgttcagctgcagcgtgatgcatgaggccctgcacaaccactacacccagaagagcctgagcctgagccctggatag

SEQ ID NO: 3212 - DNA, 717 bp, synthetic construct
  misc_feature 1..717: note = source = /note="Description of Artificial Sequence: Synthetic coding sequence"
  source 1..717: mol_type = other DNA
atggctgtgatggcccccaggaccctggtgctgctgctgagcggggccctggccctgacccagacctgggccgacatccagatgacccagagccccagcagcctgagcgcctctgtgggggacagagtgaccatcacctgccgggccagccaggatgtgaacacagctgtggcctggtaccagcagaagccaggcaaggcccccaagctgctgatctacagcgccagcttcctgtacagcggcgtgcccagccgcttcagcggcagccgctctggaacagacttcaccctgaccatcagcagcctgcagccagaagattttgccacctactactgccagcagcactacaccaccccacccaccttcggccagggcaccaaggtggagatcaagaggacagtggccgcccccagcgtcttcatcttccccccatctgatgagcagctgaagtctggaacagcctctgtggtgtgcctgctgaacaacttctacccccgggaggccaaggtgcagtggaaggtggacaatgccctgcagagcggcaacagccaggagagcgtgacagagcaggacagcaaggacagcacctacagcctgagcagcaccctgaccctgagcaaggctgactatgagaagcacaaggtgtatgcctgtgaggtgacccaccagggcctgagcagccctgtgaccaagagcttcaacagaggagaatgttag

SEQ ID NO: 3213 - DNA, 657 bp, synthetic construct
  misc_feature 1..657: note = source = /note="Description of Artificial Sequence: Synthetic coding sequence"
  source 1..657: mol_type = other DNA
atggccaccaggagccctggggtggtgatcagtgatgatgagcccggctatgacctggacctcttctgcatccccaaccactatgcagaggacctggagagggtcttcatcccccacggcctcatcatggacagaacagagcggctggccagagatgtgatgaaggagatgggcggccaccacatcgtggccctgtgtgtgctgaagggcggctacaagttctttgctgacctgctggactacatcaaggccctgaacagaaacagcgacaggagcatccccatgacagtggacttcatccggctgaagagctactgcaatgaccagagcactggagacatcaaggtgattggaggagatgacctgagcaccctgaccgggaagaatgtgctgattgtggaggacatcatcgacaccgggaagaccatgcagaccctgctgagcctggtgcggcagtacaaccccaagatggtgaaggtggccagcctgctggtgaagaggacccccaggtctgtgggctacaagccagactttgtgggctttgagatcccagacaagtttgtggtgggctacgccctggactacaatgagtacttccgggacctgaaccacgtgtgtgtgatcagcgagaccgggaaggccaagtacaaggcctag

SEQ ID NO: 3214 - DNA, 657 bp, synthetic construct
  misc_feature 1..657: note = source = /note="Description of Artificial Sequence: Synthetic coding sequence"
  source 1..657: mol_type = other DNA
atggccaccaggagccctggggtggtgatcagtgatgatgagcccggctatgacctggacctcttctgcatccccaaccactatgcagaggacctggagagggtcttcatcccccacggcctcatcatggacagaacagagcggctggccagagatgtgatgaaggagatgggcggccaccacatcgtggccctgtgtgtgctgaagggcggctacaagttctttgctgacctgctggactacatcaaggccctgaacagaaacagcgacaggagcatccccatgacagtggacttcatccggctgaagagctactgcaatgaccagagcactggagacatcaaggtgattggaggagatgacctgagcaccctgaccgggaagagccggctgctggccgaggacatcatcgacaccgggaagaccatgcagaccctgctgagcctggtgcggcagtacaaccccaagatggtgaaggtggccagcctgctggtgaagaggacccccaggtctgtgggctacaagccagactttgtgggctttgagatcccagacaagtttgtggtgggctacgccctggactacaatgagtacttccgggacctgaaccacgtgtgtgtgatcagcgagaccgggaaggccaagtacaaggcctag

SEQ ID NO: 3215 - DNA, 1653 bp, synthetic construct
  misc_feature 1..1653: note = source = /note="Description of Artificial Sequence: Synthetic coding sequence"
  source 1..1653: mol_type = other DNA
atgcccccacccaggacaggccggggcctgctgtggctgggcctggtgctgagctctgtgtgtgtggccctgggcagcgagacccaggccaacagcaccacagatgccctgaatgtgctgctgatcatcgtggatgacctgcggcccagcctgggctgctacggggacaagctggtgcgcagccccaacatcgaccagctggccagccacagcctgctcttccagaatgcctttgcccagcaggccgtgtgtgcccccagccgggtgtccttcctgactggaagaagaccagacaccacccggctgtatgacttcaacagctactggagggtgcatgctggcaacttcagcaccatcccccagtacttcaaggaaaatggctacgtgaccatgtctgtgggcaaggtgttccaccctggcatcagcagcaaccacacagatgacagcccctacagctggagcttccccccctaccaccccagcagcgagaagtatgagaacaccaagacctgccggggcccagatggagagctgcacgccaacctgctgtgccctgtggatgtgctggatgtgcctgagggcaccctgcctgacaagcagagcacagagcaggccatccagctgctggagaagatgaagaccagcgccagccccttcttcctggccgtgggctaccacaagccccacatccccttccgctaccccaaggagttccagaagctgtaccccctggagaacatcaccctggccccagaccctgaggtgcctgatggcctgccccctgtggcctacaacccctggatggacatccggcagcgggaggatgtgcaggccctgaacatctctgtgccctacggccccatccctgtggacttccagaggaagatccggcagagctactttgcctctgtgtcctacctggacacccaggtgggccgcctgctgagcgccctggatgacctgcagctggccaacagcaccatcatcgccttcaccagtgaccacggctgggccctgggggagcacggggagtgggccaagtacagcaactttgatgtggccacccacgtgcccctcatcttctacgtgcccggccgcacagccagcctgcctgaggccggggagaagctgttcccctacctggacccctttgacagcgccagccagctgatggagcccggccggcagagcatggacctggtggagctggtgtccctcttccccaccctggccggcctggccggcctgcaggtgcccccacgctgccctgtgcccagcttccacgtggagctgtgccgggagggcaagaacctgctgaagcacttccgcttccgggacctggaggaggacccctacctgcccggcaacccccgggagctgattgcctacagccagtacccccggcccagcgacatcccccagtggaacagcgacaagcccagcctgaaggacatcaagatcatgggctacagcatccgcaccatcgactaccgctacacagtgtgggtgggcttcaacccagatgagttcctggccaacttcagtgacatccatgctggggagctgtactttgtggacagcgaccccctgcaggaccacaacatgtacaatgacagccagggcggggacctcttccagctgctgatgccctag

SEQ ID NO: 3216 - DNA, 1032 bp, synthetic construct
  misc_feature 1..1032: note = source = /note="Description of Artificial Sequence: Synthetic coding sequence"
  source 1..1032: mol_type = other DNA
atgcccccacccaggacaggccggggcctgctgtggctgggcctggtgctgagctctgtgtgtgtggccctgggcagcgagacccaggccaacagcaccacagatgccctgaatgtgctgctgatcatcgtggatgacctgcggcccagcctgggctgctacggggacaagctggtgcgcagccccaacatcgaccagctggccagccacagcctgctcttccagaatgcctttgcccagcaggccgtgtgtgcccccagccgggtgtccttcctgactggaagaagaccagacaccacccggctgtatgacttcaacagctactggagggtgcatgctggcaacttcagcaccatcccccagtacttcaaggaaaatggctacgtgaccatgtctgtgggcaaggtgttccaccctggcatcagcagcaaccacacagatgacagcccctacagctggagcttccccccctaccaccccagcagcgagaagtatgagaacaccaagacctgccggggcccagatggagagctgcacgccaacctgctgtgccctgtggatgtgctggatgtgcctgagggcaccctgcctgacaagcagagcacagagcaggccatccagctgctggagaagatgaagaccagcgccagccccttcttcctggccgtgggctaccacaagccccacatccccttccgctaccccaaggagttccagaagctgtaccccctggagaacatcaccctggccccagaccctgaggtgcctgatggcctgccccctgtggcctacaacccctggatggacatccggcagcgggaggatgtgcaggccctgaacatctctgtgccctacggccccatccctgtggacttccagaggaagatccggcagagctactttgcctctgtgtcctacctggacacccaggtgggccgcctgctgagcgccctggatgacctgcagctggccaacagcaccatcatcgccttcaccagtgaccacggcttcctgatgaggaccaacacctag

SEQ ID NO: 3217 - DNA, 939 bp, synthetic construct
  misc_feature 1..939: note = source = /note="Description of Artificial Sequence: Synthetic coding sequence"
  source 1..939: mol_type = other DNA
atgcccccacccaggacaggccggggcctgctgtggctgggcctggtgctgagctctgtgtgtgtggccctgggcagcgagacccaggccaacagcaccacagatgccctgaatgtgctgctgatcatcgtggatgacctgcggcccagcctgggctgctacggggacaagctggtgcgcagccccaacatcgaccagctggccagccacagcctgctcttccagaatgcctttgcccagcaggccgtgtgtgcccccagccgggtgtccttcctgactggaagaagaccagacaccacccggctgtatgacttcaacagctactggagggtgcatgctggcaacttcagcaccatcccccagtacttcaaggaaaatggctacgtgaccatgtctgtgggcaaggtgttccaccctggcatcagcagcaaccacacagatgacagcccctacagctggagcttccccccctaccaccccagcagcgagaagtatgagaacaccaagacctgccggggcccagatggagagctgcacgccaacctgctgtgccctgtggatgtgctggatgtgcctgagggcaccctgcctgacaagcagagcacagagcaggccatccagctgctggagaagatgaagaccagcgccagccccttcttcctggccgtgggctaccacaagccccacatccccttccgctaccccaaggagttccagaagctgtaccccctggagaacatcaccctggccccagaccctgaggtgcctgatggcctgccccctgtggcctacaacccctggatggacatccggcagcgggaggatgtgcaggccctgaacatctctgtgccctacggccccatccctgtggacttccaggaggaccagagcagcacaggcttccggctgaagaccagcagcaccaggaagtacaagtag

SEQ ID NO: 3218 - DNA, 540 bp, synthetic construct
  misc_feature 1..540: note = source = /note="Description of Artificial Sequence: Synthetic coding sequence"
  source 1..540: mol_type = other DNA
atgcccccacccaggacaggccggggcctgctgtggctgggcctggtgctgagctctgtgtgtgtggccctgggcagcgagacccaggccaacagcaccacagatgccctgaatgtgctgctgatcatcgtggatgacctgcggcccagcctgggctgctacggggacaagctggtgcgcagccccaacatcgaccagctggccagccacagcctgctcttccagaatgcctttgcccagcaggccgtgtgtgcccccagccgggtgtccttcctgactggaagaagaccagacaccacccggctgtatgacttcaacagctactggagggtgcatgctggcaacttcagcaccatcccccagtacttcaaggaaaatggctacgtgaccatgtctgtgggcaaggtgttccaccctggaacagccccctgcccagagagcggcttctcctggtttgtggtgtctgagagcagcatccccatcctgggcatgggcctgagcctgcagagccccctgctggccggccgggtgcccaggtag

SEQ ID NO: 3219 - DNA, 261 bp, synthetic construct
  misc_feature 1..261: note = source = /note="Description of Artificial Sequence: Synthetic coding sequence"
  source 1..261: mol_type = other DNA
atgcccccacccaggacaggccggggcctgctgtggctgggcctggtgctgagctctgtgtgtgtggccctgggcagcgagacccaggccaacagcaccacagatgccctgaatgtgctgctgatcatcgtggatgacctgcggcccagcctgggctgctacggggacaagctggtgcgcagccccaacatcgaccagctggccagccacagcctgctcttccagaatgcctttgcccagcaggccgtgtgtgccccctag

SEQ ID NO: 3220 - DNA, 462 bp, synthetic construct
  misc_feature 1..462: note = source = /note="Description of Artificial Sequence: Synthetic coding sequence"
  source 1..462: mol_type = other DNA
atggacctggtggagctggtgtccctcttccccaccctggccggcctggccggcctgcaggtgcccccacgctgccctgtgcccagcttccacgtggagctgtgccgggagggcaagaacctgctgaagcacttccgcttccgggacctggaggaggacccctacctgcccggcaacccccgggagctgattgcctacagccagtacccccggcccagcgacatcccccagtggaacagcgacaagcccagcctgaaggacatcaagatcatgggctacagcatccgcaccatcgactaccgctacacagtgtgggtgggcttcaacccagatgagttcctggccaacttcagtgacatccacgccggggagctgtactttgtggacagcgaccccctgcaggaccacaacatgtacaatgacagccagggcggggacctcttccagctgctgatgccctag

SEQ ID NO: 3221 - DNA, 1020 bp, synthetic construct
  misc_feature 1..1020: note = source = /note="Description of Artificial Sequence: Synthetic coding sequence"
  source 1..1020: mol_type = other DNA
atgaagaccagcgccagccccttcttcctggccgtgggctaccacaagccccacatccccttccgctaccccaaggagttccagaagctgtaccccctggagaacatcaccctggccccagaccctgaggtgcctgatggcctgccccctgtggcctacaacccctggatggacatccggcagagagaagatgtgcaggccctgaacatctctgtgccctacggccccatccctgtggacttccagaggaagatccggcagagctactttgcctctgtgtcctacctggacacccaggtgggccgcctgctgagcgccctggatgacctgcagctggccaacagcaccatcatcgccttcaccagtgaccacggctgggccctgggggagcacggggagtgggccaagtacagcaactttgatgtggccacccacgtgcccctcatcttctacgtgcccggccgcacagccagcctgcctgaggccggggagaagctgttcccctacctggacccctttgattctgccagccagctgatggagcccggccggcagagcatggacctggtggagctggtgtccctcttccccaccctggccggcctggccggcctgcaggtgcccccacgctgccctgtgcccagcttccacgtggagctgtgccgggagggcaagaacctgctgaagcacttccgcttccgggacctggaggaggacccctacctgcccggcaacccccgggagctgattgcctacagccagtacccccggcccagcgacatcccccagtggaacagcgacaagcccagcctgaaggacatcaagatcatgggctacagcatccgcaccatcgactaccgctacacagtgtgggtgggcttcaacccagatgagttcctggccaacttcagtgacatccacgccggggagctgtactttgtggacagcgaccccctgcaggaccacaacatgtacaatgacagccagggcggggacctcttccagctgctgatgccctag

SEQ ID NO: 3222 - DNA, 1962 bp, synthetic construct
  misc_feature 1..1962: note = source = /note="Description of Artificial Sequence: Synthetic coding sequence"
  source 1..1962: mol_type = other DNA
atgaggcccctgcggccccgggccgccctgctggccctgctggccagcctgctggccgcccctcctgtggccccagctgaggccccccacctggtgcacgtggatgctgcccgggccctgtggcccctgcggcgcttctggaggagcacaggcttctgcccccccctgccccacagccaggccgaccagtatgtgctgtcctgggaccagcagctgaacctggcctacgtgggcgctgtgccccaccggggcatcaagcaggtgaggacccactggctgctggagctggtgaccacccggggcagcacaggccggggcctgagctacaacttcacccacctggatggctacctggacctgctgcgggagaaccagctgctgcccggctttgagctgatgggcagcgccagcggccacttcacagactttgaggacaagcagcaggtgtttgagtggaaggacctggtgagcagcctggcccggcgctacatcggccgctatggcctggcccacgtgtccaagtggaactttgagacctggaatgaaccagaccaccacgactttgacaacgtgtccatgaccatgcagggcttcctgaactactatgatgcctgcagcgagggcctgcgggccgccagccctgccctgcggctgggcggccctggggacagcttccacaccccacccaggagccccctgtcctggggcctgctgcggcactgccatgatggcaccaacttcttcaccggggaggccggcgtgcggctggactacatcagcctgcacaggaagggggcccggagcagcatcagcatcctggagcaggagaaggtggtggcccagcagatccggcagctgttccccaagtttgctgacacccccatctacaatgatgaggccgaccccctggtgggctggagcctgccccagccctggagggcagatgtgacctatgctgccatggtggtgaaggtgattgcccagcaccagaacctgctgctggccaacaccaccagcgccttcccctatgccctgctgagcaatgacaatgccttcctgagctaccacccccacccctttgcccagaggaccctgacagcccgcttccaggtgaacaacacccggcccccccacgtgcagctgctgaggaagcctgtgctgacagccatgggcctgctggccctgctggatgaggagcagctgtgggccgaggtgtcccaggccggcaccgtgctggacagcaaccacacagtgggcgtgctggccagcgcccaccggccccagggccctgcagatgcctggagggctgctgtgctgatctatgccagtgatgacacccgggcccaccccaacagatctgtggccgtgaccctgcggctgcggggcgtgcccccaggccctggcctggtgtatgtgacccgctacctggacaatggcctgtgcagcccagatggagagtggaggcggctgggccggcctgtgttccccacagctgagcagttccggaggatgagagctgctgaggaccctgtggccgccgccccccggcccctgcctgctgggggccgcctgaccctgcggcctgccctgcggctgcccagcctgctgctggtgcacgtgtgtgcccggcctgagaagcccccaggccaggtgacccggctgcgggccctgcccctgacccagggccagctggtgctggtgtggagcgatgagcacgtgggcagcaagtgcctgtggacctatgagatccagttcagccaggacggcaaggcctacacccctgtgtccaggaagcccagcaccttcaacctgtttgtgttctccccagacacaggagctgtgtctggcagctacagagtgcgggccctggactactgggcccggcccggccccttcagtgaccctgtgccctacctggaggtgcctgtgccccggggcccccccagccctggcaacccctag

SEQ ID NO: 3223 - DNA, 2028 bp, synthetic construct
  misc_feature 1..2028: note = source = /note="Description of Artificial Sequence: Synthetic coding sequence"
  source 1..2028: mol_type = other DNA
atgaggcccctgcggccccgggccgccctgctggccctgctggccagcctgctggccgcccctcctgtggccccagctgaggccccccacctggtgcacgtggatgctgcccgggccctgtggcccctgcggcgcttctggaggagcacaggcttctggggcagcacaggccggggcctgagctacaacttcacccacctggatggctacctggacctgctgcgggagaaccagctgctgcccggctttgagctgatgggcagcgccagcggccacttcacagactttgaggacaagcagcaggtgtttgagtggaaggacctggtgagcagcctggcccggcgctacatcggccgctatggcctggcccacgtgtccaagtggaactttgagacctggaatgaaccagaccaccacgactttgacaacgtgtccatgaccatgcagggcttcctgaactactatgatgcctgcagcgagggcctgcgggccgccagccctgccctgcggctgggcggccctggggacagcttccacaccccacccaggagccccctgtcctggggcctgctgcggcactgccatgatggcaccaacttcttcaccggggaggccggcgtgcggctggactacatcagcctgcacaggaaggtgcggcctgccccacccagcgcccctgtgttctgtgccctgagccgctgtgcccctggccgggctgaccctggaggagctgaggccgcccccccagctggctgtgcccagctgcacctgcaccctggagctggggagggcagaagagctgctgaccctgctgccctgccccaggtgcggggccacccccacctgcagaggcggggcggccctgctgggggcctggtgcctgccacagctgtggagggcggccgggacctgcggggccatggaggagagggcggccctgcccagaggcctgcccggcccccagccaccttcctgccccggcgggaccggcgggctgtggccgcccctcctggccccagctgccccggccacccccaggtgattgcccagcaccagaacctgctgctggccaacaccaccagcgccttcccctatgccctgctgagcaatgacaatgccttcctgagctaccacccccacccctttgcccagaggaccctgacagcccgcttccaggtgaacaacacccggcccccccacgtgcagctgctgaggaagcctgtgctgacagccatgggcctgctggccctgctggatgaggagcagctgtgggccgaggtgtcccaggccggcaccgtgctggacagcaaccacacagtgggcgtgctggccagcgcccaccggccccagggccctgcagatgcctggagggctgctgtgctgatctatgccagtgatgacacccgggcccaccccaacagatctgtggccgtgaccctgcggctgcggggcgtgcccccaggccctggcctggtgtatgtgacccgctacctggacaatggcctgtgcagcccagatggagagtggaggcggctgggccggcctgtgttccccacagctgagcagttccggaggatgagagctgctgaggaccctgtggccgccgccccccggcccctgcctgctgggggccgcctgaccctgcggcctgccctgcggctgcccagcctgctgctggtgcacgtgtgtgcccggcctgagaagcccccaggccaggtgacccggctgcgggccctgcccctgacccagggccagctggtgctggtgtggagcgatgagcacgtgggcagcaagtgcctgtggacctatgagatccagttcagccaggacggcaaggcctacacccctgtgtccaggaagcccagcaccttcaacctgtttgtgttctccccagacacaggagctgtgtctggcagctacagagtgcgggccctggactactgggcccggcccggccccttcagtgaccctgtgccctacctggaggtgcctgtgccccggggcccccccagccctggcaacccctag

SEQ ID NO: 3224 - DNA, 603 bp, synthetic construct
  misc_feature 1..603: note = source = /note="Description of Artificial Sequence: Synthetic coding sequence"
  source 1..603: mol_type = other DNA
atggccctgtggatgaggctgctgcccctgctggccctgctggccctgtggggccctgaccctgctgctgcctttgtgaaccagcacctgtgtggcagccacctggtggaggccctgtacctggtgtgtggggagcggggcttcttctacacccccaagacccggcgggaggccgaggacctgcaggccagcgccctgagcctgagcagcagcaccagcacctggccagagggcctggatgccacagcccgggcccccccagccctggtggtgacagccaacatcggccaggccggcggcagcagcagccggcagttccggcagagggccctgggcaccagtgacagccctgtgctcttcatccactgccctggagctgctggaacagcccagggcctggagtaccggggccggcgggtgaccacagagctggtgtgggaggaggtggacagcagcccccagccccagggcagcgagagcctgcctgcccagcccccagcccagcctgccccccagcctgagccccagcaggcccgggagcccagccctgaggtgtcctgctgcggcctgtggccccggcggccccagaggagccagaactag

SEQ ID NO: 3225 - DNA, 333 bp, synthetic construct
  misc_feature 1..333: note = source = /note="Description of Artificial Sequence: Synthetic coding sequence"
  source 1..333: mol_type = other DNA
atggccctgtggatgaggctgctgcccctgctggccctgctggccctgtggggccctgaccctgctgctgcctttgtgaaccagcacctgtgtggcagccacctggtggaggccctgtacctggtgtgtggggagcggggcttcttctacacccccaagacccggcgggaggccgaggacctgcaggtgggccaggtggagctgggcggcggccctggggccggcagcctgcagcccctggccctggagggcagcctgcagaagaggggcatcgtggagcagtgctgcaccagcatctgcagcctgtaccagctggagaactactgcaactag

SEQ ID NO: 3226 - DNA, 333 bp, synthetic construct; identical to SEQ ID NO: 3225
  misc_feature 1..333: note = source = /note="Description of Artificial Sequence: Synthetic coding sequence"
  source 1..333: mol_type = other DNA

SEQ ID NO: 3227 - DNA, 333 bp, synthetic construct; identical to SEQ ID NO: 3225
  misc_feature 1..333: note = source = /note="Description of Artificial Sequence: Synthetic coding sequence"
  source 1..333: mol_type = other DNA

SEQ ID NO: 3228 - DNA, 297 bp, synthetic construct
  misc_feature 1..297: note = source = /note="Description of Artificial Sequence: Synthetic coding sequence"
  source 1..297: mol_type = other DNA
atggccctgtggatgaggctgctgcccctgctggccctgctggccctgtggggccctgaccctgctgctgcctttgtgaaccagcacctgtgtggcagccacctggtggaggccctgtacctggtgtgtggggagcggggcttcttctacacccccaagacccggcgggaggccgaggacctgcagggcagcctgcagcccctggccctggagggcagcctgcagaagaggggcatcgtggagcagtgctgcaccagcatctgcagcctgtaccagctggagaactactgcaactag

SEQ ID NO: 3229 - DNA, 333 bp, synthetic construct
  misc_feature 1..333: note = source = /note="Description of Artificial Sequence: Synthetic coding sequence"
  source 1..333: mol_type = other DNA
atggccctgtggatgaggctgctgcccctgctggccctgctggccctgtggggccctgaccctgctgctgcctttgtgaaccagcacctgtgtggcagccacctggtggaggccctgtacctggtgtgtggggagcggggcttcttctacacagacaagacccggcgggaggccgaggacctgcaggtgggccaggtggagctgggcggcggccctggggccggcagcctgcagcccctggccctggagggcagcctgcagaagaggggcatcgtggagcagtgctgcaccagcatctgcagcctgtaccagctggagaactactgcaactag

SEQ ID NO: 3230 - DNA, 333 bp, synthetic construct
  misc_feature 1..333: note = source = /note="Description of Artificial Sequence: Synthetic coding sequence"
  source 1..333: mol_type = other DNA
atggccctgtggatgaggctgctgcccctgctggccctgctggccctgtggggccctgaccctgctgctgcctttgtgaaccagcacctgtgtggcagccacctggtggaggccctgtacctggtgtgtggggagcggggcttcttctacacccccaagacccggcgggaggccgaggacctgcaggtgggccaggtggagctgggcggcggccctggggccggcagcctgcagcccctggccctggagggcagcctgcagaagaggggcatcgtggagcagtgctgcaccagcatctgcagcctgtaccagctggagaactactgcggctag

SEQ ID NO: 3231 - DNA, 333 bp, synthetic construct
  misc_feature 1..333: note = source = /note="Description of Artificial Sequence: Synthetic coding sequence"
  source 1..333: mol_type = other DNA
atggccctgtggatgaggctgctgcccctgctggccctgctggccctgtggggccctgaccctgctgctgcctttgtgaagcagcacctgtgtggcagccacctggtggaggccctgtacctggtgtgtggggagcggggcttcttctacaccccagagacccggcgggaggccgaggacctgcaggtgggccaggtggagctgggcggcggccctggggccggcagcctgcagcccctggccctggagggcagcctgcagaagaggggcatcgtggagcagtgctgcaccagcatctgcagcctgtaccagctggagaactactgcaactag

SEQ ID NO: 3232 - DNA, 333 bp, synthetic construct
  misc_feature 1..333: note = source = /note="Description of Artificial Sequence: Synthetic coding sequence"
  source 1..333: mol_type = other DNA
atggccctgtggatgaggctgctgcccctgctggccctgctggccctgtggggccctgaccctgctgctgcctttgtgaaccagcacctgtgtggcagccacctggtggaggccctgtacctggtgtgtggggagcggggcttcttctacaccaagcccacccggcgggaggccgaggacctgcaggtgggccaggtggagctgggcggcggccctggggccggcagcctgcagcccctggccctggagggcagcctgcagaagaggggcatcgtggagcagtgctgcaccagcatctgcagcctgtaccagctggagaactactgcaactag

SEQ ID NO: 3233 - DNA, 570 bp, synthetic construct
  misc_feature 1..570: note = source = /note="Description of Artificial Sequence: Synthetic coding sequence"
  source 1..570: mol_type = other DNA
atggccctgtccttcagcctgctgatggctgtgctggtgctgagctacaagagcatctgcagcctgggctgtgacctgccccagacccacagcctgggcaacagaagagccctgatcctgctgggccagatgggccgcatcagccccttcagctgcctgaaggacagacatgacttccgcatcccccaggaggagtttgatggcaaccagttccagaaggcccaggccatctctgtgctgcacgagatgatccagcagaccttcaacctcttcagcacagaggacagcagcgctgcctgggagcagagcctgctggagaagttcagcacagagctgtaccagcagctgaatgacctggaggcctgcgtcatccaggaggtgggcgtggaggagacccccctgatgaatgaagattccatcctggccgtgaggaagtacttccagaggatcaccctgtacctgattgaaaggaagtacagcccctgtgcctgggaggtggtgcgggcagagatcatgaggagcctgtccttcagcaccaacctgcagaagaggctgcggaggaaggactag

SEQ ID NO: 3234 - DNA, 573 bp, synthetic construct
  misc_feature 1..573: note = source = /note="Description of Artificial Sequence: Synthetic coding sequence"
  source 1..573: mol_type = other DNA
atgatggccagcccctttgccctgctgatggccctggtggtgctgagctgcaagagcagctgcagcctgggctgtgacctgcctgagacccacagcctggacaacagaaggaccctgatgctgctggcccagatgagccgcatcagccccagcagctgcctgatggacagacatgactttggcttcccccaggaggagtttgatggcaaccagttccagaaggccccagccatctctgtgctgcacgagctgatccagcagatcttcaacctcttcaccaccaaggacagcagcgctgcctgggatgaggacctgctggacaagttctgcacagagctgtaccagcagctgaatgacctggaggcctgtgtgatgcaggaggagcgggtgggggagacccccctgatgaatgctgacagcatcctggccgtgaagaagtacttccgccgcatcaccctgtacctgacagagaagaagtacagcccctgtgcctgggaggtggtgcgggcagagatcatgaggagcctgagcctgagcaccaacctgcaggagcggctgcggaggaaggagtag

SEQ ID NO: 3235 - DNA, 570 bp, synthetic construct
  misc_feature 1..570: note = source = /note="Description of Artificial Sequence: Synthetic coding sequence"
  source 1..570: mol_type = other DNA
atggccctgccctttgccctgatgatggccctggtggtgctgagctgcaagagcagctgcagcctgggctgcaacctgagccagacccacagcctgaacaacagaaggaccctgatgctgatggcccagatgaggcgcatcagccccttcagctgcctgaaggacagacatgactttgagttcccccaggaggagtttgatggcaaccagttccagaaggcccaggccatctctgtgctgcacgagatgatgcagcagaccttcaacctcttcagcaccaagaacagcagcgctgcctgggatgagaccctgctggagaagttctacatcgagctgttccagcagatgaatgacctggaggcctgcgtcatccaggaggtgggcgtggaggagacccccctgatgaatgaagattccatcctggccgtgaagaagtacttccagaggatcaccctgtacctgatggagaagaagtacagcccctgtgcctgggaggtggtgcgggcagagatcatgaggagcctgtccttcagcaccaacctgcagaagaggctgcggaggaaggactag

SEQ ID NO: 3236 - DNA, 570 bp, synthetic construct
  misc_feature 1..570: note = source = /note="Description of Artificial Sequence: Synthetic coding sequence"
  source 1..570: mol_type = other DNA
atggccctgtccttcagcctgctgatggctgtgctggtgctgagctacaagagcatctgcagcctgggctgtgacctgccccagacccacagcctgggcaacagaagagccctgatcctgctggcccagatgggccgcatcagccacttcagctgcctgaaggacagatatgactttggcttcccccaggaggtgtttgatggcaaccagttccagaaggcccaggccatcagcgccttccacgagatgatccagcagaccttcaacctcttcagcaccaaggacagcagcgctgcctgggatgagaccctgctggacaagttctacatcgagctgttccagcagctgaatgacctggaggcctgtgtgacccaggaggtgggcgtggaggagatcgccctgatgaatgaagattccatcctggccgtgaggaagtacttccagaggatcaccctgtacctgatgggcaagaagtacagcccctgtgcctgggaggtggtgcgggcagagatcatgaggagcttctccttcagcaccaacctgcagaagggcctgcggaggaaggactag

SEQ ID NO: 3237 - DNA, 570 bp, synthetic construct
  misc_feature 1..570: note = source = /note="Description of Artificial Sequence: Synthetic coding sequence"
  source 1..570: mol_type = other DNA
atggccctgtccttcagcctgctgatggctgtgctggtgctgagctacaagagcatctgcagcctgggctgtgacctgccccagacccacagcctgggcaacagaagagccctgatcctgctggcccagatgggccgcatcagccccttcagctgcctgaaggacagacatgactttggcctgccccaggaggagtttgatggcaaccagttccagaagacccaggccatctctgtgctgcacgagatgatccagcagaccttcaacctcttcagcacagaggacagcagcgctgcctgggagcagagcctgctggagaagttcagcacagagctgtaccagcagctgaacaacctggaggcctgcgtcatccaggaggtgggcatggaggagacccccctgatgaatgaagattccatcctggccgtgaggaagtacttccagaggatcaccctgtacctgacagagaagaagtacagcccctgtgcctgggaggtggtgcgggcagagatcatgaggagcctgtccttcagcaccaacctgcagaagatcctgcggaggaaggactag

SEQ ID NO: 3238 - DNA, 567 bp, synthetic construct
  misc_feature 1..567: note = source = /note="Description of Artificial Sequence: Synthetic coding sequence"
  source 1..567: mol_type = other DNA
atggccctgacctttgccctgctggtggccctgctggtgctgagctgcaagagcagctgcagcgtgggctgtgacctgccccagacccacagcctgggcagcaggaggaccctgatgctgctggcccagatgaggcgcatcagcctcttcagctgcctgaaggacagacatgactttggcttcccccaggaggagtttggaaaccagttccagaaggccgagaccatccctgtgctgcacgagatgatccagcagatcttcaacctcttcagcaccaaggacagcagcgctgcctgggatgagaccctgctggacaagttctacacagagctgtaccagcagctgaatgacctggaggcctgtgtgatccagggcgtgggcgtgacagagacccccctgatgaaggaggacagcatcctggccgtgaggaagtacttccagaggatcaccctgtacctgaaggagaagaagtacagcccctgtgcctgggaggtggtgcgggcagagatcatgaggagcttcagcctgagcaccaacctgcaggagagcctgcggagcaaggagtag

SEQ ID NO: 3239 - DNA, 570 bp, synthetic construct
  misc_feature 1..570: note = source = /note="Description of Artificial Sequence: Synthetic coding sequence"
  source 1..570: mol_type = other DNA
atggccctgtccttcagcctgctgatggctgtgctggtgctgagctacaagagcatctgcagcctgggctgtgacctgccccagacccacagcctgggcaacagaagagccctgatcctgctggcccagatgggccgcatcagccccttcagctgcctgaaggacagacatgactttggcttcccccaggaggagtttgatggcaaccagttccagaaggcccaggccatctctgtgctgcacgagatgatccagcagaccttcaacctcttcagcaccaaggacagcagcgccacctgggagcagagcctgctggagaagttcagcacagagctgaaccagcagctgaatgacctggaggcctgcgtcatccaggaggtgggcgtggaggagacccccctgatgaatgtggacagcatcctggccgtgaagaagtacttccagaggatcaccctgtacctgacagagaagaagtacagcccctgtgcctgggaggtggtgcgggcagagatcatgaggagcttcagcctgagcaagatcttccaggagcggctgcggaggaaggagtag

SEQ ID NO: 3240 - DNA, 570 bp, synthetic construct
  misc_feature 1..570: note = source = /note="Description of Artificial Sequence: Synthetic coding sequence"
  source 1..570: mol_type = other DNA
atggccctgtccttcagcctgctgatggctgtgctggtgctgagctacaagagcatctgcagcctgggctgtgacctgccccagacccacagcctgggcaacagaagagccctgatcctgctggcccagatgggccgcatcagccacttcagctgcctgaaggacagacatgactttggcttccctgaggaggagtttgatggccaccagttccagaaggcccaggccatctctgtgctgcacgagatgatccagcagaccttcaacctcttcagcacagaggacagcagcgctgcctgggagcagagcctgctggagaagttcagcacagagctgtaccagcagctgaatgacctggaggcctgcgtcatccaggaggtgggcgtggaggagacccccctgatgaatgaagattccatcctggccgtgaggaagtacttccagaggatcaccctgtacctgacagagaagaagtacagcccctgtgcctgggaggtggtgcgggcagagatcatgaggagcctgtccttcagcaccaacctgcagaagaggctgcggaggaaggactag

SEQ ID NO: 3241 - DNA, 570 bp, synthetic construct
  misc_feature 1..570: note = source = /note="Description of Artificial Sequence: Synthetic coding sequence"
  source 1..570: mol_type = other DNA
atggccctgccctttgtgctgctgatggccctggtggtgctgaactgcaagagcatctgcagcctgggctgtgacctgccccagacccacagcctgagcaacagaaggaccctgatgatcatggcccagatgggccgcatcagccccttcagctgcctgaaggacagacatgactttggcttcccccaggaggagtttgatggcaaccagttccagaaggcccaggccatctctgtgctgcacgagatgatccagcagaccttcaacctcttcagcaccaaggacagcagcgccacctgggatgagaccctgctggacaagttctacacagagctgtaccagcagctgaatgacctggaggcctgcatgatgcaggaggtgggcgtggaggacacccccctgatgaatgtggacagcatcctgactgtgaggaagtacttccagaggatcaccctgtacctgacagagaagaagtacagcccctgtgcctgggaggtggtgcgggcagagatcatgaggagcttcagcctgagcgccaacctgcaggagcggctgcggaggaaggagtag

SEQ ID NO: 3242 - DNA, 570 bp, synthetic construct
  misc_feature 1..570: note = source = /note="Description of Artificial Sequence: Synthetic coding sequence"
  source 1..570: mol_type = other DNA
atggccctgccctttgccctgctgatggccctggtggtgctgagctgcaagagcagctgcagcctggactgtgacctgccccagacccacagcctgggccacaggaggaccatgatgctgctggcccagatgaggcgcatcagcctcttcagctgcctgaaggacagacatgacttccgcttcccccaggaggagtttgatggcaaccagttccagaaggccgaggccatctctgtgctgcatgaagtcatccagcagaccttcaacctcttcagcaccaaggacagctctgtggcctgggatgagcggctgctggacaagctgtacacagagctgtaccagcagctgaatgacctggaggcctgtgtgatgcaggaggtgtgggtgggcggcacccccctgatgaatgaagattccatcctggccgtgaggaagtacttccagaggatcaccctgtacctgacagagaagaagtacagcccctgtgcctgggaggtggtgcgggcagagatcatgaggagcttcagcagcagcaggaacctgcaggagcggctgcggaggaaggagtag

SEQ ID NO: 3243 - DNA, 570 bp, synthetic construct
  misc_feature 1..570: note = source = /note="Description of Artificial Sequence: Synthetic coding sequence"
  source 1..570: mol_type = other DNA
atggcccggagcttcagcctgctgatggtggtgctggtgctgagctacaagagcatctgcagcctgggctgtgacctgccccagacccacagcctgaggaacagaagagccctgatcctgctggcccagatgggccgcatcagccccttcagctgcctgaaggacagacatgagttccgcttccctgaggaggagtttgatggccaccagttccagaagacccaggccatctctgtgctgcacgagatgatccagcagaccttcaacctcttcagcacagaggacagcagcgctgcctgggagcagagcctgctggagaagttcagcacagagctgtaccagcagctgaatgacctggaggcctgcgtcatccaggaggtgggcgtggaggagacccccctgatgaatgaagacttcatcctggccgtgaggaagtacttccagaggatcaccctgtacctgatggagaagaagtacagcccctgtgcctgggaggtggtgcgggcagagatcatgaggagcttctccttcagcaccaacctgaagaagggcctgcggaggaaggactag

SEQ ID NO: 3244 - DNA, 570 bp, synthetic construct
  misc_feature 1..570: note = source = /note="Description of Artificial Sequence: Synthetic coding sequence"
  source 1..570: mol_type = other DNA
atggccctgaccttctacctgctggtggccctggtggtgctgagctacaagagcttcagcagcctgggctgtgacctgccccagacccacagcctgggcaacagaagagccctgatcctgctggcccagatgaggcgcatcagccccttcagctgcctgaaggacagacatgactttgagttcccccaggaggagtttgatgacaagcagttccagaaggcccaggccatctctgtgctgcacgagatgatccagcagaccttcaacctcttcagcaccaaggacagcagcgctgccctggatgagaccctgctggatgagttctacatcgagctggaccagcagctgaatgacctggagagctgtgtgatgcaggaggtgggcgtcatcgagagccccctgatgtatgaagattccatcctggccgtgaggaagtacttccagaggatcaccctgtacctgacagagaagaagtacagcagctgtgcctgggaggtggtgcgggcagagatcatgaggagcttcagcctgagcatcaacctgcagaagaggctgaagagcaaggagtag

SEQ ID NO: 3245 - DNA, 564 bp, synthetic construct
  misc_feature 1..564: note = source = /note="Description of Artificial Sequence: Synthetic coding sequence"
  source 1..564: mol_type = other DNA
atgaccaacaagtgcctgctgcagatcgccctgctgctgtgcttcagcaccacagccctgtccatgagctacaacctgctgggcttcctgcagaggagcagcaacttccagtgccagaagctgctgtggcagctgaatggccgcctggagtactgcctgaaggacaggatgaactttgacatccctgaggagatcaagcagctgcagcagttccagaaggaggatgctgccctgaccatctatgagatgctgcagaacatctttgccatcttccggcaggacagcagcagcacaggctggaatgagaccatcgtggagaacctgctggccaacgtgtaccaccagatcaaccacctgaagacagtgctggaggagaagctggagaaggaggacttcacccggggcaagctgatgagcagcctgcacctgaagcgctactacggccgcatcctgcactacctgaaggccaaggagtacagccactgtgcctggaccatcgtgcgggtggagatcctgaggaacttctacttcatcaaccggctgaccggctacctgaggaactag

SEQ ID NO: 3246 - DNA, 537 bp, synthetic construct
  misc_feature 1..537: note = source = /note="Description of Artificial Sequence: Synthetic coding sequence"
  source 1..537: mol_type = other DNA
atgcacagcagcgccctgctgtgctgcctggtgctgctgactggagtgcgggccagccctggccagggcacccagagcgagaacagctgcacccacttccctggcaacctgcccaacatgctgcgggacctgagagatgccttcagccgggtgaagaccttcttccagatgaaggaccagctggacaacctgctgctgaaggagagcctgctggaggacttcaagggctacctgggctgccaggccctgtctgagatgatccagttctacctggaggaggtgatgccccaggccgagaaccaggaccctgacatcaaggcccacgtgaacagcctgggggagaacctgaagaccctgcggctgcggctgcggcgctgccaccgcttcctgccctgtgagaacaagagcaaggctgtggagcaggtgaagaatgccttcaacaagctgcaggagaagggcatctacaaggccatgtctgaatttgacatcttcatcaactacatcgaggcctacatgaccatgaagatcagaaattag

SEQ ID NO: 3247 - DNA, 489 bp, synthetic construct
  misc_feature 1..489: note = source = /note="Description of Artificial Sequence: Synthetic coding sequence"
  source 1..489: mol_type = other DNA
atgaggagcagccctggcaacatggagagaattgtcatctgcctgatggtgatcttcctgggcaccctggtgcacaagagcagcagccagggccaggacagacacatgatccgcatgaggcagctgattgatattgtggaccagctgaagaactacgtgaatgacctggtgcctgagttcctgcctgccccagaagatgtggagaccaactgtgagtggagcgccttcagctgcttccagaaggcccagctgaagagcgccaacacaggcaacaatgaaagaatcatcaacgtgtccatcaagaagctgaagaggaagccacccagcaccaatgccggccggcggcagaagcaccggctgacctgccccagctgtgacagctatgagaagaagccacccaaggagttcctggagcgcttcaagagcctgctgcagaagatgatccaccagcacctgagcagcaggacccacggcagcgaggacagctag

SEQ ID NO: 3248 - DNA, 534 bp, synthetic construct
  misc_feature 1..534: note = source = /note="Description of Artificial Sequence: Synthetic coding sequence"
  source 1..534: mol_type = other DNA
atgtttcatgtgtccttccgctacatcttcggcctgcccccactcatcctggtgctgctgcctgtggccagcagtgactgtgacatcgagggcaaggatggcaagcagtatgaatctgtgctgatggtgtccattgaccagctgctggacagcatgaaggagatcggcagcaactgcctgaacaatgagttcaacttcttcaagaggcacatctgtgatgccaacaaggagggcatgttcctgttccgggccgccaggaagctgcggcagttcctgaagatgaacagcactggagactttgacctgcacctgctgaaggtgtctgagggcaccaccatcctgctgaactgcaccggccaggtgaagggcaggaagccagctgccctgggggaggcccagcccaccaagagcctggaggagaacaagagcctgaaggagcagaagaagctgaatgacctgtgcttcctgaagaggctgctgcaggagatcaagacctgctggaacaagatcctgatgggcaccaaggagcactag

SEQ ID NO: 3249 - DNA, 216 bp, synthetic construct
  misc_feature 1..216: note = source = /note="Description of Artificial Sequence: Synthetic coding sequence"
  source 1..216: mol_type = other DNA
atgtttcatgtgtccttccgctacatcttcggcctgcccccactcatcctggtgctgctgcctgtggccagcagtgactgtgacatcgagggcaaggatggcaagcagtatgaatctgtgctgatggtgtccattgaccagctgctgaaccagccctacaagaagaaggagaagaggacagagaggaagcagcagagcgccatgagcaacaactag

SEQ ID NO: 3250 - DNA, 393 bp, synthetic construct
  misc_feature 1..393: note = source = /note="Description of Artificial Sequence: Synthetic coding sequence"
  source 1..393: mol_type = other DNA
gtgtccttccgctacatcttcggcctgcccccactcatcctggtgctgctgcctgtggccagcagtgactgtgacatcgagggcaaggatggcaagcagtatgagagcgtgctgatggtgtccattgaccagctgctggacagcatgaaggagatcggcagcaactgcctgaacaatgagttcaacttcttcaagaggcacatctgtgatgccaacaaggtgaagggcaggaagccagctgccctgggggaggcccagcccaccaagagcctggaggagaacaagagcctgaaggagcagaagaagctgaatgacctgtgcttcctgaagaggctgctgcaggagatcaagacctgctggaacaagatcctgatgggcaccaaggagcactag

SEQ ID NO: 3251 - DNA, 216 bp, synthetic construct; identical to SEQ ID NO: 3249
  misc_feature 1..216: note = source = /note="Description of Artificial Sequence: Synthetic coding sequence"
  source 1..216: mol_type = other DNA

SEQ ID NO: 3252 - DNA, 114 bp, synthetic construct
  misc_feature 1..114: note = source = /note="Description of Artificial Sequence: Synthetic coding sequence"
  source 1..114: mol_type = other DNA
atgtttcatgtgtccttccgctacatcttcggcctgcccccactcatcctggtgctgctgcctgtggccagcagtgactgtgacatcgagggccagcatgaaagaaactggtag

SEQ ID NO: 3253 - DNA, 402 bp, synthetic construct
  misc_feature 1..402: note = source = /note="Description of Artificial Sequence: Synthetic coding sequence"
  source 1..402: mol_type = other DNA
atgtttcatgtgtccttccgctacatcttcggcctgcccccactcatcctggtgctgctgcctgtggccagcagtgactgtgacatcgagggcaaggatggcaagcagtatgaatctgtgctgatggtgtccattgaccagctgctggacagcatgaaggagatcggcagcaactgcctgaacaatgagttcaacttcttcaagaggcacatctgtgatgccaacaaggtgaagggcaggaagccagctgccctgggggaggcccagcccaccaagagcctggaggagaacaagagcctgaaggagcagaagaagctgaatgacctgtgcttcctgaagaggctgctgcaggagatcaagacctgctggaacaagatcctgatgggcaccaaggagcactag

SEQ ID NO: 3254 - DNA, 114 bp, synthetic construct; identical to SEQ ID NO: 3252
  misc_feature 1..114: note = source = /note="Description of Artificial Sequence: Synthetic coding sequence"
  source 1..114: mol_type = other DNA

SEQ ID NO: 3255 - DNA, 195 bp, synthetic construct
  misc_feature 1..195: note = source = /note="Description of Artificial Sequence: Synthetic coding sequence"
  source 1..195: mol_type = other DNA
atgaaggagatcggcagcaactgcctgaacaatgagttcaacttcttcaagaggcacatctgtgatgccaacaaggaggagaacaagagcctgaaggagcagaagaagctgaatgacctgtgcttcctgaagaggctgctgcaggagatcaagacctgctggaacaagatcctgatgggcaccaaggagcactag

SEQ ID NO: 3256 - DNA, 2643 bp, synthetic construct
  misc_feature 1..2643: note = source = /note="Description of Artificial Sequence: Synthetic coding sequence"
  source 1..2643: mol_type = other DNA
atggccgagctgtacagagtgctggaggccggcaagattggcatctttgagagccccaccggcaccgggaagagcctgagcctcatctgtggggccctgtcctggctgcgggactttgagcagaagaagcgggaggaggaggcccggctgctggagactggaacaggccccctgcatgatgagaaggatgagagcctgtgcctgagcagcagctgtgagggcgccgccggcacccccaggcctgctggggagcccgcctgggtgacccagtttgtgcagaagaaggaggagcgggacctggtggaccggctgaaggccgagcaggcccggaggaagcagcgggaggagcggctgcagcagctgcagcaccgggtgcagctgaagtatgctgccaagaggctgcggcaggaggaggaggagcgggagaacctgctgcggctgagccgggagatgctggagaccggccctgaggccgagcggctggagcagctggagagcggggaggaggagctggtgctggccgagtatgaaagtgatgaggagaagaaggtggccagccgggtggatgaagatgaagatgacctggaggaggagcacatcaccaagatctactactgcagcaggacccacagccagctggcccagtttgtgcatgaggtgaagaagagcccctttgggaaggatgtgcggctggtgtccctgggcagccggcagaacctgtgtgtgaatgaagatgtgaagagcctgggctctgtgcagctgatcaatgacagatgtgtggacatgcagaggagcagacatgagaagaagaagggagctgaggaggagaagcccaagagaagacggcaggagaagcaggccgcctgccccttctacaaccacgagcagatgggcctgctgagagatgaggccctggccgaggtgaaggacatggagcagctgctggccctgggcaaggaggcccgggcctgcccctactacggcagccggctggccatcccagctgcccagctggtggtgctgccctaccagatgctgctgcatgctgccacccggcaggccgccggcatccggctgcaggaccaggtggtgatcattgatgaggcccacaacctgattgacaccatcaccggcatgcacagcgtggaggtgtctggcagccagctgtgccaggcccacagccagctgctgcagtatgtggagagatatggcaagaggctgaaggccaagaacctgatgtacctgaagcagatcctgtacctgctggagaagtttgtggccgtgctgggcggcaacatcaagcagaaccccaacacccagagcctgagccagacaggaacagagctgaagaccatcaatgacttcctgttccagagccagattgacaacatcaacctcttcaaggtgcagcgctactgtgagaagtccatgatcagcaggaagctgtttggcttcacagaaagatatggagctgtgttcagcagccgggagcagcccaagctggccggcttccagcagttcctgcagagcctgcagcccaggaccacagaggccctggccgccccagcagatgagagccaggccagcaccctgcggcctgccagccccctgatgcacatccagggcttcctggccgccctgaccacagccaaccaggacggccgggtcatcctgagccggcagggcagcctgagccagagcaccctgaagttcctgctgctgaacccagctgtgcactttgcccaggtggtgaaggagtgcagagctgtggtgattgctgggggcaccatgcagcctgtgtctgacttccggcagcagctgctggcctgtgccggcgtggaggccgagcgggtggtggagttcagctgtggccacgtgatccccccagacaacatcctgcccctggtgatctgcagcggcatcagcaaccagcccctggagttcaccttccagaagcgggagctgccccagatgatggatgaggtgggccgcatcctgtgcaacctgtgtggggtggtgcctgggggcgtggtgtgcttcttccccagctatgagtacctgcggcaggtgcacgcccactgggagaagggcggcctgctgggccgcctggccgccaggaagaagatcttccaggagcccaagagcgcccaccaggtggagcaggtgctgctggcctacagccgctgcatccaggcctgtggccaggagcggggccaggtgactggagccctgctgctgtctgtggtgggcggcaagatgtctgagggcatcaacttcagtgacaacctgggccgctgtgtggtgatggtgggcatgcccttccccaacatccgctctgctgagctgcaggagaagatggcctacctggaccagaccctgccccgggcccctggccaggcccctcctgggaaggccctggtggagaacctgtgcatgaaggctgtgaaccagagcatcggccgggccatccgccaccagaaggactttgcctctgtggtgctgctggaccagagatatgcccggccccctgtgctggccaagctgcctgcctggatccgggcccgggtggaggtgaaggccaccttcggccctgccatcgctgctgtgcagaagttccaccgggagaagagcgccagcagctag

SEQ ID NO: 3257 - DNA, 738 bp, synthetic construct
  misc_feature 1..738: note = source = /note="Description of Artificial Sequence: Synthetic coding sequence"
  source 1..738: mol_type = other DNA
atgaagaagacccagacctggatcctgacctgcatctacctgcagctgctgctcttcaaccccctggtgaagacagagggcatctgcaggaacagagtgaccaacaacgtgaaggatgtgaccaagctggtggccaacctgcccaaggactacatgatcaccctgaagtatgtgcccggcatggatgtgctgcccagccactgctggatcagcgagatggtggtgcagctgagtgacagcctgacagacctgctggacaagttcagcaacatcagcgagggcctgagcaactacagcatcatcgacaagctggtgaacatcgtggatgacctggtggagtgtgtgaaggagaacagcagcaaggacctgaagaagagcttcaagagccctgagcccaggctcttcaccccagaggagttcttccgcatcttcaacagaagcattgatgccttcaaggactttgtggtggccagcgagaccagtgactgtgtggtgagcagcaccctgagccctgagaagggcaaggccaagaaccccccaggggacagcagcctgcactgggccgccatggccctgcctgccctcttcagcctcatcatcggctttgccttcggggccctgtactggaagaagaggcagcccagcctgaccagggctgtggagaacatccagatcaatgaggaggacaatgagatctccatgctgcaggagaaggagcgggagttccaggaggtgtag

SEQ ID NO: 3258 - DNA, 93 bp, synthetic construct
  misc_feature 1..93: note = source = /note="Description of Artificial Sequence: Synthetic coding sequence"
  source 1..93: mol_type = other DNA
ggcatggatgtgctgggccggcccaagatccccctggagaccccagcctacacaggccagccctggcactgccagcactgcttcctgctgtag

SEQ ID NO: 3259 - DNA, 3039 bp, synthetic construct
  misc_feature 1..3039: note = source = /note="Description of Artificial Sequence: Synthetic coding sequence"
  source 1..3039: mol_type = other DNA
atgcctgccagcgccccaccccggcggccccggcccccaccacccagcctgagcctgctgctggtgctgctgggcctgggcggccgccgcctgcgggcagagcctggagatggagcccagacctgggcccgcttcagccggcccccagcccctgaggccgccggcctcttccagggcaccttcccagatggcttcctgtgggccgtgggcagcgctgcctaccagacagagggcggctggcagcagcacggcaaaggagccagcatctgggacaccttcacccaccaccccctggcccctcctggggacagcagaaatgccagcctgcccctgggcgcccccagccccctgcagcctgccactggagatgtggccagtgacagctacaacaacgtgttccgggacacagaggccctgcgggagctgggcgtgacccactaccgcttcagcatctcctgggcccgggtgctgcccaatggatctgctggggtgcccaaccgggagggcctgcgctactaccgccgcctgctggagcggctgcgggagctgggcgtgcagcctgtggtgaccctgtaccactgggacctgccccagaggctgcaggatgcctacggcggctgggccaacagagccctggccgaccacttccgggactatgcagagctgtgcttccgccactttggaggccaggtgaagtactggatcaccatcgacaacccctacgtggtggcctggcacggctacgccaccggccgcctggcccctggcatccggggcagcccccggctgggctacctggtggcccacaacctgctgctggcccacgccaaggtgtggcacctgtacaacaccagcttccggcccacccagggcggccaggtgtccatcgccctgagcagccactggatcaaccccaggaggatgacagaccacagcatcaaggagtgccagaagagcctggactttgtgctgggctggtttgccaagcctgtgttcattgatggagactacccagagagcatgaagaacaacctgagcagcatcctgcctgacttcacagaaagtgagaagaagttcatcaagggcacagctgacttctttgccctgtgcttcggccccaccctgtccttccagctgctggacccccacatgaagttccggcagctggagagccccaacctgcggcagctgctgtcctggattgacctggagttcaaccacccccagatcttcatcgtggagaatggctggtttgtgtctggcaccaccaagagagatgatgccaagtacatgtactacctgaagaagttcatcatggagaccctgaaggccatcaagctggatggagtggatgtgattggctacacagcctggagcctgatggatggctttgagtggcaccggggctacagcatcagaagaggcctcttctacgtggacttcctgagccaggacaagatgctgctgcccaagagcagcgccctcttctaccagaagctgattgagaagaatggcttcccccccctgcctgagaaccagcccctggagggcaccttcccctgtgactttgcctggggcgtggtggacaactacatccaggtggacaccaccctgagccagttcacagacctgaatgtgtacctgtgggatgtgcaccacagcaagaggctcatcaaggtggatggagtggtgaccaagaagaggaagagctactgtgtggactttgctgccatccagccccagatcgccctgctgcaggagatgcacgtgacccacttccgcttcagcctggactgggccctgatcctgcccctgggcaaccagagccaggtgaaccacaccatcctgcagtactaccgctgcatggccagcgagctggtgcgggtgaacatcacccctgtggtggccctgtggcagcccatggcccccaaccagggcctgccccggctgctggcccggcagggcgcctgggagaacccctacacagccctggcctttgctgaatatgcccggctgtgcttccaggagctgggccaccacgtgaagctgtggatcaccatgaatgagccctacaccaggaacatgacctacagcgctggccacaacctgctgaaggcccacgccctggcctggcacgtgtacaatgagaagttcagacatgcccagaatggcaagatcagcatcgccctgcaggccgactggattgaaccagcctgccccttcagccagaaggacaaggaggtggccgagcgggtgctggagtttgatattggctggctggccgagcccatctttggaagtggggactacccctgggtgatgagggactggctgaaccagaggaacaacttcctgctgccctacttcacagaagatgagaagaagctgatccagggcacctttgacttcctggccctgagccactacaccaccatcctggtggacagcgagaaggaggaccccatcaagtacaatgactacctggaggtgcaggagatgacagacatcacctggctgaacagccccagccaggtggccgtggtgccctggggcctgaggaaggtgctgaactggctgaagttcaagtatggagacctgcccatgtacatcatcagcaatggaattgatgatggcctgcatgctgaagatgaccagctgcgggtgtactacatgcagaactacatcaatgaggccctgaaggcccacatcctggatggcatcaacctgtgtggctactttgcctacagcttcaatgacagaacagcccccaggtttggcctgtaccgctatgctgctgaccagtttgagcccaaggcctccatgaagcactacaggaagatcatcgacagcaatggcttccctggccctgagaccctggagcgcttctgcccagaggagttcaccgtgtgcacagagtgcagcttcttccacaccaggaagagcctgctggccttcatcgccttcctgttctttgccagcatcatcagcctgagcctcatcttctactacagcaagaagggccgccgcagctacaagtag

SEQ ID NO: 3260 - DNA, 729 bp, synthetic construct
  misc_feature 1..729: note = source = /note="Description of Artificial Sequence: Synthetic coding sequence"
  source 1..729: mol_type = other DNA
atgacagaccacagcatcaaggagtgccagaagagcctggactttgtgctgggctggtttgccaagcctgtgttcattgatggagactacccagagagcatgaagaacaacctgagcagcatcctgcctgacttcacagagagcgagaagaagttcatcaagggcacagctgacttctttgccctgtgcttcggccccaccctgtccttccagctgctggacccccacatgaagttccggcagctggagagccccaacctgcggcagctgctgtcctggattgacctggagttcaaccacccccagatcttcatcgtggagaatggctggtttgtgtctggcaccaccaagagagatgatgccaagtacatgtactacctgaagaagttcatcatggagaccctgaaggccatcaagctggatggagtggatgtgattggctacacagcctggagcctgatggatggctttgagtggcaccggggctacagcatccggcggggcctcttctacgtggacttcctgagccaggacaagatgctgctgcccaagagcagcgccctcttctaccagaagctgattgagaagaatggcttcccccccctgcctgagaaccagcccctggagggcaccttcccctgtgactttgcctggggcgtggtggacaactacatccaggtgtcccagctgaccaagcccatcagcagcctgaccaagccctaccactag

SEQ ID NO: 3261 - DNA, 1440 bp, synthetic construct
  misc_feature 1..1440: note = source = /note="Description of Artificial Sequence: Synthetic coding sequence"
  source 1..1440: mol_type = other DNA
atgaggcagcccccaggagagagtgacatggctgtgtctgatgccctgctgcccagcttcagcacctttgccagcggccctgctggccgggagaagaccctgcggcaggccggggcccccaacaaccgctggagggaggagctgagccacatgaagaggctgccccctgtgctgcccggccggccctatgacctggccgccgccaccgtggccacagacctggagagcggcggggccggggccgcctgtggcggcagcaacctggcccccctgccccggcgggagacagaggagttcaatgacctgctggacctggacttcatcctgagcaacagcctgacccaccccccagagagcgtggccgccaccgtgagcagcagcgccagcgccagcagcagcagcagccccagcagcagcggccctgccagcgcccccagcacctgcagcttcacctaccccatccgggctggaaatgaccccggggtggcccctgggggcactggaggcggcctgctgtatggccgggagagcgcccccccacccacagcccccttcaacctggccgacatcaatgatgtgagccccagcggcggctttgtggccgagctgctgcggcctgagctggaccctgtgtacatccccccccagcagccccagcccccaggcggcggcctgatgggcaagtttgtgctgaaggccagcctgagcgcccctggctctgaatatggcagccccagcgtcatctctgtgtccaagggcagcccagatggcagccaccctgtggtggtggccccctacaatggaggcccccccaggacctgccccaagatcaagcaggaggccgtgagcagctgcacccacctgggcgccggcccccccctgagcaatggccacaggcctgctgcccatgacttccccctgggccggcagctgcccagcaggaccacccccaccctgggcctggaggaggtgctgagcagccgggactgccacccagccctgcccctgcccccaggcttccacccccaccctggccccaactaccccagcttcctgcctgaccagatgcagccccaggtgccccccctgcactaccaggagctgatgcctcctggcagctgcatgcctgaggagcccaagcccaagagaggaagaagatcctggcccaggaagaggacagccacccacacctgtgactatgccggctgcggcaagacctacaccaagagcagccacctgaaggcccacctgcggacccacactggagagaagccctaccactgtgactgggatggctgcggctggaagtttgcccggagtgatgagctgaccaggcactacaggaagcacacaggccaccggcccttccagtgccagaagtgtgaccgggccttcagcagaagtgaccacctggccctgcacatgaagaggcacttctag

SEQ ID NO: 3262 - DNA, 699 bp, synthetic construct
  misc_feature 1..699: note = source = /note="Description of Artificial Sequence: Synthetic coding sequence"
  source 1..699: mol_type = other DNA
atggctgtgtctgatgccctgctgcccagcttcagcacctttgccagcggccctgctggccgggagaagaccctgcggcaggccggggcccccaacaaccgctggagggaggagctgagccacatgaagaggctgccccctgtgctgcccggccggccctatgacctggccgccgccaccgtggccacagacctggagagcggcggggccggggccgcctgtggcggcagcaacctggcccccctgccccggcgggagacagaggagttcaatgacctgctggacctggacttcatcctgagcaacagcctgacccaccccccagagagcgtggccgccaccgtgagcagcagcgccagcgccagcagcagcagcagccccagcagcagcggccctgccagcgcccccagcacctgcagcttcacctaccccatccgggctggaaatgaccccggggtggcccctgggggcaccggcggcggcctgctgtatggccgggagagcgcccccccacccacagcccccttcaacctggccgacatcaatgatgtgagccccagcggcggctttgtggccgagctgctgcggcctgagctggaccctgtgtacatccccccccagcagccccagcccccaggcggcggcctgatgggcaagtttgtgctgaaggccagcctgagcgcccctggcagcgagtag

SEQ ID NO: 3263 - DNA, 69 bp, synthetic construct
  misc_feature 1..69: note = source = /note="Description of Artificial Sequence: Synthetic coding sequence"
  source 1..69: mol_type = other DNA
atgaggcagcccccaggagagagtgacatggctgtgtctgatgccctgctgcccagcttcagcacctag

SEQ ID NO: 3264 - DNA, 117 bp, synthetic construct
  misc_feature 1..117: note = source = /note="Description of Artificial Sequence: Synthetic coding sequence"
  source 1..117: mol_type = other DNA
atgaggcagcccccaggagagagtgacatggctgtgtctgatgccctgctgcccagcttcagcacctttgccagcggccctgctggccgggagaagaccctgcggcaggccggctag

SEQ ID NO: 3265 - DNA, 1323 bp, synthetic construct
  misc_feature 1..1323: note = source = /note="Description of Artificial Sequence: Synthetic coding sequence"
  source 1..1323: mol_type = other DNA
atgggccccccaggcagcccctggcagtgggtgaccctgctgctgggcctgctgctgcccccagctgcccccttctggctgctgaatgtgctcttccccccccacaccacccccaaggccgagctgagcaaccacaccaggcctgtgatcctggtgcccggctgcctgggcaaccagctggaggccaagctggacaagccagatgtggtgaactggatgtgctacaggaagacagaggacttcttcaccatctggctggacctgaacatgttcctgcccctgggcgtggactgctggattgacaacaccagggtggtgtacaacagaagcagcggcctggtgtccaatgcccctggggtgcagatccgggtgcccggctttgggaagacctacagcgtggagtacctggacagcagcaagctggccggctacctgcacaccctggtgcagaacctggtgaacaacggctacgtgagagatgagaccgtgcgggccgccccctatgactggaggctggagcccggccagcaggaggagtactacaggaagctggccggcctggtggaggagatgcatgctgcctacggcaagcctgtgttcctgattggccacagcctgggctgcctgcacctgctgtacttcctgctgcggcagccccaggcctggaaggaccgcttcattgatggcttcatcagcctgggcgccccctggggcggcagcatcaagcccatgctggtgctggccagcggggacaaccagggcatccccatcatgagcagcatcaagctgaaggaggagcagaggatcaccaccaccagcccctggatgttccccagcaggatggcctggccagaagatcatgtgttcatcagcacccccagcttcaactacacaggccgggacttccagcgcttctttgctgacctgcactttgaggagggctggtacatgtggctgcagagccgggacctgctggccggcctgcctgcccctggggtggaggtgtactgcctgtatggagtgggcctgcccacccccaggacctacatctatgaccacggcttcccctacacagatcctgtgggcgtgctgtatgaagatggagatgacacagtggccaccaggagcacagagctgtgtggcctgtggcagggccggcagccccagcctgtgcacctgctgcccctgcacggcatccagcacctgaacatggtgttcagcaacctgaccctggagcacatcaatgccatcctgctgggcgcctaccggcagggccccccagccagccccacagccagccctgagcccccacctcctgagtag

SEQ ID NO: 3266 - DNA, 753 bp, synthetic construct
  misc_feature 1..753: note = source = /note="Description of Artificial Sequence: Synthetic coding sequence"
  source 1..753: mol_type = other DNA
atggctgacaacttcagcctgcatgatgccctgagcggcagcggcaaccccaacccccagggctggccaggggcctggggcaaccagcctgctggagctgggggctacccaggggccagctacccaggggcctacccaggccaggcccctcctggggcctacccaggccaggcccctcctggggcctacccaggggcccctggggcctacccaggggccccagcccctggggtgtacccaggcccccccagcggccctggggcctaccccagcagcggccagcccagcgccaccggggcctacccagccaccggcccctatggagccccagctggccccctgattgtgccctacaacctgcccctgcctggaggagtggtgcccaggatgctgatcaccatcctgggcaccgtgaagcccaatgccaacagaattgccctggacttccagagaggaaatgatgtggccttccacttcaacccccgcttcaatgaaaacaacagaagagtgattgtgtgcaacaccaagctggacaacaactggggccgggaggagcggcagagcgtcttcccctttgagagcggcaagcccttcaagatccaggtgctggtggagccagaccacttcaaggtggccgtgaatgatgcccacctgctgcagtacaaccaccgggtgaagaagctgaatgagatcagcaagctgggcatcagcggggacatcgacctgaccagcgccagctacaccatgatctag

SEQ ID NO: 3267 - DNA, 630 bp, synthetic construct
  misc_feature 1..630: note = source = /note="Description of Artificial Sequence: Synthetic coding sequence"
  source 1..630: mol_type = other DNA
atgggctctgtgagcaaccagcagtttgctgggggctgtgccaaggctgctgaggaggcccctgaggaggccccagaagatgctgcccgggcagcagatgagccccagctgctgcatggagctggcatctgcaagtggttcaacgtgaggatgggcttcggcttcctgtccatgacagcccgggccggcgtggccctggacccccctgtggatgtgtttgtgcaccagagcaagctgcacatggagggcttccgcagcctgaaggagggggaggccgtggagttcaccttcaagaagagcgccaagggcctggagagcatccgggtgacaggccctgggggcgtcttctgcatcggcagcgagcggcggcccaagggcaagtccatgcagaagaggaggagcaaaggagaccgctgctacaactgtggcggcctggaccaccacgccaaggagtgcaagctgcccccccagcccaagaagtgccacttctgccagagcatcagccacatggtggccagctgccccctgaaggcccagcagggccccagcgcccagggcaagcccacctacttccgggaggaggaggaggagatccacagccccaccctgctgcctgaggcccagaactag

SEQ ID NO: 3268 - DNA, 630 bp, synthetic construct; identical to SEQ ID NO: 3267
  misc_feature 1..630: note = source = /note="Description of Artificial Sequence: Synthetic coding sequence"
  source 1..630: mol_type = other DNA

SEQ ID NO: 3269 - DNA, 660 bp, synthetic construct
  misc_feature 1..660: note = source = /note="Description of Artificial Sequence: Synthetic coding sequence"
  source 1..660: mol_type = other DNA
atgaagatgaggttcctgggcctggtggtgtgcctggtgctgtggaccctgcacagcgagggcagcggcggcaagctgacagctgtggaccctgagaccaacatgaatgtgtctgagatcatctcctactggggcttccccagcgaggagtacctggtggagacagaagatggctacatcctgtgcctgaaccgcatcccccacggcaggaagaaccacagcgacaagggccccaagcctgtggtgttcctgcagcacggcctgctggccgacagcagcaactgggtgaccaacctggccaacagcagcctgggcttcatcctggctgatgctggctttgatgtgtggatgggcaacagccggggcaacacctggagcaggaagcacaagaccctgtctgtgtcccaggatgagttctgggccttctcctatgatgagatggccaagtatgacctgcctgccagcatcaacttcatcctgaacaagacaggccaggagcaggtgtactacgtgggccacagccagggcaccaccatcggcttcatcgccttcagccagatccctgagctggccaagaggatcaagatgttctttgccctgggccctgtggcctctgtggccttctgcaccagccccatggccaagctgggccgcctgtag

SEQ ID NO: 3270 - DNA, 1200 bp, synthetic construct
  misc_feature 1..1200: note = source = /note="Description of Artificial Sequence: Synthetic coding sequence"
  source 1..1200: mol_type = other DNA
atgaagatgaggttcctgggcctggtggtgtgcctggtgctgtggaccctgcacagcgagggcagcggcggcaagctgacagctgtggaccctgagaccaacatgaatgtgtctgagatcatctcctactggggcttccccagcgaggagtacctggtggagacagaagatggctacatcctgtgcctgaaccgcatcccccacggcaggaagaaccacagcgacaagggccccaagcctgtggtgttcctgcagcacggcctgctggccgacagcagcaactgggtgaccaacctggccaacagcagcctgggcttcatcctggctgatgctggctttgatgtgtggatgggcaacagccggggcaacacctggagcaggaagcacaagaccctgtctgtgtcccaggatgagttctgggccttctcctatgatgagatggccaagtatgacctgcctgccagcatcaacttcatcctgaacaagacaggccaggagcaggtgtactacgtgggccacagccagggcaccaccatcggcttcatcgccttcagccagatccctgagctggccaagaggatcaagatgttctttgccctgggccctgtggcctctgtggccttctgcaccagccccatggccaagctgggccgcctgcctgaccacctgatcaaggacctgtttggagacaaggagttcctgccccagagcgccttcctgaagtggctgggcacccacgtgtgcacccacgtgatcctgaaggagctgtgtggcaacctgtgcttcctgctgtgtggcttcaatgaaagaaacctgaacatgagccgggtggatgtgtacaccacccacagccctgctggcacctctgtgcagaacatgctgcactggagccaggccgtgaagttccagaagttccaggcctttgactggggcagcagcgccaagaactacttccactacaaccagagctacccacccacctacaacgtgaaggacatgctggtgcccacagctgtgtggagcggcggccatgactggctggctgatgtgtatgatgtgaacatcctgctgacccagatcaccaacctggtgttccacgagagcatccctgagtgggagcacctggacttcatctggggcctggatgccccctggaggctgtacaacaagatcatcaacctgatgaggaagtaccagtag

SEQ ID NO: 3271 - DNA, 1074 bp, synthetic construct
  misc_feature 1..1074: note = source = /note="Description of Artificial Sequence: Synthetic coding sequence"
  source 1..1074: mol_type = other DNA
atgaagctgcggaccctggccgtgtctgccaccgtggtgaaggatggagtgtctggagtgtgcagcttccgctgcagtgatgtgtctggagtgctgcccagcggccccaagcctgtggtgttcctgcagcacggcctgctggccgacagcagcaactgggtgaccaacctggccaacagcagcctgggcttcatcctggctgatgctggctttgatgtgtggatgggcaacagccggggcaacacctggagcaggaagcacaagaccctgtctgtgtcccaggatgagttctgggccttctcctatgatgagatggccaagtatgacctgcctgccagcatcaacttcatcctgaacaagacaggccaggagcaggtgtactacgtgggccacagccagggcaccaccatcggcttcatcgccttcagccagatccctgagctggccaagaggatcaagatgttctttgccctgggccctgtggcctctgtggccttctgcaccagccccatggccaagctgggccgcctgcctgaccacctgatcaaggacctgtttggagacaaggagttcctgccccagagcgccttcctgaagtggctgggcacccacgtgtgcacccacgtgatcctgaaggagctgtgtggcaacctgtgcttcctgctgtgtggcttcaatgaaagaaacctgaacatgagccgggtggatgtgtacaccacccacagccctgctggcacctctgtgcagaacatgctgcactggagccaggccgtgaagttccagaagttccaggcctttgactggggcagcagcgccaagaactacttccactacaaccagagctacccacccacctacaacgtgaaggacatgctggtgcccacagctgtgtggagcggcggccatgactggctggctgatgtgtatgatgtgaacatcctgctgacccagatcaccaacctggtgttccacgagagcatccctgagtgggagcacctggacttcatctggggcctggatgccccctggaggctgtacaacaagatcatcaacctgatgaggaagtaccagtag

SEQ ID NO: 3272 - DNA, 1200 bp, synthetic construct; identical to SEQ ID NO: 3270
  misc_feature 1..1200: note = source = /note="Description of Artificial Sequence: Synthetic coding sequence"
  source 1..1200: mol_type = other DNA

SEQ ID NO: 3273 - DNA, 1032 bp, synthetic construct
  misc_feature 1..1032: note = source = /note="Description of Artificial Sequence: Synthetic coding sequence"
  source 1..1032: mol_type = other DNA
atggcctgcctggagtttgtgccctttgatgtgcagatgtgcctggagttcctgcccagcggccccaagcctgtggtgttcctgcagcacggcctgctggccgacagcagcaactgggtgaccaacctggccaacagcagcctgggcttcatcctggctgatgctggctttgatgtgtggatgggcaacagccggggcaacacctggagcaggaagcacaagaccctgtctgtgtcccaggatgagttctgggccttctcctatgatgagatggccaagtatgacctgcctgccagcatcaacttcatcctgaacaagacaggccaggagcaggtgtactacgtgggccacagccagggcaccaccatcggcttcatcgccttcagccagatccctgagctggccaagaggatcaagatgttctttgccctgggccctgtggcctctgtggccttctgcaccagccccatggccaagctgggccgcctgcctgaccacctgatcaaggacctgtttggagacaaggagttcctgccccagagcgccttcctgaagtggctgggcacccacgtgtgcacccacgtgatcctgaaggagctgtgtggcaacctgtgcttcctgctgtgtggcttcaatgaaagaaacctgaacatgagccgggtggatgtgtacaccacccacagccctgctggcacctctgtgcagaacatgctgcactggagccaggccgtgaagttccagaagttccaggcctttgactggggcagcagcgccaagaactacttccactacaaccagagctacccacccacctacaacgtgaaggacatgctggtgcccacagctgtgtggagcggcggccatgactggctggctgatgtgtatgatgtgaacatcctgctgacccagatcaccaacctggtgttccacgagagcatccctgagtgggagcacctggacttcatctggggcctggatgccccctggaggctgtacaacaagatcatcaacctgatgaggaagtaccagtag

SEQ ID NO: 3274 - DNA, 1206 bp, synthetic construct
  misc_feature 1..1206: note = source = /note="Description of Artificial Sequence: Synthetic coding sequence"
  source 1..1206: mol_type = other DNA
atggcctgcctggagtttgtgccctttgatgtgcagatgtgcctggagttcctgcccagcggggagtttgtggtgctgctgaccagcggcgtgcagctgcagaccttcaccgtgtctgtgacagacctgaagggcggggccagcggcgtggtgcgcagcagccgctgggtgcggggcttcacagacttccgcagcaaggctgtggacctgtgtggccccaagcctgtggtgttcctgcagcacggcctgctggccgacagcagcaactgggtgaccaacctggccaacagcagcctgggcttcatcctggctgatgctggctttgatgtgtggatgggcaacagccggggcaacacctggagcaggaagcacaagaccctgtctgtgtcccaggatgagttctgggccttccgggtgcccttcctggactacagctatgatgagatggccaagtatgacctgcctgccagcatcaacttcatcctgaacaagacaggccaggagcaggtgtactacgtgggccacagccagggcaccaccatcggcttcatcgccttcagccagatccctgagctggccaagaggatcaagatgttctttgccctgggccctgtggcctctgtggccttctgcaccagccccatggccaagctgggccgcctgcctgaccacctgatcaaggacctgtttggagacaaggagttcctgccccagagcgccttcctgaagtggctgggcacccacgtgtgcacccacgtgatcctgaaggagctgtgtggcaacctgtgcttcctgctgtgtggcttcaatgaaagaaacctgaacatgagccgggtggatgtgtacaccacccacagccctgctggcacctctgtgcagaacatgctgcactggagccaggccgtgaagttccagaagttccaggcctttgactggggcagcagcgccaagaactacttccactacaaccagagctacccacccacctacaacgtgaaggacatgctggtgcccacagctgtgtggagcggcggccatgactggctggctgatgtgtatgatgtgaacatcctgctgacccagatcaccaacctggtgttccacgagagcatccctgagtgggagcacctggacttcatctggggcctggatgccccctggaggctgtacaacaagatcatcaacctgatgaggaagtaccagtag

SEQ ID NO: 3275 - DNA, 873 bp, synthetic construct
  misc_feature 1..873: note = source = /note="Description of Artificial Sequence: Synthetic coding sequence"
  source 1..873: mol_type = other DNA
atgaagatgaggttcctgggcctggtggtgtgcctggtgctgtggaccctgcacagcgagggcagcggcggcaagctgacagctgtggaccctgagaccaacatgaatgtgtctgagatcatctcctactggggcttccccagcgaggagtacctggtggagacagaagatggctacatcctgtgcctgaaccgcatcccccacggcaggaagaaccacagcgacaagggccccaagcctgtggtgttcctgcagcacggcctgctggccgacagcagcaactgggtgaccaacctggccaacagcagcctgggcttcatcctggctgatgctggctttgatgtgtggatgggcaacagccggggcaacacctggagcaggaagcacaagaccctgtctgtgtcccaggatgagttctgggccttctcctatgatgagatggccaagtatgacctgcctgccagcatcaacttcatcctgaacaagacaggccaggagcaggtgtactacgtgggccacagccagggcaccaccatcggcttcatcgccttcagccagatccctgagctggccaagaggatcaagatgttctttgccctgggccctgtggcctctgtggccttctgcaccagccccatggccaagctgggccgcctgcctgaccacctgatcaaggacctgtttggagacaaggagttcctgccccagagcgccttcctgaagtggctgggcacccacgtgtgcacccacgtgatcctgaaggagctgtgtggcaacctgtgcttcctgctgtgtggcttcaatgaaagaaacctgaacatgagccgggtggatgtgtacaccacccacagccctgctggcacctctgtgtag

SEQ ID NO: 3276 - DNA, 1200 bp, synthetic construct; identical to SEQ ID NO: 3270
  misc_feature 1..1200: note = source = /note="Description of Artificial Sequence: Synthetic coding sequence"
  source 1..1200: mol_type = other DNA

SEQ ID NO: 3277 - DNA, 87 bp, synthetic construct
  misc_feature 1..87: note = source = /note="Description of Artificial Sequence: Synthetic coding sequence"
  source 1..87: mol_type = other DNA
ctctgcttcctgctgtgtggcttcaatgaaagaaacctgaacatggctgtgaagttccagaagttccaggcctttgactggggctag

SEQ ID NO: 3278 - DNA, 1200 bp, synthetic construct; identical to SEQ ID NO: 3270
  misc_feature 1..1200: note = source = /note="Description of Artificial Sequence: Synthetic coding sequence"
  source 1..1200: mol_type = other DNA

SEQ ID NO: 3279 - DNA, 411 bp, synthetic construct
  misc_feature 1..411: note = source = /note="Description of Artificial Sequence: Synthetic coding sequence"
  source 1..411: mol_type = other DNA
atgaagatgaggttcctgggcctggtggtgtgcctggtgctgtggaccctgcacagcgagggcagcggcggcaagctgacagctgtggaccctgagaccaacatgaatgtgtctgagatcatctcctactggggcttccccagcgaggagtacctggtggagacagaagatggctacatcctgtgcctgaaccgcatcccccacggcaggaagaaccacagcgacaagggccccaagcctgtggtgttcctgcagcacggcctgctggccgacagcagcaactgggtgaccaacctggccaacagcagcctgggcttcatcctggctgatgctggctttgatgtgtggatgggcaacagccggggcaacacctggagcaggaagcacgtgaccctggagcccggctgctag

SEQ ID NO: 3280 - DNA, 1428 bp, synthetic construct
  misc_feature 1..1428: note = source = /note="Description of Artificial Sequence: Synthetic coding sequence"
  source 1..1428: mol_type = other DNA
atggagagcaaggccctgctggtgctgaccctggccgtgtggctgcagagcctgacagccagcagaggaggagtggccgctgctgaccagaggcgggacttcattgatattgagagcaagtttgccctgcggaccccagaggacacagctgaggacacctgccacctgatccctggggtggccgagagcgtggccacctgccacttcaaccacagcagcaagaccttcatggtgatccacggctggacagtgacaggcatgtatgagagctgggtgcccaagctggtggccgccctgtacaagcgggagccagacagcaatgtgattgtggtggactggctgagccgggcccaggagcactaccctgtgtctgctggctacaccaagctggtgggccaggatgtggcccgcttcatcaactggatggaggaggagttcaactaccccctggacaacgtgcacctgctgggctacagcctgggcgcccacgccgccggcattgctggcagcctgaccaacaagaaggtgaaccgcatcaccggcctggaccctgctggccccaactttgaatatgcagaggcccccagccggctgagcccagatgatgctgactttgtggatgtgctgcacaccttcacccggggcagccctggccgcagcatcggcatccagaagcctgtgggccacgtggacatctacccaaatggaggcaccttccagcccggctgcaacattggagaggccatccgggtgattgctgagcggggcctgggagatgtggaccagctggtgaagtgcagccatgagaggagcatccacctgttcatcgacagcctgctgaatgaggagaaccccagcaaggcctaccgctgcagcagcaaggaggcctttgagaagggcctgtgcctgagctgcaggaagaaccgctgcaacaacctgggctatgagatcaacaaggtgcgggccaagaggagcagcaagatgtacctgaagaccaggagccagatgccctacaaggtgttccactaccaggtgaagatccacttcagcggcacagagagcgagacccacaccaaccaggcctttgagatcagcctgtatggaacagtggccgagagcgagaacatccccttcaccctgcctgaggtgtccaccaacaagacctacagcttcctgatctacacagaggtggacattggagagctgctgatgctgaagctgaagtggaagagtgacagctacttctcctggagcgactggtggagcagccctggctttgccatccagaagatccgggtgaaggccggggagacccagaagaaggtgatcttctgcagccgggagaaggtgagccacctgcagaagggcaaggccccagctgtgtttgtgaagtgccacgacaagagcctgaacaagaagagcggctag

SEQ ID NO: 3281 - DNA, 348 bp, synthetic construct
  misc_feature 1..348: note = source = /note="Description of Artificial Sequence: Synthetic coding sequence"
  source 1..348: mol_type = other DNA
atggtgatccacggctggacagtgacaggcatgtatgagagctgggtgcccaagctggtggccgccctgtacaagcgggagccagacagcaatgtgattgtggtggactggctgagccgggcccaggagcactaccctgtgtctgctggctacaccaagctggtgggccaggatgtggcccgcttcatcaactggatggaggaggagttcaactaccccctggacaacgtgcacctgctgggctacagcctgggcgcccacgccgccggcattgctggcagcctgaccaacaagaaggtgaaccgcatcaccggcctggaccctgctggccccaactttgagtactag

SEQ ID NO: 3282 - DNA, 321 bp, synthetic construct
  misc_feature 1..321: note = source = /note="Description of Artificial Sequence: Synthetic coding sequence"
  source 1..321: mol_type = other DNA
atggagagcaaggccctgctggtgctgaccctggccgtgtggctgcagagcctgacagccagcagaggaggagtggccgctgctgaccagaggcgggacttcattgatattgagagcaagtttgccctgcggaccccagaggacacagctgaggacacctgccacctgatccctggggtggccgagagcgtggccacctgccacttcaaccacagcagcaagaccttcatggtgatccacggctggacagtgacaggcatgtatgagagctgggtgcccaagctggtggccgccctgtacaagcgggagccagacagctag

SEQ ID NO: 3283 - DNA, 393 bp, synthetic construct
  misc_feature 1..393: note = source = /note="Description of Artificial Sequence: Synthetic coding sequence"
  source 1..393: mol_type = other DNA
atggagagcaaggccctgctggtgctgaccctggccgtgtggctgcagagcctgacagccagcagaggaggagtggccgctgctgaccagaggcgggacttcattgatattgagagcaagtttgccctgcggaccccagaggacacagctgaggacacctgccacctgatccctggggtggccgagagcgtggccacctgccacttcaaccacagcagcaagaccttcatggtgatccacggctggacagtgacaggcatgtatgagagctgggtgcccaagctggtggccgccctgtacaagcgggagccagacagcaatgtgattgtggtggactggctgagccgggcccaggagcactaccctgtgtctgctggctacaccaagctgtag

SEQ ID NO: 3284 - DNA, 1386 bp, synthetic construct
  misc_feature 1..1386: note = source = /note="Description of Artificial Sequence: Synthetic coding sequence"
  source 1..1386: mol_type = other DNA
atggagagcaaggccctgctggtgctgaccctggccgctgctgaccagaggcgggacttcattgatattgagagcaagtttgccctgcggaccccagaggacacagctgaggacacctgccacctgatccctggggtggccgagagcgtggccacctgccacttcaaccacagcagcaagaccttcatggtgatccacggctggacagtgacaggcatgtatgagagctgggtgcccaagctggtggccgccctgtacaagcgggagccagacagcaatgtgattgtggtggactggctgagccgggcccaggagcactaccctgtgtctgctggctacaccaagctggtgggccaggatgtggcccgcttcatcaactggatggaggaggagttcaactaccccctggacaacgtgcacctgctgggctacagcctgggcgcccacgccgccggcattgctggcagcctgaccaacaagaaggtgaaccgcatcaccggcctggaccctgctggccccaactttgaatatgcagaggcccccagccggctgagcccagatgatgctgactttgtggatgtgctgcacaccttcacccggggcagccctggccgcagcatcggcatccagaagcctgtgggccacgtggacatctacccaaatggaggcaccttccagcccggctgcaacattggagaggccatccgggtgattgctgagcggggcctgggagatgtggaccagctggtgaagtgcagccatgagaggagcatccacctgttcatcgacagcctgctgaatgaggagaaccccagcaaggcctaccgctgcagcagcaaggaggcctttgagaagggcctgtgcctgagctgcaggaagaaccgctgcaacaacctgggctatgagatcaacaaggtgcgggccaagaggagcagcaagatgtacctgaagaccaggagccagatgccctacaaggtgttccactaccaggtgaagatccacttcagcggcacagagagcgagacccacaccaaccaggcctttgagatcagcctgtatggaacagtggccgagagcgagaacatccccttcaccctgcctgaggtgtccaccaacaagacctacagcttcctgatctacacagaggtggacattggagagctgctgatgctgaagctgaagtggaagagtgacagctacttctcctggagcgactggtggagcagccctggctttgccatccagaagatccgggtgaaggccggggagacccagaagaaggtgatcttctgcagccgggagaaggtgagccacctgcagaagggcaaggccccagctgtgtttgtgaagtgccacgacaagagcctgaacaagaagagcggctag

SEQ ID NO: 3285 - DNA, 828 bp, synthetic construct
  misc_feature 1..828: note = source = /note="Description of Artificial Sequence: Synthetic coding sequence"
  source 1..828: mol_type = other DNA
atggtgatccacggctggacagtgacaggcatgtatgagagctgggtgcccaagctggtggccgccctgtacaagcgggagccagacagcaatgtgattgtggtggactggctgagccgggcccaggagcactaccctgtgtctgctggctacaccaagctggtgggccaggatgtggcccgcttcatcaactggatggaggaggagttcaactaccccctggacaacgtgcacctgctgggctacagcctgggcgcccacgccgccggcattgctggcagcctgaccaacaagaaggtgaaccgcatcaccggcctggaccctgctggccccaactttgaatatgcagaggcccccagccggctgagcccagatgatgctgactttgtggatgtgctgcacaccttcacccggggcagccctggccgcagcatcggcatccagaagcctgtgggccacgtggacatctacccaaatggaggcaccttccagcccggctgcaacattggagaggccatccgggtgattgctgagcggggcctgggagatgtggaccagctggtgaagtgcagccatgagaggagcatccacctgttcatcgacagcctgctgaatgaggagaaccccagcaaggcctaccgctgcagcagcaaggaggcctttgagaagggcctgtgcctgagctgcaggaagaaccgctgcaacaacctgggctatgagatcaacaaggtgcgggccaagaggagcagcaagatgtatgaggacagcttcagtgatgccctgcagagcctgcccctgcccagcaaggacagcttcttctgggactag

SEQ ID NO: 3286 - DNA, 2079 bp, synthetic construct
  misc_feature 1..2079: note = source = /note="Description of Artificial Sequence: Synthetic coding sequence"
  source 1..2079: mol_type = other DNA
atgggcccctggggctggaagctgcgctggacagtggccctgctgctggccgctgctggaacagctgtgggggacagatgtgaaagaaatgagttccagtgccaggacggcaagtgcatctcctacaagtgggtgtgtgatggcagcgctgagtgccaggacggcagtgatgagagccaggagacctgcctgtctgtgacctgcaagagcggggacttcagctgtggcggccgggtgaaccgctgcatcccccagttctggaggtgtgatggccaggtggactgtgacaatggaagtgatgagcagggctgcctgaccctgtgtgagggccccaacaagttcaagtgccacagcggggagtgcatcaccctggacaaggtgtgcaacatggcccgggactgccgggactggagcgatgagcccatcaaggaatgtggcaccaatgaatgtctggacaacaacggcggctgcagccacgtgtgcaatgacctgaagattggctatgaatgtctgtgcccagatggcttccagctggtggcccagaggcgctgtgaagatattgatgagtgccaggaccctgacacctgcagccagctgtgtgtgaacctggagggcggctacaagtgccagtgtgaggagggcttccagctggacccccacaccaaggcctgcaaggctgtgggcagcatcgcctacctgttcttcaccaacagacatgaggtgaggaagatgaccctggacagaagtgagtacaccagcctcatccccaacctgagaaatgtggtggccctggacacagaggtggccagcaaccgcatctactggagcgacctgagccagaggatgatctgcagcacccagctggaccgggcccacggcgtgagcagctatgacaccgtcatcagccgggacatccaggccccagatggcctggccgtggactggatccacagcaacatctactggacagattctgtgctgggcaccgtgtctgtggccgacaccaagggcgtgaagaggaagaccctcttccgggagaatggcagcaagccccgggccatcgtggtggaccctgtgcacggcttcatgtactggacagactggggcaccccagccaagatcaagaagggcggcctgaatggagtggacatctacagcctggtgacagagaacatccagtggcccaacggcatcaccctggacctgctgagcggccgcctgtactgggtggacagcaagctgcacagcatcagcagcattgatgtgaatggaggcaacaggaagaccatcctggaggatgagaagaggctggcccaccccttcagcctggccgtgtttgaggacaaggtgttctggacagacatcatcaatgaggccatcttcagcgccaaccggctgactggaagtgatgtgaacctgctggccgagaacctgctgagccctgaggacatggtgctcttccacaacctgacccagccccggggcgtgaactggtgtgagaggaccaccctgagcaatggaggctgccagtacctgtgcctgcctgccccccagatcaacccccacagccccaagttcacctgtgcctgcccagatggcatgctgctggcccgggacatgaggagctgcctgacagaagctgaggccgctgtggccacccaggagaccagcacagtgcggctgaaggtgagcagcacagctgtgaggacccagcacaccaccaccaggcctgtgcctgacaccagccggctgcccggggccaccccaggcctgaccaccgtggagatcgtgaccatgagccaccaggccctgggagatgtggccggcagaggaaatgagaagaagcccagctctgtgcgggccctgagcatcgtgctgcccatcgtgctgctggtgttcctgtgcctgggcgtcttcctgctgtggaagaactggaggctgaagaacatcaacagcatcaactttgacaaccctgtgtaccagaagaccacagaagatgaggtgcacatctgccacaaccaggacggctacagctaccccagccggcagatggtgtccctggaggatgatgtggcctag

SEQ ID NO: 3287 - DNA, 2460 bp, synthetic construct
  misc_feature 1..2460: note = source = /note="Description of Artificial Sequence: Synthetic coding sequence"
  source 1..2460: mol_type = other DNA
atgggcccctggggctggaagctgcgctggacagtggccctgctgctggccgctgctggaacagctgtgggggacagatgtgaaagaaatgagttccagtgccaggacggcaagtgcatctcctacaagtgggtgtgtgatggcagcgctgagtgccaggacggcagtgatgagagccaggagacctgcagccccaagacctgcagccaggatgagttccgctgccatgatggcaagtgcatcagccggcagtttgtgtgtgacagcgaccgggactgcctggatggcagtgatgaggccagctgccctgtgctgacctgtggccctgccagcttccagtgcaacagcagcacctgcatcccccagctgtgggcctgtgacaatgaccctgactgtgaagatggcagtgatgagtggccccagcgctgccggggcctgtatgtgttccagggcgacagcagcccctgcagcgcctttgagttccactgcctgtctggagagtgcatccacagctcctggaggtgtgatggcggccctgactgcaaggacaagagtgatgaggagaactgtgctgtggccacctgcaggccagatgagttccagtgcagtgatggcaactgcatccacggcagccggcagtgtgaccgggagtatgactgcaaggacatgtctgatgaggtgggctgtgtgaatgtgaccctgtgtgagggccccaacaagttcaagtgccacagcggggagtgcatcaccctggacaaggtgtgcaacatggcccgggactgccgggactggagcgatgagcccatcaaggaatgtggcaccaatgaatgtctggacaacaatggaggctgcagccacgtgtgcaatgacctgaagattggctatgagtgcctgtgcccagatggcttccagctggtggcccagaggcgctgtgaggacattgatgagtgccaggaccctgacacctgcagccagctgtgtgtgaacctggagggcggctacaagtgccagtgtgaggagggcttccagctggacccccacaccaaggcctgcaaggctgtgggcagcatcgcctacctgttcttcaccaacagacatgaggtgaggaagatgaccctggacagaagtgagtacaccagcctcatccccaacctgagaaatgtggtggccctggacacagaggtggccagcaaccgcatctactggagcgacctgagccagaggatgatctgcagcacccagctggaccgggcccatggagtgtcctcctatgacaccgtcatcagccgggacatccaggccccagatggcctggccgtggactggatccacagcaacatctactggacagacagcgtgctgggcaccgtgtctgtggccgacaccaagggcgtgaagaggaagaccctcttcagagaaaatggcagcaagccccgggccatcgtggtggaccctgtgcacggcttcatgtactggacagactggggcaccccagccaagatcaagaagggcggcctgaatggagtggacatctacagcctggtgacagagaacatccagtggcccaacggcatcaccctggacctgctgagcggccgcctgtactgggtggacagcaagctgcacagcatcagcagcattgatgtgaatggaggcaacaggaagaccatcctggaggatgagaagaggctggcccaccccttcagcctggccgtgtttgaggacaaggtgttctggacagacatcatcaatgaggccatcttcagcgccaaccggctgaccggcagtgatgtgaacctgctggccgagaacctgctgagccctgaggacatggtgctcttccacaacctgacccagccccggggcgtgaactggtgtgagaggaccaccctgagcaatggaggctgccagtacctgtgcctgcctgccccccagatcaacccccacagccccaagttcacctgtgcctgcccagatggcatgctgctggcccgggacatgaggagctgcctgacagaggccgaggccgctgtggccacccaggagaccagcacagtgcggctgaaggtgagcagcacagctgtgaggacccagcacaccaccaccaggcctgtgcctgacaccagccggctgcccggggccaccccaggcctgaccaccgtggagatcgtgaccatgagccaccaggccctgggagatgtggccggcagaggaaatgagaagaagcccagctctgtgcgggccctgagcatcgtgctgcccatcgtgctgctggtgttcctgtgcctgggcgtcttcctgctgtggaagaactggaggctgaagaacatcaacagcatcaactttgacaaccctgtgtaccagaagaccacagaagatgaggtgcacatctgccacaaccaggacggctacagctaccccagccggcagatggtgtccctggaggatgatgtggcctag

SEQ ID NO: 3288 - DNA, 2049 bp, synthetic construct
  misc_feature 1..2049: note = source = /note="Description of Artificial Sequence: Synthetic coding sequence"
  source 1..2049: mol_type = other DNA
atgggcccctggggctggaagctgcgctggacagtggccctgctgctggccgctgctggaacagctgtgggggacagatgtgaaagaaatgagttccagtgccaggacggcaagtgcatctcctacaagtgggtgtgtgatggcagcgctgagtgccaggacggcagtgatgagagccaggagacctgcctgtctgtgacctgcaagagcggggacttcagctgtggcggccgggtgaaccgctgcatcccccagttctggaggtgtgatggccaggtggactgtgacaatggaagtgatgagcagggctgccctgtggccacctgcaggccagatgagttccagtgcagtgatggcaactgcatccacggcagccggcagtgtgaccgggagtatgactgcaaggacatgtctgatgaggtgggctgtgtgaatgtgaccctgtgtgagggccccaacaagttcaagtgccacagcggggagtgcatcaccctggacaaggtgtgcaacatggcccgggactgccgggactggagcgatgagcccatcaaggaatgtggcaccaatgaatgtctggacaacaatggaggctgcagccacgtgtgcaatgacctgaagattggctatgagtgcctgtgcccagatggcttccagctggtggcccagaggcgctgtgaggacattgatgagtgccaggaccctgacacctgcagccagctgtgtgtgaacctggagggcggctacaagtgccagtgtgaggagggcttccagctggacccccacaccaaggcctgcaaggctgtgggcagcatcgcctacctgttcttcaccaacagacatgaggtgaggaagatgaccctggacagaagtgagtacaccagcctcatccccaacctgagaaatgtggtggccctggacacagaggtggccagcaaccgcatctactggagcgacctgagccagaggatgatctgcagcacccagctggaccgggcccatggagtgtcctcctatgacaccgtcatcagccgggacatccaggccccagatggcctggccgtggactggatccacagcaacatctactggacagacagcgtgctgggcaccgtgtctgtggccgacaccaagggcgtgaagaggaagaccctcttcagagaaaatggcagcaagccccgggccatcgtggtggaccctgtgcacggcttcatgtactggacagactggggcaccccagccaagatcaagaagggcggcctgaatggagtggacatctacagcctggtgacagagaacatccagtggcccaacggcatcaccctggacctgctgagcggccgcctgtactgggtggacagcaagctgcacagcatcagcagcattgatgtgaatggaggcaacaggaagaccatcctggaggatgagaagaggctggcccaccccttcagcctggccgtgtttgaggacaaggtgttctggacagacatcatcaatgaggccatcttcagcgccaaccggctgaccggcagtgatgtgaacctgctggccgagaacctgctgagccctgaggacatggtgctcttccacaacctgacccagccccgggaggccgaggccgctgtggccacccaggagaccagcacagtgcggctgaaggtgagcagcacagctgtgaggacccagcacaccaccaccaggcctgtgcctgacaccagccggctgcccggggccaccccaggcctgaccaccgtggagatcgtgaccatgagccaccaggccctgggagatgtggccggcagaggaaatgagaagaagcccagctctgtgcgggccctgagcatcgtgctgcccatcgtgctgctggtgttcctgtgcctgggcgtcttcctgctgtggaagaactggaggctgaagaacatcaacagcatcaactttgacaaccctgtgtaccagaagaccacagaagatgaggtgcacatctgccacaaccaggacggctacagctaccccagccggcagatggtgtccctggaggatgatgtggcctag

SEQ ID NO: 3289 - DNA, 2577 bp, synthetic construct
  misc_feature 1..2577: note = source = /note="Description of Artificial Sequence: Synthetic coding sequence"
  source 1..2577: mol_type = other DNA
atgggcccctggggctggaagctgcgctggacagtggccctgctgctggccgctgctggaacagctgtgggggacagatgtgaaagaaatgagttccagtgccaggacggcaagtgcatctcctacaagtgggtgtgtgatggcagcgctgagtgccaggacggcagtgatgagagccaggagacctgcctgtctgtgacctgcaagagcggggacttcagctgtggcggccgggtgaaccgctgcatcccccagttctggaggtgtgatggccaggtggactgtgacaatggaagtgatgagcagggctgcccccccaagacctgcagccaggatgagttccgctgccatgatggcaagtgcatcagccggcagtttgtgtgtgacagcgaccgggactgcctggatggcagtgatgaggccagctgccctgtgctgacctgtggccctgccagcttccagtgcaacagcagcacctgcatcccccagctgtgggcctgtgacaatgaccctgactgtgaagatggcagtgatgagtggccccagcgctgccggggcctgtatgtgttccagggcgacagcagcccctgcagcgcctttgagttccactgcctgagcggggagtgcatccacagctcctggaggtgtgatggcggccctgactgcaaggacaagagtgatgaggagaactgtgctgtggccacctgcaggccagatgagttccagtgcagtgatggcaactgcatccacggcagccggcagtgtgaccgggagtatgactgcaaggacatgtctgatgaggtgggctgtgtgaatgtgaccctgtgtgagggccccaacaagttcaagtgccacagcggggagtgcatcaccctggacaaggtgtgcaacatggcccgggactgccgggactggagcgatgagcccatcaaggaatgtggcaccaatgaatgtctggacaacaacggcggctgcagccacgtgtgcaatgacctgaagattggctatgaatgtctgtgcccagatggcttccagctggtggcccagaggcgctgtgaagatattgatgagtgccaggaccctgacacctgcagccagctgtgtgtgaacctggagggcggctacaagtgccagtgtgaggagggcttccagctggacccccacaccaaggcctgcaaggctgtgggcagcatcgcctacctgttcttcaccaacagacatgaggtgaggaagatgaccctggacagaagtgagtacaccagcctcatccccaacctgagaaatgtggtggccctggacacagaggtggccagcaaccgcatctactggagcgacctgagccagaggatgatctgcagcacccagctggaccgggcccacggcgtgagcagctatgacaccgtcatcagccgggacatccaggccccagatggcctggccgtggactggatccacagcaacatctactggacagattctgtgctgggcaccgtgtctgtggccgacaccaagggcgtgaagaggaagaccctcttccgggagaatggcagcaagccccgggccatcgtggtggaccctgtgcacggcttcatgtactggacagactggggcaccccagccaagatcaagaagggcggcctgaatggagtggacatctacagcctggtgacagagaacatccagtggcccaacggcatcaccctggacctgctgagcggccgcctgtactgggtggacagcaagctgcacagcatcagcagcattgatgtgaatggaggcaacaggaagaccatcctggaggatgagaagaggctggcccaccccttcagcctggccgtgtttgaggacaaggtgttctggacagacatcatcaatgaggccatcttcagcgccaaccggctgactggaagtgatgtgaacctgctggccgagaacctgctgagccctgaggacatggtgctcttccacaacctgacccagccccggggcgtgaactggtgtgagaggaccaccctgagcaatggaggctgccagtacctgtgcctgcctgccccccagatcaacccccacagccccaagttcacctgtgcctgcccagatggcatgctgctggcccgggacatgaggagctgcctgacagaagctgaggccgctgtggccacccaggagaccagcacagtgcggctgaaggtgagcagcacagctgtgaggacccagcacaccaccaccaggcctgtgcctgacaccagccggctgcccggggccaccccaggcctgaccaccgtggagatcgtgaccatgagccaccaggccctgggagatgtggccggcagaggaaatgagaagaagcccagctctgtgcgggccctgagcatcgtgctgcccatcgtgctgctggtgttcctgtgcctgggcgtcttcctgctgtggaagaactggaggctgaagaacatcaacagcatcaactttgacaaccctgtgtaccagaagaccacagaagatgaggtgcacatctgccacaaccaggacggctacagctaccccagcatggtgtccctggaggatgatgtggcctag

SEQ ID NO: 3290 - DNA, 2583 bp, synthetic construct
  misc_feature 1..2583: note = source = /note="Description of Artificial Sequence: Synthetic coding sequence"
  source 1..2583: mol_type = other DNA
atgggcccctggggctggaagctgcgctggacagtggccctgctgctggccgctgctggaacagctgtgggggacagatgtgaaagaaatgagttccagtgccaggacggcaagtgcatctcctacaagtgggtgtgtgatggcagcgctgagtgccaggacggcagtgatgagagccaggagacctgcctgtctgtgacctgcaagagcggggacttcagctgtggcggccgggtgaaccgctgcatcccccagttctggaggtgtgatggccaggtggactgtgacaatggaagtgatgagcagggctgcccccccaagacctgcagccaggatgagttccgctgccatgatggcaagtgcatcagccggcagtttgtgtgtgacagcgaccgggactgcctggatggcagtgatgaggccagctgccctgtgctgacctgtggccctgccagcttccagtgcaacagcagcacctgcatcccccagctgtgggcctgtgacaatgaccctgactgtgaagatggcagtgatgagtggccccagcgctgccggggcctgtatgtgttccagggcgacagcagcccctgcagcgcctttgagttccactgcctgagcggggagtgcatccacagctcctggaggtgtgatggcggccctgactgcaaggacaagagtgatgaggagaactgtgctgtggccacctgcaggccagatgagttccagtgcagtgatggcaactgcatccacggcagccggcagtgtgaccgggagtatgactgcaaggacatgtctgatgaggtgggctgtgtgaatgtgaccctgtgtgagggccccaacaagttcaagtgccacagcggggagtgcatcaccctggacaaggtgtgcaacatggcccgggactgccgggactggagcgatgagcccatcaaggaatgtggcaccaatgaatgtctggacaacaacggcggctgcagccacgtgtgcaatgacctgaagattggctatgaatgtctgtgcccagatggcttccagctggtggcccagaggcgctgtgaagatattgatgagtgccaggaccctgacacctgcagccagctgtgtgtgaacctggagggcggctacaagtgccagtgtgaggagggcttccagctggacccccacaccaaggcctgcaaggctgtgggcagcatcgcctacctgttcttcaccaacagacatgaggtgaggaagatgaccctggacagaagtgagtacaccagcctcatccccaacctgagaaatgtggtggccctggacacagaggtggccagcaaccgcatctactggagcgacctgagccagaggatgatctgcagcacccagctggaccgggcccacggcgtgagcagctatgacaccgtcatcagccgggacatccaggccccagatggcctggccgtggactggatccacagcaacatctactggacagattctgtgctgggcaccgtgtctgtggccgacaccaagggcgtgaagaggaagaccctcttccgggagaatggcagcaagccccgggccatcgtggtggaccctgtgcacggcttcatgtactggacagactggggcaccccagccaagatcaagaagggcggcctgaatggagtggacatctacagcctggtgacagagaacatccagtggcccaacggcatcaccctggacctgctgagcggccgcctgtactgggtggacagcaagctgcacagcatcagcagcattgatgtgaatggaggcaacaggaagaccatcctggaggatgagaagaggctggcccaccccttcagcctggccgtgtttgaggacaaggtgttctggacagacatcatcaatgaggccatcttcagcgccaaccggctgactggaagtgatgtgaacctgctggccgagaacctgctgagccctgaggacatggtgctcttccacaacctgacccagccccggggcgtgaactggtgtgagaggaccaccctgagcaatggaggctgccagtacctgtgcctgcctgccccccagatcaacccccacagccccaagttcacctgtgcctgcccagatggcatgctgctggcccgggacatgaggagctgcctgacagaagctgaggccgctgtggccacccaggagaccagcacagtgcggctgaaggtgagcagcacagctgtgaggacccagcacaccaccaccaggcctgtgcctgacaccagccggctgcccggggccaccccaggcctgaccaccgtggagatcgtgaccatgagccaccaggccctgggagatgtggccggcagaggaaatgagaagaagcccagctctgtgcgggccctgagcatcgtgctgcccatcgtgctgctggtgttcctgtgcctgggcgtcttcctgctgtggaagaactggaggctgaagaacatcaacagcatcaactttgacaaccctgtgtaccagaagaccacagaagatgaggtgcacatctgccacaaccaggacggctacagctaccccagccggcagatggtgtccctggaggatgatgtggcctag

SEQ ID NO: 3291 - DNA, 2220 bp, synthetic construct
  misc_feature 1..2220: note = source = /note="Description of Artificial Sequence: Synthetic coding sequence"
  source 1..2220: mol_type = other DNA
atgggcccctggggctggaagctgcgctggacagtggccctgctgctggccgctgctggaacagctgtgggggacagatgtgaaagaaatgacttccagtgcaacagcagcacctgcatcccccagctgtgggcctgtgacaatgaccctgactgtgaagatggcagtgatgagtggccccagcgctgccggggcctgtatgtgttccagggcgacagcagcccctgcagcgcctttgagttccactgcctgtctggagagtgcatccacagctcctggaggtgtgatggcggccctgactgcaaggacaagagtgatgaggagaactgtgctgtggccacctgcaggccagatgagttccagtgcagtgatggcaactgcatccacggcagccggcagtgtgaccgggagtatgactgcaaggacatgtctgatgaggtgggctgtgtgaatgtgaccctgtgtgagggccccaacaagttcaagtgccacagcggggagtgcatcaccctggacaaggtgtgcaacatggcccgggactgccgggactggagcgatgagcccatcaaggaatgtggcaccaatgaatgtctggacaacaatggaggctgcagccacgtgtgcaatgacctgaagattggctatgagtgcctgtgcccagatggcttccagctggtggcccagaggcgctgtgaggacattgatgagtgccaggaccctgacacctgcagccagctgtgtgtgaacctggagggcggctacaagtgccagtgtgaggagggcttccagctggacccccacaccaaggcctgcaaggctgtgggcagcatcgcctacctgttcttcaccaacagacatgaggtgaggaagatgaccctggacagaagtgagtacaccagcctcatccccaacctgagaaatgtggtggccctggacacagaggtggccagcaaccgcatctactggagcgacctgagccagaggatgatctgcagcacccagctggaccgggcccatggagtgtcctcctatgacaccgtcatcagccgggacatccaggccccagatggcctggccgtggactggatccacagcaacatctactggacagacagcgtgctgggcaccgtgtctgtggccgacaccaagggcgtgaagaggaagaccctcttcagagaaaatggcagcaagccccgggccatcgtggtggaccctgtgcacggcttcatgtactggacagactggggcaccccagccaagatcaagaagggcggcctgaatggagtggacatctacagcctggtgacagagaacatccagtggcccaacggcatcaccctggacctgctgagcggccgcctgtactgggtggacagcaagctgcacagcatcagcagcattgatgtgaatggaggcaacaggaagaccatcctggaggatgagaagaggctggcccaccccttcagcctggccgtgtttgaggacaaggtgttctggacagacatcatcaatgaggccatcttcagcgccaaccggctgaccggcagtgatgtgaacctgctggccgagaacctgctgagccctgaggacatggtgctcttccacaacctgacccagccccggggcgtgaactggtgtgagaggaccaccctgagcaatggaggctgccagtacctgtgcctgcctgccccccagatcaacccccacagccccaagttcacctgtgcctgcccagatggcatgctgctggcccgggacatgaggagctgcctgacagaggccgaggccgctgtggccacccaggagaccagcacagtgcggctgaaggtgagcagcacagctgtgaggacccagcacaccaccaccaggcctgtgcctgacaccagccggctgcccggggccaccccaggcctgaccaccgtggagatcgtgaccatgagccaccaggccctgggagatgtggccggcagaggaaatgagaagaagcccagctctgtgcgggccctgagcatcgtgctgcccatcgtgctgctggtgttcctgtgcctgggcgtcttcctgctgtggaagaactggaggctgaagaacatcaacagcatcaactttgacaaccctgtgtaccagaagaccacagaagatgaggtgcacatctgccacaaccaggacggctacagctaccccagccggcagatggtgtccctggaggatgatgtggcctag

SEQ ID NO: 3292 - DNA, 2838 bp, synthetic construct
  misc_feature 1..2838: note = source = /note="Description of Artificial Sequence: Synthetic coding sequence"
  source 1..2838: mol_type = other DNA
tgaggaagacctggggtgcccccacgcttcctgagccagaggcggcggcaggtgcccggccccaggagccggctgcgggacatccacgagagccccagcgtcatcctgggccccccaggagaggtgcccggcttccgctgtgccctgtggaggcacctgcggccccacctggtgctgggcggggccctggcccccccagcccccatcaagttcacagagggccccccagccaccctgaaggcctctgtgccctatgaggtggagaccctgccccagaacctgcctgccccaccctggagcgctgctgagatcttcagccacgtgggggacagatgtgaaagaaatgagttccagtgccaggacggcaagtgcatctcctacaagtgggtgtgtgatggcagcgctgagtgccaggacggcagtgatgagagccaggagacctgcctgtctgtgacctgcaagagcggggacttcagctgtggcggccgggtgaaccgctgcatcccccagttctggaggtgtgatggccaggtggactgtgacaatggaagtgatgagcagggctgcccccccaagacctgcagccaggatgagttccgctgccatgatggcaagtgcatcagccggcagtttgtgtgtgacagcgaccgggactgcctggatggcagtgatgaggccagctgccctgtgctgacctgtggccctgccagcttccagtgcaacagcagcacctgcatcccccagctgtgggcctgtgacaatgaccctgactgtgaagatggcagtgatgagtggccccagcgctgccggggcctgtatgtgttccagggcgacagcagcccctgcagcgcctttgagttccactgcctgtctggagagtgcatccacagctcctggaggtgtgatggcggccctgactgcaaggacaagagtgatgaggagaactgtgctgtggccacctgcaggccagatgagttccagtgcagtgatggcaactgcatccacggcagccggcagtgtgaccgggagtatgactgcaaggacatgtctgatgaggtgggctgtgtgaatgtgaccctgtgtgagggccccaacaagttcaagtgccacagcggggagtgcatcaccctggacaaggtgtgcaacatggcccgggactgccgggactggagcgatgagcccatcaaggaatgtggcaccaatgaatgtctggacaacaatggaggctgcagccacgtgtgcaatgacctgaagattggctatgagtgcctgtgcccagatggcttccagctggtggcccagaggcgctgtgaggacattgatgagtgccaggaccctgacacctgcagccagctgtgtgtgaacctggagggcggctacaagtgccagtgtgaggagggcttccagctggacccccacaccaaggcctgcaaggctgtgggcagcatcgcctacctgttcttcaccaacagacatgaggtgaggaagatgaccctggacagaagtgagtacaccagcctcatccccaacctgagaaatgtggtggccctggacacagaggtggccagcaaccgcatctactggagcgacctgagccagaggatgatctgcagcacccagctggaccgggcccatggagtgtcctcctatgacaccgtcatcagccgggacatccaggccccagatggcctggccgtggactggatccacagcaacatctactggacagacagcgtgctgggcaccgtgtctgtggccgacaccaagggcgtgaagaggaagaccctcttcagagaaaatggcagcaagccccgggccatcgtggtggaccctgtgcacggcttcatgtactggacagactggggcaccccagccaagatcaagaagggcggcctgaatggagtggacatctacagcctggtgacagagaacatccagtggcccaacggcatcaccctggacctgctgagcggccgcctgtactgggtggacagcaagctgcacagcatcagcagcattgatgtgaatggaggcaacaggaagaccatcctggaggatgagaagaggctggcccaccccttcagcctggccgtgtttgaggacaaggtgttctggacagacatcatcaatgaggccatcttcagcgccaaccggctgaccggcagtgatgtgaacctgctggccgagaacctgctgagccctgaggacatggtgctcttccacaacctgacccagccccggggcgtgaactggtgtgagaggaccaccctgagcaatggaggctgccagtacctgtgcctgcctgccccccagatcaacccccacagccccaagttcacctgtgcctgcccagatggcatgctgctggcccgggacatgaggagctgcctgacagaggccgaggccgctgtggccacccaggagaccagcacagtgcggctgaaggtgagcagcacagctgtgaggacccagcacaccaccaccaggcctgtgcctgacaccagccggctgcccggggccaccccaggcctgaccaccgtggagatcgtgaccatgagccaccaggccctgggagatgtggccggcagaggaaatgagaagaagcccagctctgtgcgggccctgagcatcgtgctgcccatcgtgctgctggtgttcctgtgcctgggcgtcttcctgctgtggaagaactggaggctgaagaacatcaacagcatcaactttgacaaccctgtgtaccagaagaccacagaagatgaggtgcacatctgccacaaccaggacggctacagctaccccagccggcagatggtgtccctggaggatgatgtggcctag

SEQ ID NO: 3293 - DNA, 1770 bp, synthetic construct
  misc_feature 1..1770: note = source = /note="Description of Artificial Sequence: Synthetic coding sequence"
  source 1..1770: mol_type = other DNA
atgagccggcggctgctgcccagggctgagaagagaagaagaaggctggagcagaggcagcagccagatgagcagaggagaagaagtggggccatggtgaagatggctgctgctgggggcggcggcggcggcggccgctactacggcggcggcagcgagggcggccgggcccccaagaggctgaagacagacaatgctggggaccagcacggcggcggcggcggcggcggcggcggggccggggctgctgggggcggcggcggcggggagaactatgatgacccccacaagaccccagccagccctgtggtgcacatccggggcctgattgatggagtggtggaggccgacctggtggaggccctgcaggagtttggccccatctcctatgtggtggtgatgcccaagaagaggcaggccctggtggagtttgaagatgtgctgggcgcctgcaatgctgtgaactatgctgctgacaaccagatctacatcgccggccacccagcctttgtgaactacagcaccagccagaagatcagcaggcctggggacagtgatgacagccgctctgtgaacagcgtgctgctcttcaccatcctgaaccccatctacagcatcaccacagatgtgctgtacaccatctgcaacccctgtggccctgtgcagagaattgtcatcttcaggaagaatggagtgcaggccatggtggagtttgacagcgtgcagagcgcccagagggccaaggccagcctgaatggagctgacatctacagcggctgctgcaccctgaagattgaatatgccaagcccacccggctgaatgtgttcaagaatgaccaggacacctgggactacaccaaccccaacctgagcggccagggcgaccccggcagcaaccccaacaagaggcagaggcagccccccctgctgggggaccacccagcagaatatggaggcccccatggaggctaccacagccactaccatgatgagggctacggccccccaccaccccactatgagggccgcaggatgggcccccctgtgggcggccacagaagaggccccagccgctatggcccccagtatggccaccccccacctcctcctcctcctccagaatatggcccccatgctgacagccctgtgctgatggtgtatggcctggaccagagcaagatgaactgtgacagagtcttcaacgtgttctgcctgtatggaaatgtggagaaggtgaagttcatgaagagcaagccaggagctgccatggtggagatggctgatggctatgctgtggaccgggccatcacccacctgaacaacaacttcatgtttggccagaagctgaatgtgtgtgtgtccaagcagcctgccatcatgcctggccagagctatggcctggaggatggcagctgcagctacaaggacttcagcgagagcaggaacaaccgcttcagcaccccagagcaggccgccaagaaccgcatccagcaccccagcaatgtgctgcacttcttcaatgcccccctggaggtgacagaggagaacttctttgagatctgtgatgagctgggcgtgaagaggcccagctctgtgaaggtgttcagcggcaagtctgagaggagcagcagcggcctgctggagtgggagagcaagagtgatgccctggagaccctgggcttcctgaaccactaccagatgaagaaccccaacggcccctacccctacaccctgaagctgtgcttcagcacagcccagcacgccagctag

SEQ ID NO: 3294 - DNA, 540 bp, synthetic construct
  misc_feature 1..540: note = source = /note="Description of Artificial Sequence: Synthetic coding sequence"
  source 1..540: mol_type = other DNA
atgggccggcccggcctgggcgctgctgtgtctgacctgggggaggccgtgtccctgagccagggcctgctgctgctgctgctgctgtccatgggcggggcctgggccagccgggagcccctgcggccctggtgccaccccatcaatgccatcctggccgtggagaaggagggctgccctgtgtgcatcaccgtgaacaccaccatctgtgccggctactgccccaccatgatgagggtgctgcaggccgtgctgccccccctgccccaggtggtgtgcacctacagagatgtgcgctttgagagcatccggctgcccggctgcccccggggcgtggaccctgtggtgtccttccctgtggccctgagctgccgctgtggcccctgccgccgcagcaccagtgactgtggcggccccaaggaccaccccctgacctgtgaccacccccagcaggccagcagcagcagcaaggaccccccaagaagcctgcccagccccagccggctgctggagccagacacccccatcctgccccagtag

SEQ ID NO: 3295 - DNA, 294 bp, synthetic construct
  misc_feature 1..294: note = source = /note="Description of Artificial Sequence: Synthetic coding sequence"
  source 1..294: mol_type = other DNA
atgcagctgggcaccggcctgctgctggccgctgtgctgagcctgcagctggccgctgctgaggccatctggtgccaccagtgcaccggctttggaggctgcagccacggcagccgctgcctgcgggacagcacccactgtgtgaccacagccaccagggtgctgagcaacacagaggacctgcccctggtgaccaagatgtgccacatcggctgcccagacatccccagcctgggcctgggcccctacgtgtccatcgcctgctgccagaccagcctgtgcaaccacgactag

SEQ ID NO: 3296 - DNA, 2058 bp, synthetic construct
  misc_feature 1..2058: note = source = /note="Description of Artificial Sequence: Synthetic coding sequence"
  source 1..2058: mol_type = other DNA
atgcctgcctacacccacgccagccccatccacaacacccacaagccctatgagtgcaaggaatgtgggaagtacttcagctgtggcagcaacctgatccagcaccagagcatccacactggagagaagccctacaagtgcaaggaatgtgggaaggccttccagctgcacatccagctgaccaggcaccagaagttccacactggagagaagacctttgagtgcaaggaatgtgggaaggccttcaacctgcccacccagctgaacagacacaagaacatccacacagtgaagaagctgtttgagtgcaaggaatgtgggaagagcttcaacagaagcagcaacctgacccagcaccagagcatccacgccggcgtgaagccctaccagtgcaaggaatgtgggaaggccttcaacagaggcagcaacctgatccagcaccagaagatccacagcaatgagaagccctttgtgtgcagagaatgtgagatggccttccgctaccactaccagctgattgagcactgccgcatccacactggagagaagccctttgagtgcaaggaatgtaggaaggccttcaccctgctgaccaagctggtgcgccaccagaagatccacatgggagagaagccctttgagtgcagagaatgtgggaaggccttcagcctgctgaaccagctgaacagacacaagaacatccacactggagagaagccctttgagtgcaaggaatgtgggaagagcttcaacagaagcagcaacctgatccagcaccagagcatccacgcagatgtgaagccctatgagtgcaaggaatgtgggaagggcttcaacagaggagccaacctgatccagcaccagaagatccacagcaatgagaagccctttgtgtgcagagaatgtgagatggccttccgctaccactaccagctgatccagcactgccagatccacactggaggcaagccctttgagtgcaaggaatgtgggaaggccttcagcctgctgacccagctggcccggcacaagaacatccacactggagagaagccctttgagtgcaaggactgtgggaaggccttcaacagaggcagcaacctggtgcagcaccagagcatccacactggagagaagccctatgagtgcaaggaatgtgggaaggccttccggctgcacctgcagctgagccagcacgagaagacccacactggagagaagccctttgagtgcaaggaatgtgggaagttcttcagaagaggcagcaacctgaaccagcacaggagcatccacacaggcaagaagccctttgagtgcaaggaatgtgggaaggccttccggctgcacatgcacctgatccgccaccagaagttccacactggagagaagccctttgagtgcaaggaatgtgggaaggccttcagcctgcacacccagctgaaccaccacaagaacatccacactggagagaagcccttcaagtgcaaggaatgtgggaagagcttcaacagagtgagcaacctggtgcagcaccagagcatccacgccggcgtgaagccctatgagtgcaaggaatgtgggaagggcttcagccgggtgagcaacctgatccagcaccagaagacccacagcagcgccaagccctttgtgtgcaaggaatgtaggaagaccttccgctaccactaccagctgacagagcactaccgcatccacactggagagaagccctttgagtgcaaggaatgtgggaaggccttcggcctgctgacccagctggcccagcaccagatcatccacactggagagaagcccttcaagtgcaaggaatgtgggaaggccttcaacagaggcagcaacctggtgcagccccagagcatccacactggagagaagccctatgagtgcaaggaatgtgggaaggccttccggctgcacctgcagctgagcctgcaccagaagctggtgcaggtgaggaaccccctgaatgtgagaaatgtgggccagcccagcgacatcagcagcaacctgctgaacatcaggaagttcatcctgggctag

SEQ ID NO: 3297 - DNA, 564 bp, synthetic construct
  misc_feature 1..564: note = source = /note="Description of Artificial Sequence: Synthetic coding sequence"
  source 1..564: mol_type = other DNA
tgaagaggaggaggagacagctatggagtgctgctgagcaatgccctggcccggctgcggggcttcaaggaccacttcaccttctgccagcagctgaacatcagcatctgccccctgagccagacagctgcccgcttccaggtgattgtgtacaaccccctgggcaggaaggtgaactggatggtgcggctgcctgtgtctgaaggagtgtttgtggtgaaggaccccaatggaagaacagtgcccagtgatgtggtgatcttccccagcagtgacagccaggcccaccccccagagctgctcttcagcgccagcctgcctgccctgggcttcagcacctacagcgtggcccaggtgccccgctggaagccccaggcccgggccccccagcccatcccccggcgctcctggagccctgccctgaccattgaaaatgagcacatccgggccacctttgatcctgacaccggcctgctgatggagatcatgaacatgaaccagcagctgctgctgcctgtgcggcagaccttcttctggtacaatgccagcatcggggacaactag

SEQ ID NO: 3298 - DNA, 3036 bp, synthetic construct
  misc_feature 1..3036: note = source = /note="Description of Artificial Sequence: Synthetic coding sequence"
  source 1..3036: mol_type = other DNA
atgggcgcctatgcccgggccagcggcgtgtgtgcccggggctgcctggacagcgctggcccctggaccatgagccgggccctgcggccccccctgccccccctgtgcttcttcctgctgctgctggccgctgctggggcccgggccggcggctatgagacctgccccaccgtgcagcccaacatgctgaatgtgcacctgctgccccacacccatgatgatgtgggctggctgaagacagtggaccagtacttctacggcatcaagaatgacatccagcacgccggcgtgcagtacatcctggacagcgtcatcagcgccctgctggccgaccccacccggcgcttcatctacgtggagatcgccttcttcagccgctggtggcaccagcagaccaatgccacccaggaggtggtgcgggacctggtgcggcagggccgcctggagtttgccaacggcggctgggtgatgaatgatgaagctgccacccactatggagccatcgtggaccagatgaccctgggcctgcgcttcctggaggacacctttggaaatgatggccggccccgggtggcctggcacatcgaccccttcggccacagccgggagcaggccagcctgtttgcccagatgggctttgatggcttcttcttcggccgcctggactaccaggacaagtgggtgaggatgcagaagctggagatggagcaggtgtggagggccagcaccagcctgaagcccccaacagctgacctcttcaccggggtgctgcccaacggctacaaccccccaagaaacctgtgctgggatgtgctgtgtgtggaccagcccctggtggaggaccccaggagccctgagtacaatgccaaggagctggtggactacttcctgaatgtggccacagcccagggccgctactaccgcaccaaccacacagtgatgaccatgggcagtgacttccagtatgaaaatgccaacatgtggttcaagaacctggacaagctgatccggctggtgaatgcccagcaggccaagggcagctctgtgcacgtgctgtacagcaccccagcctgctacctgtgggagctgaacaaggccaacctgacctggagcgtgaagcatgatgacttcttcccctatgcagatggcccccaccagttctggacaggctacttcagcagcaggcctgccctgaagagatatgagcggctgagctacaacttcctgcaggtgtgcaaccagctggaggccctggtgggcctggccgccaacgtgggcccctacggcagcggggacagcgcccccctgaatgaggccatggctgtgctgcagcaccatgatgctgtgtctggcaccagccggcagcacgtggccaatgactatgcccggcagctggccgccggctggggcccctgtgaggtgctgctgagcaatgccctggcccggctgcggggcttcaaggaccacttcaccttctgccagcagctgaacatcagcatctgccccctgagccagacagctgcccgcttccaggtgattgtgtacaaccccctgggcaggaaggtgaactggatggtgcggctgcctgtgtctgaaggagtgtttgtggtgaaggaccccaatggaagaacagtgcccagtgatgtggtgatcttccccagcagtgacagccaggcccaccccccagagctgctcttcagcgccagcctgcctgccctgggcttcagcacctacagcgtggcccaggtgccccgctggaagccccaggcccgggccccccagcccatcccccggcgctcctggagccctgccctgaccattgaaaatgagcacatccgggccacctttgatcctgacaccggcctgctgatggagatcatgaacatgaaccagcagctgctgctgcctgtgcggcagaccttcttctggtacaatgccagcatcggggacaatgaaagtgaccaggccagcggggcctacatcttccggcccaaccagcagaagcccctgcctgtgagccgctgggcccagatccacctggtgaagacccccctggtgcaggaggtgcaccagaacttcagcgcctggtgcagccaggtggtgcggctgtacccaggccagaggcacctggagctggagtggagcgtgggccccatccctgtgggggacacctggggcaaggaggtgatcagcagatttgacacccccctggagaccaagggccgcttctacacagacagcaatggccgggagatcctggagcggcggcgggactaccggcccacctggaagctgaaccagacagagcctgtggccggcaactactaccctgtgaacacccgcatctacatcacagatggcaacatgcagctgactgtgctgacagacaggagccagggcggcagcagcctgagagatggcagcctggagctgatggtgcaccggcggctgctgaaggatgatggccggggcgtgtctgagcccctgatggagaatggcagcggggcctgggtgcggggccgccacctggtgctgctggacacagcccaggccgctgctgctggccaccggctgctggccgagcaggaggtgctggccccccaggtggtgctggcccctgggggcggggccgcctacaacctgggcgccccacccaggacccagttcagcggcctgcggcgggacctgcccccatctgtgcacctgctgaccctggcctcctggggccctgagatggtgctgctgcggctggagcaccagtttgctgtgggagaagattctggaagaaacctgagcgcccctgtgaccctgaacctgcgggacctcttcagcaccttcaccatcacccggctgcaggagaccaccctggtggccaaccagctgcgggaggccgccagccggctgaagtggaccaccaacacaggccccaccccccaccagaccccctaccagctggaccctgccaacatcaccctggagcccatggagatccgcaccttcctggcctctgtgcagtggaaggaggtggatggatag

SEQ ID NO: 3299 - DNA, 2853 bp, synthetic construct
  misc_feature 1..2853: note = source = /note="Description of Artificial Sequence: Synthetic coding sequence"
  source 1..2853: mol_type = other DNA
atgctgaatgtgcacctgctgccccacacccatgatgatgtgggctggctgaagacagtggaccagtacttctacggcatcaagaatgacatccagcacgccggcgtgcagtacatcctggacagcgtcatcagcgccctgctggccgaccccacccggcgcttcatctacgtggagatcgccttcttcagccgctggtggcaccagcagaccaatgccacccaggaggtggtgcgggacctggtgcggcagggccgcctggagtttgccaatggaggctgggtgatgaatgatgaggccgccacccactacggggccatcgtggaccagatgaccctgggcctgcgcttcctggaggacacctttggaaatgatggccggccccgggtggcctggcacatcgaccccttcggccacagccgggagcaggccagcctgtttgcccagatgggctttgatggcttcttcttcggccgcctggactaccaggacaagtgggtgaggatgcagaagctggagatggagcaggtgtggagggccagcaccagcctgaagccacccacagctgacctcttcaccggggtgctgcccaacggctacaacccccccaggaacctgtgctgggatgtgctgtgtgtggaccagcccctggtggaggaccccaggagccctgagtacaatgccaaggagctggtggactacttcctgaatgtggccacagcccagggccgctactaccgcaccaaccacacagtgatgaccatgggcagtgacttccagtatgaaaatgccaacatgtggttcaagaacctggacaagctgatccggctggtgaatgcccagcaggccaagggcagctctgtgcacgtgctgtacagcaccccagcctgctacctgtgggagctgaacaaggccaacctgacctggagcgtgaagcatgatgacttcttcccctatgcagatggcccccaccagttctggacaggctacttcagcagcaggcctgccctgaagagatatgaaaggctgagctacaacttcctgcaggtgtgcaaccagctggaggccctggtgggcctggccgccaacgtgggcccctacggcagcggggacagcgcccccctgaatgaggccatggctgtgctgcagcaccatgatgctgtgtctggcaccagccggcagcacgtggccaatgactatgcccggcagctggccgccggctggggcccctgtgaggtgctgctgagcaatgccctggcccggctgcggggcttcaaggaccacttcaccttctgccagcagctgaacatcagcatctgccccctgagccagacagctgcccgcttccaggtgattgtgtacaaccccctgggcaggaaggtgaactggatggtgcggctgcctgtgtctgagggcgtgtttgtggtgaaggaccccaacggccgcacagtgcccagtgatgtggtgatcttccccagcagtgacagccaggcccaccccccagagctgctcttcagcgccagcctgcctgccctgggcttcagcacctacagcgtggcccaggtgccccgctggaagccccaggcccgggccccccagcccatccccaggaggtcctggagccctgccctgaccattgaaaatgagcacatccgggccacctttgatcctgacaccggcctgctgatggagatcatgaacatgaaccagcagctgctgctgcctgtgcggcagaccttcttctggtacaatgccagcattggagacaatgaaagtgaccaggccagcggggcctacatcttccggcccaaccagcagaagcccctgcctgtgagccgctgggcccagatccacctggtgaagacccccctggtgcaggaggtgcaccagaacttcagcgcctggtgcagccaggtggtgcggctgtacccaggccagaggcacctggagctggagtggagcgtgggccccatccctgtgggggacacctggggcaaggaggtgatcagcagatttgacacccccctggagaccaagggccgcttctacacagacagcaatggccgggagatcctggagaggagaagagactaccggcccacctggaagctgaaccagacagagcctgtggccggcaactactaccctgtgaacacccgcatctacatcacagatggcaacatgcagctgactgtgctgacagacaggagccagggcggcagcagcctgagagatggcagcctggagctgatggtgcaccggcggctgctgaaggatgatggccggggcgtgtctgagcccctgatggagaatggaagtggggcctgggtgcggggccgccacctggtgctgctggacacagcccaggccgctgctgctggccaccggctgctggccgagcaggaggtgctggccccccaggtggtgctggcccctgggggcggggccgcctacaacctgggcgccccacccaggacccagttcagcggcctgcggcgggacctgccccccagcgtgcacctgctgaccctggcctcctggggccctgagatggtgctgctgcggctggagcaccagtttgctgtgggggaggacagcggcaggaacctgagcgcccctgtgaccctgaacctgcgggacctcttcagcaccttcaccatcacccggctgcaggagaccaccctggtggccaaccagctgcgggaggccgccagccggctgaagtggaccaccaacacaggccccaccccccaccagaccccctaccagctggaccctgccaacatcaccctggagcccatggagatccgcaccttcctggcctctgtgcagtggaaggaggtggatggatag

SEQ ID NO: 3300 - DNA, 882 bp, synthetic construct
  misc_feature 1..882: note = source = /note="Description of Artificial Sequence: Synthetic coding sequence"
  source 1..882: mol_type = other DNA
atgggcttccctgctgctgccctgctgtgtgccctgtgctgcggcctgctggccccagctgcccgggccggctacagcgaggagcgctgctcctggaggggcagcggcctgacccaggagcccggctctgtgggccagctggccctggcctgtgccgagggcgctgtggagtggctgtacccagctggggccctgcggctgaccctgggcggccctgacccccgggcccggcccggcatcgcctgcctgcggcctgtgcggccctttgctggggcccaggtgtttgctgagagagctggaggagccctggagctgctgctggccgagggccctggccctgctgggggccgctgtgtgcgctggggcccccgggagcggcgggccctcttcctgcaggccaccccccaccaggacatcagcagaagagtggccgccttccgctttgagctgcgggaggatggccggcctgagctgcccccccaggcccacggcctgggcgtggatggagcctgccggccctgcagtgatgctgagctgctgctggccgcctgcaccagtgactttgtgattcatggcatcatccatggagtgacccatgatgtggagctgcaggagagcgtcatcaccgtggtggccgcccgggtgctgcggcagaccccacccctcttccaggccggccgcagcggggaccagggcctgaccagcatccgcacccccctgcgctgtggggtgcaccctggccctggcaccttcctgttcatgggctggagcagatttggagaggcccggctgggctgtgccccccgcttccaggagttccggcgggcctatgaagctgcccgggccgcccacctgcacccctgtgaggtggccctgcactag

SEQ ID NO: 3301 - DNA, 708 bp, synthetic construct
  misc_feature 1..708: note = source = /note="Description of Artificial Sequence: Synthetic coding sequence"
  source 1..708: mol_type = other DNA
atggagcaggatgatcctgtggaggccctgacagagctgcgggagcggcggctgggcgccctggagctgctgcaggccgccgccggcagcggcctggccgcctatgctgtgtgggccctgctgctgcagcccggcttcagaagagtgcccctgcggctgcaggtgccctacgtgggcgccagcgcccggcaggtggagcacgtgctgagcctgctgcggggccggcctgggaagacagtggacctgggcagcggagatggaagaattgtgctggccgcccaccgctgtggcctgcggcctgctgtgggctatgagctgaacccctggctggtggccctggcccggctgcacgcctggagggctggctgtgccggctctgtgtgctacagaaggaaggacctgtggaaggtgtccctgcgggactgcagaaatgtgtctgtgttcctggcccccagcgtgctgcccctgctggaggacaagctgaggacagagctgcctgctggggcccgggtggtgtctggccgcttccccctgcccacctggcagcctgtgacagctgtgggggagggcctggacagagtgtgggcctatgatgtgcctgagggcggccaggccggggaggccgccagcagccgcatccccatccaggccgcccctggccccagcagcgcccccatccctgggggcctcatcagccaggccagctag

SEQ ID NO: 3302 - DNA, 2253 bp, synthetic construct
  misc_feature 1..2253: note = source = /note="Description of Artificial Sequence: Synthetic coding sequence"
  source 1..2253: mol_type = other DNA
atgctgcgggccaagaaccagctgttcctgctgagcccccactacctgcggcaggtgaaggagagcagcggcagccgcctcatccagcagaggctgctgcaccagcagcagcccctgcaccctgagtgggccgccctggccaagaagcagctgaagggcaagaacccagaagatctcatctggcacaccccagagggcatcagcatcaagcccctgtacagcaagagggacaccatggacctgcctgaggagctgcccggggtgaagcccttcacccggggcccctaccccaccatgtacaccttccggccctggaccatccggcagtatgccggcttcagcacagtggaggagagcaacaagttctacaaggacaacatcaaggccggccagcagggcctgtctgtggcctttgacctggccacccaccggggctatgacagcgacaacccccgggtgagaggagatgtgggcatggccggcgtggccatcgacacagtggaggacaccaagatcctgtttgatggcatccccctggagaagatgtctgtgtccatgaccatgaatggagctgtgattcctgtgctggccaacttcatcgtgactggagaggagcagggcgtgcccaaggagaagctgaccggcaccatccagaatgacatcctgaaggagttcatggtgaggaacacctacatcttccccccagagcccagcatgaagatcatcgctgacatctttgagtacacagccaagcacatgcccaagttcaacagcatcagcatcagcggctaccacatgcaggaggccggggctgatgccatcctggagctggcctacaccctggctgatggcctggagtacagcaggacaggcctgcaggccggcctgaccattgatgaatttgccccccggctgtccttcttctggggcatcggcatgaacttctacatggagatcgccaagatgagagctggccggcggctgtgggcccacctgattgagaagatgttccagcccaagaacagcaagagcctgctgctgcgggcccactgccagaccagcggctggagcctgacagagcaggacccctacaacaacatcgtgaggacagccatcgaggccatggctgctgtgtttggaggcacccagagcctgcacaccaacagctttgatgaggccctgggcctgcccaccgtgaagagcgcccgcatcgccaggaacacccagatcatcatccaggaggagagcggcatccccaaggtggccgacccctggggcggcagctacatgatggagtgcctgaccaatgatgtgtatgatgctgccctgaagctgatcaatgaaattgaggagatgggcggcatggccaaggctgtggccgagggcatccccaagctgcgcatcgaggagtgtgccgcccggcggcaggccagaattgattctggcagcgaggtgattgtgggcgtgaacaagtaccagctggagaaggaggatgctgtggaggtgctggccatcgacaacacctctgtgaggaaccggcagatcgagaagctgaagaagatcaagagcagccgggaccaggccctggccgagcgctgcctggccgccctgacagaatgtgccgccagcggagatggcaacatcctggccctggccgtggatgccagccgggcccgctgcaccgtgggggagatcacagatgccctgaagaaggtgtttggagagcacaaggccaatgacaggatggtgtctggggcctaccggcaggagtttggagagagcaaggagatcaccagcgccatcaagagggtgcacaagttcatggagcgggagggcagaagaccccggctgctggtggccaagatgggccaggacggccatgacagaggagccaaggtgattgccaccggctttgctgacctgggctttgatgtggacatcggccccctcttccagaccccccgggaggtggcccagcaggccgtggatgctgatgtgcatgctgtgggcatcagcaccctggccgccggccacaagaccctggtgcctgagctgatcaaggagctgaacagcctgggccgcccagacatcctggtgatgtgtggcggcgtcatccccccccaggactatgagttcctgtttgaggtgggcgtgtccaatgtgtttggacctggcacccgcatccccaaggctgctgtgcaggtgctggatgacatcgagaagtgcctggagaagaagcagcagagcgtgtag

SEQ ID NO: 3303 - DNA, 594 bp, synthetic construct
  misc_feature 1..594: note = source = /note="Description of Artificial Sequence: Synthetic coding sequence"
  source 1..594: mol_type = other DNA
acccgctacctggcccgctgcaccgtgggggagatcacagatgccctgaagaaggtgtttggagagcacaaggccaatgacaggatggtgtctggggcctaccggcaggagtttggagagagcaaggagatcaccagcgccatcaagagggtgcacaagttcatggagcgggagggccggcggccccggctgctggtggccaagatgggccaggacggccatgacagaggagccaaggtgattgccactggatttgctgacctgggctttgatgtggacatcggccccctcttccagaccccccgggaggtggcccagcaggccgtggatgctgatgtgcatgctgtgggcatcagcaccctggccgccggccacaagaccctggtgcctgagctgatcaaggagctgaacagcctgggccgcccagacatcctggtgatgtgtggcggcgtcatccccccccaggactatgagttcctgtttgaggtgggcgtgtccaatgtgtttggacctggcacccgcatccccaaggctgctgtgcaggtgctggatgacatcgagaagtgcctggagaagaagcagcagagcgtgtag

SEQ ID NO: 3304 - DNA, 2685 bp, synthetic construct
  misc_feature 1..2685: note = source = /note="Description of Artificial Sequence: Synthetic coding sequence"
  source 1..2685: mol_type = other DNA
atgatcctgctggccgtgctcttcctgtgcttcatcagcagctacagcgcctctgtgaagggccacaccaccggcctgagcctgaacaatgaccggctgtacaagctgacctacagcacagaggtgctgctggaccggggcaagggcaagctgcaggacagcgtgggctaccgcatcagcagcaatgtggatgtggccctgctgtggaggaacccagatggagatgatgaccagctgatccagatcaccatgaaggatgtgaatgtggagaatgtgaaccagcagagaggagagaagagcatcttcaagggcaagagccccagcaagatcatgggcaaggagaacctggaggccctgcagaggcccaccctgctgcacctgattcatggcaaggtgaaggagttctacagctaccagaatgaggccgtggccatcgagaacatcaagaggggcctggccagcctcttccagacccagctgagcagcggcaccaccaatgaggtggacatcagcggcaactgcaaggtgacctaccaggcccaccaggacaaggtgatcaagatcaaggccctggacagctgcaagatcgcccggagcggcttcaccacccccaaccaggtgctgggcgtgagcagcaaggccacctctgtgaccacctacaagattgaagattcttttgtgattgctgtgctggccgaggagacccacaactttggcctgaacttcctgcagaccatcaagggcaagatcgtgtccaagcagaagctggagctgaagaccacagaagctggcccccggctgatgtctgggaagcaggccgccgccatcatcaaggctgtggacagcaagtacacagccatccccatcgtgggccaggtgttccagagccactgcaagggctgccccagcctgtctgagctgtggaggagcaccaggaagtacctgcagcctgacaacctgagcaaggccgaggccgtgaggaacttcctggccttcatccagcacctgaggacagccaagaaggaggagatcctgcagatcctgaagatggagaacaaggaggtgctgccccagctggtggatgctgtgaccagcgcccagaccagtgacagcctggaggccatcctggacttcctggacttcaagagtgacagcagcatcatcctgcaggagcgcttcctgtatgcctgtggctttgccagccaccccaatgaggagctgctgcgggccctgatcagcaagttcaagggcagcatcggcagcagtgacatccgggagaccgtgatgatcatcaccggcaccctggtgaggaagctgtgccagaatgaaggctgcaagctgaaggctgtggtggaggccaagaagctgatcctgggcggcctggagaaggccgagaagaaggaggacaccaggatgtacctgctggccctgaagaatgccctgctgcctgagggcatccccagcctgctgaagtatgcagaggccggggagggccccatcagccacctggccaccacagccctgcagagatatgacctgcccttcatcacagatgaggtgaagaagaccctgaaccgcatctaccaccagaacaggaaggtgcatgagaagacagtgaggacagctgctgctgccatcatcctgaacaacaaccccagctacatggatgtgaagaacatcctgctgagcatcggggagctgccccaggagatgaacaagtacatgctggccatcgtgcaggacatcctgcgctttgagatgcctgccagcaagatcgtgcggcgggtgctgaaggagatggtggcccacaactatgaccgcttcagccgcagcggcagcagcagcgcctacacaggctacatcgagaggagccccaggtctgccagcacctacagcctggacatcctgtacagcggcagcggcatcctgcggcgcagcaacctgaacatcttccagtacatcggcaaggccggcctgcacggcagccaggtggtgattgaggcccagggcctggaggccctgattgctgccaccccagatgaaggagaggagaacctggacagctatgccggcatgtctgccatcctgtttgatgtgcagctgcggcctgtgaccttcttcaacggctacagcgacctgatgagcaagatgctgagcgccagcggggaccccatctctgtggtgaagggcctcatcctgctgattgaccacagccaggagctgcagctgcagagcggcctgaaggccaacatcgaggtgcagggcggcctggccatcgacatcagcggggccatggagttcagcctgtggtaccgggagagcaagaccagggtgaagaacagagtgacagtggtgatcaccacagacatcaccgtggacagcagctttgtgaaggccggcctggagaccagcacagaaacagaagctggcctggagttcatcagcacagtgcagttcagccagtaccccttcctggtgtgcatgcagatggacaaggatgaggcccccttccggcagtttgagaagaagtatgaaaggctgagcacaggccggggctacgtgtcccagaagaggaaggagagcgtgctggccggctgtgagttccccctgcaccaggagaacagcgagatgtgcaaggtggtgtttgccccccagcctgacagcaccagcagcggctggttctag

SEQ ID NO: 3305 - DNA, 2685 bp, synthetic construct; identical to SEQ ID NO: 3304
  misc_feature 1..2685: note = source = /note="Description of Artificial Sequence: Synthetic coding sequence"
  source 1..2685: mol_type = other DNA

SEQ ID NO: 3306 - DNA, 537 bp, synthetic construct
  misc_feature 1..537: note = source = /note="Description of Artificial Sequence: Synthetic coding sequence"
  source 1..537: mol_type = other DNA
atggcccgggcccccctgcggcctgagaacaccatcgtgcggggcagcgccaaccagtgccaggacacctacagagctgaggagctgaccggccacaccaccggcctgagcctgaacaatgaccggctgtacaagctgacctacagcacagaggtgctgctggaccggggcaagggcaagctgcaggacagcgtgggctaccgcatcagcagcaatgtggatgtggccctgctgtggaggaacccagatggagatgatgaccagctgatccagatcaccatgaaggatgtgaatgtggagaatgtgaaccagcagagaggagagaagagcatcttcaagggcaagagccccagcaagatcatgggcaaggagaacctggaggccctgcagaggcccaccctgctgcacctgattcatggcaaggtgaaggagttctacagctaccagaatgaggccgtggccatcgagaacatcaagaggggcctggccagcctcttccagacccagctgagcagcggcaccaccaatgaggtgtag

SEQ ID NO: 3307 - DNA, 1551 bp, synthetic construct
  misc_feature 1..1551: note = source = /note="Description of Artificial Sequence: Synthetic coding sequence"
  source 1..1551: mol_type = other DNA
atgatcctgctggccgtgctcttcctgtgcttcatcagcagctacagcgcctctgtgaagggccacaccaccggcctgagcctgaacaatgaccggctgtacaagctgacctacagcacagaggtgctgctggaccggggcaagggcaagctgcaggacagcgtgggctaccgcatcagcagcaatgtggatgtggccctgctgtggaggaacccagatggagatgatgaccagctgatccagatcaccatgaaggatgtgaatgtggagaatgtgaaccagcagagaggagagaagagcatcttcaagggcaagagccccagcaagatcatgggcaaggagaacctggaggccctgcagaggcccaccctgctgcacctgattcatggcaaggtgaaggagttctacagctaccagaatgaggccgtggccatcgagaacatcaagaggggcctggccagcctcttccagacccagctgagcagcggcaccaccaatgaggtggacatcagcggcaactgcaaggtgacctaccaggcccaccaggacaaggtgatcaagatcaaggccctggacagctgcaagatcgcccggagcggcttcaccacccccaaccaggtgctgggcgtgagcagcaaggccacctctgtgaccacctacaagattgaagattcttttgtgattgctgtgctggccgaggagacccacaactttggcctgaacttcctgcagaccatcaagggcaagatcgtgtccaagcagaagctggagctgaagaccacagaagctggcccccggctgatgtctgggaagcaggccgccgccatcatcaaggctgtggacagcaagtacacagccatccccatcgtgggccaggtgttccagagccactgcaagggctgccccagcctgtctgagctgtggaggagcaccaggaagtacctgcagcctgacaacctgagcaaggccgaggccgtgaggaacttcctggccttcatccagcacctgaggacagccaagaaggaggagatcctgcagatcctgaagatggagaacaaggaggtgctgccccagctggtggatgctgtgaccagcgcccagaccagtgacagcctggaggccatcctggacttcctggacttcaagagtgacagcagcatcatcctgcaggagcgcttcctgtatgcctgtggctttgccagccaccccaatgaggagctgctgcgggccctgatcagcaagttcaagggcagcatcggcagcagtgacatccgggagaccgtgatgatcatcaccggcaccctggtgaggaagctgtgccagaatgaaggctgcaagctgaaggctgtggtggaggccaagaagctgatcctgggcggcctggagaaggccgagaagaaggaggacaccaggatgtacctgctggccctgaagaatgccctgctgcctgagggcatccccagcctgctgaagtatgcagaggccggggagggccccatcagccacctggccaccacagccctgcagagatatgacctcttccacaactag

SEQ ID NO: 3308 - DNA, 3771 bp, synthetic construct
  misc_feature 1..3771: note = source = /note="Description of Artificial Sequence: Synthetic coding sequence"
  source 1..3771: mol_type = other DNA
atgctgttcaagctgctgcagaggcagacctacacctgcctgagccacagatatggcctgtatgtgtgcttcctgggcgtggtggtgaccatcgtgtctgccttccagtttggagaggtggtgctggagtggagccgggaccagtaccacgtgctgtttgacagctacagagacaacattgctgggaagagcttccagaaccggctgtgcctgcccatgcccattgatgtggtgtacacctgggtgaatggaacagacctggagctgctgaaggagctgcagcaggtgcgggagcagatggaggaggagcagaaggccatgagggagatcctgggcaagaacaccacagagcccaccaagaagtctgagaagcagctggagtgcctgctgacccactgcatcaaggtgcccatgctggtgctggaccctgccctgcctgccaacatcaccctgaaggacctgcccagcctgtaccccagcttccacagcgccagtgacatcttcaacgtggccaagcccaagaaccccagcaccaacgtgtctgtggtggtgtttgacagcaccaaggatgtggaggatgcccacagcggcctgctgaagggcaacagccggcagacagtgtggaggggctacctgaccacagacaaggaggtgcccggcctggtgctgatgcaggacctggccttcctgagcggcttcccccccaccttcaaggagaccaaccagctgaagaccaagctgcctgagaacctgagcagcaaggtgaagctgctgcagctgtacagcgaggcctctgtggccctgctgaagctgaacaaccccaaggacttccaggagctgaacaagcagaccaagaagaacatgaccattgatggcaaggagctgaccatcagccctgcctacctgctgtgggacctgagcgccatcagccagagcaagcaggatgaggacatcagcgccagcagatttgaggacaatgaggagctgcgctacagcctgcggagcattgaaagacatgccccctgggtgaggaacatcttcatcgtgaccaacggccagatccccagctggctgaacctggacaacccccgggtgaccatcgtgacccaccaggatgtgttcaggaacctgagccacctgcccaccttcagcagccctgccatcgagagccacatccacagaattgagggcctgagccagaagttcatctacctgaatgatgatgtgatgtttgggaaggatgtgtggccagatgacttctacagccacagcaagggccagaaggtgtacctgacctggcctgtgcccaactgtgccgagggctgccccggctcctggatcaaggatggctactgtgacaaggcctgcaacaacagcgcctgtgactgggatggaggagactgcagcggcaacagcggcggcagccgctacatcgccggcggcggcggcaccggcagcattggagtgggccagccctggcagtttggaggcggcatcaacagcgtgtcctactgcaaccagggctgtgccaacagctggctggccgacaagttctgtgaccaggcctgcaatgtgctgagctgtggctttgatgctggggactgtggccaggaccacttccacgagctgtacaaggtgatcctgctgcccaaccagacccactacatcatccccaagggagaatgtctgccctacttctcctttgctgaggtggccaagaggggcgtggagggcgcctacagcgacaaccccatcatcagacatgccagcatcgccaacaagtggaagaccatccacctgatcatgcacagcggcatgaatgccaccaccatccacttcaacctgaccttccagaacaccaatgatgaggagttcaagatgcagatcaccgtggaggtggacacccgggagggccccaagctgaacagcacagcccagaagggctatgagaacctggtgagccccatcaccctgctgcctgaggccgagatcctgtttgaggacatccccaaggagaagcgcttccccaagttcaagagacatgatgtgaacagcacccggcgggcccaggaggaggtgaagatccccctggtgaacatcagcctgctgcccaaggatgcccagctgagcctgaacaccctggacctgcagctggagcacggggacatcaccctgaagggctacaacctgagcaagagcgccctgctgcggagcttcctgatgaacagccagcacgccaagatcaagaaccaggccatcatcacagatgagaccaatgacagcctggtggccccccaggagaagcaggtgcacaagagcatcctgcccaacagcctgggcgtgtctgagcggctgcagaggctgaccttccctgctgtgtctgtgaaggtgaatggacatgaccagggccagaacccccccctggacctggagaccacagcccgcttccgggtggagacccacacccagaagaccatcggcggcaatgtgaccaaggagaagccacccagcctgattgtgcccctggagagccagatgaccaaggagaagaagatcaccgggaaggagaaggagaacagcaggatggaggagaatgctgagaaccacatcggcgtgacagaggtgctgctgggcaggaagctgcagcactacacagacagctacctgggcttcctgccctgggagaagaagaagtacttccaggacctgctggatgaggaggagagcctgaagacccagctggcctacttcacagacagcaagaacacaggccggcagctgaaggacacctttgctgacagcctgcgctacgtgaacaagatcctgaacagcaagtttggcttcaccagcaggaaggtgcctgcccacatgccccacatgattgaccgcatcgtgatgcaggagctgcaggacatgtttcctgaggagtttgacaagaccagcttccacaaggtgcgccacagcgaggacatgcagtttgccttctcctacttctactacctgatgtctgctgtgcagcccctgaacatcagccaggtgtttgatgaggtggacacagaccagagcggcgtgctgagtgaccgggagatccgcaccctggccacccgcatccacgagctgcccctgagcctgcaggacctgaccggcctggagcacatgctgatcaactgcagcaagatgctgcctgctgacatcacccagctgaacaacatcccccccacccaggagagctactatgaccccaacctgccccctgtgaccaagagcctggtgaccaactgcaagcctgtgacagacaagatccacaaggcctacaaggacaagaacaagtacagatttgagatcatgggagaggaggagatcgccttcaagatgatccgcaccaacgtgagccacgtggtgggccagctggatgacatcaggaagaaccccaggaagtttgtgtgcctgaatgacaacatcgaccacaaccacaaggatgcccagacagtgaaggctgtgctgcgggacttctatgagagcatgttccccatccccagccagtttgagctgccccgggagtacagaaaccgcttcctgcacatgcatgagctgcaggagtggagggcctacagagacaagctgaagttctggacccactgtgtgctggccaccctcatcatgttcaccatcttctccttctttgctgagcagctgattgccctgaagaggaagatcttcccccggcggcgcatccacaaggaggccagccccaaccgcatccgggtgtag

SEQ ID NO: 3309 - DNA, 1473 bp, synthetic construct
  misc_feature 1..1473: note = source = /note="Description of Artificial Sequence: Synthetic coding sequence"
  source 1..1473: mol_type = other DNA
atgctgttcaagctgctgcagaggcagacctacacctgcctgagccacagatatggcctgtatgtgtgcttcctgggcgtggtggtgaccatcgtgtctgccttccagtttggagaggtggtgctggagtggagccgggaccagtaccacgtgctgtttgacagctacagagacaacattgctgggaagagcttccagaaccggctgtgcctgcccatgcccattgatgtggtgtacacctgggtgaatggaacagacctggagctgctgaaggagctgcagcaggtgcgggagcagatggaggaggagcagaaggccatgagggagatcctgggcaagaacaccacagagcccaccaagaagtctgagaagcagctggagtgcctgctgacccactgcatcaaggtgcccatgctggtgctggaccctgccctgcctgccaacatcaccctgaaggacctgcccagcctgtaccccagcttccacagcgccagtgacatcttcaacgtggccaagcccaagaaccccagcaccaacgtgtctgtggtggtgtttgacagcaccaaggatgtggaggatgcccacagcggcctgctgaagggcaacagccggcagacagtgtggaggggctacctgaccacagacaaggaggtgcccggcctggtgctgatgcaggacctggccttcctgagcggcttcccccccaccttcaaggagaccaaccagctgaagaccaagctgcctgagaacctgagcagcaaggtgaagctgctgcagctgtacagcgaggcctctgtggccctgctgaagctgaacaaccccaaggacttccaggagctgaacaagcagaccaagaagaacatgaccattgatggcaaggagctgaccatcagccctgcctacctgctgtgggacctgagcgccatcagccagagcaagcaggatgaggacatcagcgccagcagatttgaggacaatgaggagctgcgctacagcctgcggagcattgaaagacatgccccctgggtgaggaacatcttcatcgtgaccaacggccagatccccagctggctgaacctggacaacccccgggtgaccatcgtgacccaccaggatgtgttcaggaacctgagccacctgcccaccttcagcagccctgccatcgagagccacatccacagaattgagggcctgagccagaagttcatctacctgaatgatgatgtgatgtttgggaaggatgtgtggccagatgacttctacagccacagcaagggccagaaggtgtacctgacctggcctgtgcccaactgtgccgagggctgccccggctcctggatcaaggatggctactgtgacaaggcctgcaacaacagcgcctgtgactgggatggaggagactgcagcggcaaggatgtgctgaactgcaacagcttcatcttcatggagtacttcctgctgaaccactactag

SEQ ID NO: 3310 - DNA, 1605 bp, synthetic construct
  misc_feature 1..1605: note = source = /note="Description of Artificial Sequence: Synthetic coding sequence"
  source 1..1605: mol_type = other DNA
atggccacagccctgatggctgtggtgctgcgggctgctgctgtggccccccggctgcggggccggggcggcactggaggagcccggcggctgagctgtggggccaggagaagagctgcccggggcaccagccctggaagaaggctgagcacagcctggagccagccccagcccccacctgaggagtatgctggagcagatgatgtgtcccagagccctgtggccgaggagcccagctgggtgcccagcccccggccccctgtgccccatgagagccctgagcccccatctggccgcagcctggtgcagagggacatccaggccttcctgaaccagtgtggggccagccctggagaggcccggcactggctgacccagttccagacctgccaccacagcgctgacaagccctttgctgtgattgaggtggatgaggaggtgctgaagtgccagcagggcgtgagcagcctggcctttgccctggccttcctgcagaggatggacatgaagcccctggtggtgctgggcctgcctgcccccacagcccccagcggctgcctgtccttctgggaggccaaggcccagctggccaagagctgcaaggtgctggtggatgccctgcggcacaatgctgctgctgctgtgcccttcttcggcggcggctctgtgctgcgggctgctgagcccgccccccacgccagctatggaggcatcgtgtctgtggagacagacctgctgcagtggtgcctggagagcggcagcatccccatcctgtgccccatcggggagacagctgccaggagatctgtgctgctggacagcctggaggtgacagccagcctggccaaggccctgcggcccaccaagatcatcttcctgaacaacacaggaggcctgcgggacagcagccacaaggtgctgagcaatgtgaacctgcctgctgacctggacctggtgtgcaatgctgagtgggtgtccaccaaggagcggcagcagatgaggctcatcgtggatgtgctgagccggctgccccaccacagcagcgctgtgatcacagctgccagcaccctgctgacagagctgttcagcaacaagggcagcggcaccctcttcaagaatgctgagaggatgctgcgggtgcgcagcctggacaagctggaccagggccgcctggtggacctggtgaatgccagctttgggaagaagctgagagatgactacctggccagcctgcggccccggctgcacagcatctacgtgtctgagggctacaatgctgctgccatcctgaccatggagcctgtgctgggcggcaccccctacctggacaagtttgtggtgagcagcagccggcagggccagggcagcggccagatgctgtgggagtgcctgcggcgggacctgcagaccctcttctggaggagccgggtgaccaaccccatcaacccctggtacttcaagcacagtgatggcagcttcagcaacaagcagtggatcttcttctggtttggcctggccgacatccgggacagctatgagctggtgaaccacgccaagggcctgcctgacagcttccacaagccagccagtgaccccggcagctag

SEQ ID NO: 3311 - DNA, 1107 bp, synthetic construct
  misc_feature 1..1107: note = source = /note="Description of Artificial Sequence: Synthetic coding sequence"
  source 1..1107: mol_type = other DNA
atggacatgaagcccctggtggtgctgggcctgcctgcccccacagcccccagcggctgcctgtccttctgggaggccaaggcccagctggccaagagctgcaaggtgctggtggatgccctgcggcacaatgctgctgctgctgtgcccttcttcggcggcggctctgtgctgcgggctgctgagcccgccccccacgccagctatggaggcatcgtgtctgtggagacagacctgctgcagtggtgcctggagagcggcagcatccccatcctgtgccccatcggggagacagctgccaggagatctgtgctgctggacagcctggaggtgacagccagcctggccaaggccctgcggcccaccaagatcatcttcctgaacaacacaggaggcctgcgggacagcagccacaaggtgctgagcaatgtgaacctgcctgctgacctggacctggtgtgcaatgctgagtgggtgtccaccaaggagcggcagcagatgaggctcatcgtggatgtgctgagccggctgccccaccacagcagcgctgtgatcacagctgccagcaccctgctgacagagctgttcagcaacaagggcagcggcaccctcttcaagaatgctgagaggatgctgcgggtgcgcagcctggacaagctggaccagggccgcctggtggacctggtgaatgccagctttgggaagaagctgagagatgactacctggccagcctgcggccccggctgcacagcatctacgtgtctgagggctacaatgctgctgccatcctgaccatggagcctgtgctgggcggcaccccctacctggacaagtttgtggtgagcagcagccggcagggccagggcagcggccagatgctgtgggagtgcctgcggcgggacctgcagaccctcttctggaggagccgggtgaccaaccccatcaacccctggtacttcaagcacagtgatggcagcttcagcaacaagcagtggatcttcttctggtttggcctggccgacatccgggacagctatgagctggtgaaccacgccaagggcctgcctgacagcttccacaagccagccagtgaccccggcagctag

SEQ ID NO: 3312 - DNA, 1188 bp, synthetic construct
  misc_feature 1..1188: note = source = /note="Description of Artificial Sequence: Synthetic coding sequence"
  source 1..1188: mol_type = other DNA
atgcctggccgcagctgtgtggccctggtgctgctggccgctgctgtgtcctgtgctgtggcccagcacgccccaccctggacagaggactgcaggaagagcacctacccaccttctggccccacctacagaggagctgtgccctggtacaccatcaacctggacctgcccccctacaagcgctggcatgagctgatgctggacaaggcccctgtgctgaaggtgattgtgaacagcctgaagaacatgatcaacacctttgtgcccagcggcaagatcatgcaggtggtggatgagaagctgcccggcctgctgggcaacttccctggcccctttgaggaggagatgaagggcattgctgctgtgacagacatccccctgggggagatcatctccttcaacatcttctatgagctgttcaccatctgcaccagcatcgtggccgaggacaagaagggccacctgattcatggaagaaacatggactttggagtcttcctgggctggaacatcaacaatgacacctgggtgatcacagagcagctgaagcccctgactgtgaacctggacttccagaggaacaacaagacagtgttcaaggccagcagctttgctggctacgtgggcatgctgaccggcttcaagccaggcctcttcagcctgaccctgaatgaacgcttcagcatcaatggaggctacctgggcatcctggagtggatcctgggcaagaaggatgtgatgtggattggcttcctgaccaggacagtgctggagaacagcaccagctatgaggaggccaagaacctgctgaccaagaccaagatcctggccccagcctacttcatcctgggcggcaaccagagcggggagggctgcgtcatcacccgggacaggaaggagagcctggatgtgtatgagctggatgccaagcagggccgctggtacgtggtgcagaccaactatgaccgctggaagcaccccttcttcctggatgacaggaggaccccagccaagatgtgcctgaacagaaccagccaggagaacatcagctttgagaccatgtatgatgtgctgagcaccaagcctgtgctgaacaagctgactgtgtacaccaccctgattgatgtgaccaagggccagtttgagacctacctgcgggactgcccagacccctgcatcggctggtag

SEQ ID NO: 3313 - DNA, 1170 bp, synthetic construct
  misc_feature 1..1170: note = source = /note="Description of Artificial Sequence: Synthetic coding sequence"
  source 1..1170: mol_type = other DNA
atgaactgctgcatcggcctgggggagaaggcccggggcagccaccgggccagctaccccagcctgagcgccctcttcacagaggccagcatcctgggcttcggcagctttgctgtgaaggcccagtggacagaggactgcaggaagagcacctacccaccttctggccccaccgtcttccctgctgtgatccgctacagaggagctgtgccctggtacaccatcaacctggacctgcccccctacaagcgctggcatgagctgatgctggacaaggcccctgtgcccggcctgctgggcaacttccctggcccctttgaggaggagatgaagggcattgctgctgtgacagacatccccctgggggagatcatctccttcaacatcttctatgagctgttcaccatctgcaccagcatcgtggccgaggacaagaagggccacctgattcatggaagaaacatggactttggagtcttcctgggctggaacatcaacaatgacacctgggtgatcacagagcagctgaagcccctgactgtgaacctggacttccagaggaacaacaagacagtgttcaaggccagcagctttgctggctacgtgggcatgctgaccggcttcaagccaggcctcttcagcctgaccctgaatgaacgcttcagcatcaatggaggctacctgggcatcctggagtggatcctgggcaagaaggatgtgatgtggattggcttcctgaccaggacagtgctggagaacagcaccagctatgaggaggccaagaacctgctgaccaagaccaagatcctggccccagcctacttcatcctgggcggcaaccagagcggggagggctgcgtcatcacccgggacaggaaggagagcctggatgtgtatgagctggatgccaagcagggccgctggtacgtggtgcagaccaactatgaccgctggaagcaccccttcttcctggatgacaggaggaccccagccaagatgtgcctgaacagaaccagccaggagaacatcagctttgagaccatgtatgatgtgctgagcaccaagcctgtgctgaacaagctgactgtgtacaccaccctgattgatgtgaccaagggccagtttgagacctacctgcgggactgcccagacccctgcatcggctggtag

SEQ ID NO: 3314 - DNA, 1236 bp, synthetic construct
  misc_feature 1..1236: note = source = /note="Description of Artificial Sequence: Synthetic coding sequence"
  source 1..1236: mol_type = other DNA
atgaactgctgcatcggcctgggggagaaggcccggggcagccaccgggccagctaccccagcctgagcgccctcttcacagaggccagcatcctgggcttcggcagctttgctgtgaaggcccagtggacagaggactgcaggaagagcacctacccaccttctggccccacctacagaggagctgtgccctggtacaccatcaacctggacctgcccccctacaagcgctggcatgagctgatgctggacaaggcccctgtgctgaaggtgattgtgaacagcctgaagaacatgatcaacacctttgtgcccagcggcaagatcatgcaggtggtggatgagaagctgcccggcctgctgggcaacttccctggcccctttgaggaggagatgaagggcattgctgctgtgacagacatccccctgggggagatcatctccttcaacatcttctatgagctgttcaccatctgcaccagcatcgtggccgaggacaagaagggccacctgattcatggaagaaacatggactttggagtcttcctgggctggaacatcaacaatgacacctgggtgatcacagagcagctgaagcccctgactgtgaacctggacttccagaggaacaacaagacagtgttcaaggccagcagctttgctggctacgtgggcatgctgaccggcttcaagccaggcctcttcagcctgaccctgaatgaacgcttcagcatcaatggaggctacctgggcatcctggagtggatcctgggcaagaaggatgtgatgtggattggcttcctgaccaggacagtgctggagaacagcaccagctatgaggaggccaagaacctgctgaccaagaccaagatcctggccccagcctacttcatcctgggcggcaaccagagcggggagggctgcgtcatcacccgggacaggaaggagagcctggatgtgtatgagctggatgccaagcagggccgctggtacgtggtgcagaccaactatgaccgctggaagcaccccttcttcctggatgacaggaggaccccagccaagatgtgcctgaacagaaccagccaggagaacatcagctttgagaccatgtatgatgtgctgagcaccaagcctgtgctgaacaagctgactgtgtacaccaccctgattgatgtgaccaagggccagtttgagacctacctgcgggactgcccagacccctgcatcggctggtag

SEQ ID NO: 3315 - DNA, 918 bp, synthetic construct
  misc_feature 1..918: note = source = /note="Description of Artificial Sequence: Synthetic coding sequence"
  source 1..918: mol_type = other DNA
atgctggacaaggcccctgtgctgaaggtgattgtgaacagcctgaagaacatgatcaacacctttgtgcccagcggcaagatcatgcaggtggtggatgagaagctgcccggcctgctgggcaacttccctggcccctttgaggaggagatgaagggcattgctgctgtgacagacatccccctgggccacctgattcatggaagaaacatggactttggagtcttcctgggctggaacatcaacaatgacacctgggtgatcacagagcagctgaagcccctgactgtgaacctggacttccagaggaacaacaagacagtgttcaaggccagcagctttgctggctacgtgggcatgctgaccggcttcaagccaggcctcttcagcctgaccctgaatgaacgcttcagcatcaatggaggctacctgggcatcctggagtggatcctgggcaagaaggatgtgatgtggattggcttcctgaccaggacagtgctggagaacagcaccagctatgaggaggccaagaacctgctgaccaagaccaagatcctggccccagcctacttcatcctgggcggcaaccagagcggggagggctgcgtcatcacccgggacaggaaggagagcctggatgtgtatgagctggatgccaagcagggccgctggtacgtggtgcagaccaactatgaccgctggaagcaccccttcttcctggatgacaggaggaccccagccaagatgtgcctgaacagaaccagccaggagaacatcagctttgagaccatgtatgatgtgctgagcaccaagcctgtgctgaacaagctgactgtgtacaccaccctgattgatgtgaccaagggccagtttgagacctacctgcgggactgcccagacccctgcatcggctggtag

SEQ ID NO: 3316 - DNA, 1113 bp, synthetic construct
  misc_feature 1..1113: note = source = /note="Description of Artificial Sequence: Synthetic coding sequence"
  source 1..1113: mol_type = other DNA
atgcctggccgcagctgtgtggccctggtgctgctggccgctgctgtgtcctgtgctgtggcccagcacgccccaccctggacagaggactgcaggaagagcacctacccaccttctggccccacctacagaggagctgtgccctggtacaccatcaacctggacctgcccccctacaagcgctggcatgagctgatgctggacaaggcccctgtgctgaaggtgattgtgaacagcctgaagaacatgatcaacacctttgtgcccagcggcaagatcatgcaggtggtggatgagaagctgcccggcctgctgggcaacttccctggcccctttgaggaggagatgaagggcattgctgctgtgacagacatccccctgggccacctgatccacggcaggaacatggactttggagtcttcctgggctggaacatcaacaatgacacctgggtgatcacagagcagctgaagcccctgactgtgaacctggacttccagaggaacaacaagacagtgttcaaggccagcagctttgctggctacgtgggcatgctgaccggcttcaagccaggcctcttcagcctgaccctgaatgaacgcttcagcatcaatggaggctacctgggcatcctggagtggatcctgggcaagaaggatgtgatgtggattggcttcctgaccaggacagtgctggagaacagcaccagctatgaggaggccaagaacctgctgaccaagaccaagatcctggccccagcctacttcatcctgggcggcaaccagagcggggagggctgtgtgatcacccgggacaggaaggagagcctggatgtgtatgagctggatgccaagcagggccgctggtacgtggtgcagaccaactatgaccgctggaagcaccccttcttcctggatgacaggaggaccccagccaagatgtgcctgaacagaaccagccaggagaacatcagctttgagaccatgtatgatgtgctgagcaccaagcctgtgctgaacaagctgactgtgtacaccaccctgattgatgtgaccaagggccagtttgagacctacctgcgggactgcccagacccctgcatcggctggtag

SEQ ID NO: 3317 - DNA, 405 bp, synthetic construct
  misc_feature 1..405: note = source = /note="Description of Artificial Sequence: Synthetic coding sequence"
  source 1..405: mol_type = other DNA
atggacccccagacagcccccagccgggccctgctgctgctgctcttcctgcacctggccttcctgggcggccgcagccaccccctgggcagccctggcagcgccagtgacctggagaccagcggcctgcaggagcagaggaaccacctgcagggcaagctgtctgagctgcaggtggagcagaccagcctggagcccctgcaggagagcccccggcccaccggggtgtggaagagccgggaggtggccacagagggcatccggggccacaggaagatggtgctgtacaccctgcgggcccccaggagccccaagatggtgcagggcagcggctgctttggaaggaagatggaccgcatcagcagcagcagcggcctgggctgcaaggtgctgcggcggcactag

SEQ ID NO: 3318 - DNA, 726 bp, synthetic construct
  misc_feature 1..726: note = source = /note="Description of Artificial Sequence: Synthetic coding sequence"
  source 1..726: mol_type = other DNA
atgtccatgctgttctacaccctcatcacagccttcctgattggcatccaggccgagccccacagcgagagcaatgtgcctgctggccacaccatcccccaggcccactggaccaagctgcagcacagcctggacacagccctgcggcgggcccggagcgccccagctgctgccatcgccgcccgggtggccggccagaccaggaacatcaccgtggaccccaggctcttcaagaagaggcggctgcggagcccccgggtgctcttcagcacccagcccccccgggaggccgctgacacccaggacctggactttgaggtgggcggggccgcccccttcaacagaacccacaggagcaagaggagcagcagccaccccatcttccacagaggagagttctctgtgtgtgacagcgtgtctgtgtgggtgggggacaagaccacagccacagacatcaagggcaaggaggtgatggtgctgggggaggtgaacatcaacaacagcgtcttcaagcagtacttctttgagaccaagtgccgggaccccaaccctgtggacagcggctgccggggcatcgacagcaagcactggaacagctactgcaccaccacccacacctttgtgaaggccctgaccatggatggcaagcaggccgcctggaggttcatcagaattgacacagcctgtgtgtgtgtgctgagcaggaaggctgtgagaagagcctag

SEQ ID NO: 3319 - DNA, 1923 bp, synthetic construct
  misc_feature 1..1923: note = source = /note="Description of Artificial Sequence: Synthetic coding sequence"
  source 1..1923: mol_type = other DNA
atgtctgagaggaaggagggccggggcaagggcaagggcaagaagaaggagcggggcagcggcaagaagccagagagcgctgctggcagccagagccctgccctgcccccccggctgaaggagatgaagagccaggagagcgctgctggcagcaagctggtgctgcgctgtgagaccagcagcgagtacagcagcctgcgcttcaagtggttcaagaatggaaatgagctgaacaggaagaacaagccccagaacatcaagatccagaagaagccaggcaagtctgagctgcgcatcaacaaggccagcctggccgacagcggggagtacatgtgcaaggtgatcagcaagctgggcaatgacagcgccagcgccaacatcaccatcgtggagagcaatgagatcatcaccggcatgcctgccagcacagaaggagcctacgtgagcagcgagagccccatccgcatctctgtgtccacagagggcgccaacaccagcagcagcaccagcaccagcaccaccggcaccagccacctggtgaagtgtgccgagaaggagaagaccttctgtgtgaatggaggagagtgcttcatggtgaaggacctgagcaaccccagccgctacctgtgcaagtgccagcccggcttcaccggggcccgctgcacagaaaatgtgcccatgaaggtgcagaaccaggagaaggccgaggagctgtaccagaagagggtgctgaccatcaccggcatctgcatcgccctgctggtggtgggcatcatgtgtgtggtggcctactgcaagaccaagaagcagaggaagaagctgcatgaccggctgcggcagagcctgcggtctgagaggaacaacatgatgaacatcgccaacggcccccaccaccccaaccccccaccagaaaatgtgcagctggtgaaccagtatgtgtccaagaatgtcatcagcagcgagcacatcgtggagcgggaggccgagaccagcttcagcaccagccactacaccagcacagcccaccacagcaccaccgtgacccagacccccagccacagctggagcaatggccacacagagagcatcctgtctgagagccacagcgtgattgtgatgagctctgtggagaacagccgccacagcagccccactggaggcccccggggccgcctgaatggaactggaggcccccgggagtgcaacagcttcctgcggcatgcccgggagaccccagacagctacagagacagcccccacagcgagcgctacgtgtctgccatgaccaccccagccaggatgagccctgtggacttccacacccccagcagccccaagagcccccccagcgagatgagcccccctgtgtcctccatgacagtgtccatgcccagcatggctgtgagccccttcatggaggaggagcggcccctgctgctggtgaccccaccccggctgcgggagaagaagtttgaccaccacccccagcagttcagcagcttccaccacaacccagcccatgacagcaacagcctgcctgccagccccctgagaattgtggaggatgaggagtatgagaccacccaggagtatgagcccgcccaggagcctgtgaagaagctggccaacagcagaagagccaagaggaccaagcccaacggccacatcgccaaccggctggaggtggacagcaacaccagcagccagagcagcaacagcgagagcgagacagaagatgagcgggtgggggaggacacccccttcctgggcatccagaaccccctggccgccagcctggaggccaccccagccttccggctggccgacagcaggaccaacccagctggccgcttcagcacccaggaggagatccaggcccggctgagcagcgtcatcgccaaccaggaccccatcgctgtgtag

SEQ ID NO: 3320 - DNA, 1914 bp, synthetic construct
  misc_feature 1..1914: note = source = /note="Description of Artificial Sequence: Synthetic coding sequence"
  source 1..1914: mol_type = other DNA
atgtctgagaggaaggagggccggggcaagggcaagggcaagaagaaggagcggggcagcggcaagaagccagagagcgctgctggcagccagagccctgccctgcccccccggctgaaggagatgaagagccaggagagcgctgctggcagcaagctggtgctgcgctgtgagaccagcagcgagtacagcagcctgcgcttcaagtggttcaagaatggaaatgagctgaacaggaagaacaagccccagaacatcaagatccagaagaagccaggcaagtctgagctgcgcatcaacaaggccagcctggccgacagcggggagtacatgtgcaaggtgatcagcaagctgggcaatgacagcgccagcgccaacatcaccatcgtggagagcaatgagatcatcaccggcatgcctgccagcacagaaggagcctacgtgagcagcgagagccccatccgcatctctgtgtccacagagggcgccaacaccagcagcagcaccagcaccagcaccaccggcaccagccacctggtgaagtgtgccgagaaggagaagaccttctgtgtgaatggaggagagtgcttcatggtgaaggacctgagcaaccccagccgctacctgtgcaagtgccccaatgagttcaccggggaccgctgccagaactacgtgatggccagcttctacaaggccgaggagctgtaccagaagagggtgctgaccatcaccggcatctgcatcgccctgctggtggtgggcatcatgtgtgtggtggcctactgcaagaccaagaagcagaggaagaagctgcatgaccggctgcggcagagcctgcggagtgaaagaaacaacatgatgaacatcgccaacggcccccaccaccccaaccccccaccagaaaatgtgcagctggtgaaccagtatgtgtccaagaatgtcatcagcagcgagcacatcgtggagcgggaggccgagaccagcttcagcaccagccactacaccagcacagcccaccacagcaccaccgtgacccagacccccagccacagctggagcaatggccacacagagagcatcctgtctgagagccacagcgtcatcgtgatgagctctgtggagaacagccgccacagcagccccaccggcggcccccggggccgcctgaatggcaccggcggcccccgggagtgcaacagcttcctgcggcatgcccgggagaccccagacagctacagagacagcccccacagcgagagatatgtgtctgccatgaccaccccagccaggatgagccctgtggacttccacacccccagcagccccaagagccccccatctgagatgagcccccctgtgtcctccatgacagtgtccatgcccagcatggctgtgagccccttcatggaggaggagcggcccctgctgctggtgaccccaccccggctgcgggagaagaagtttgaccaccacccccagcagttcagcagcttccaccacaacccagcccatgacagcaacagcctgcctgccagccccctgcgcatcgtggaggatgaggagtatgagaccacccaggagtatgagcccgcccaggagcctgtgaagaagctggccaacagccggcgggccaagaggaccaagcccaacggccacatcgccaaccggctggaggtggacagcaacaccagcagccagagcagcaacagcgagagcgagacagaagatgagcgggtgggggaggacacccccttcctgggcatccagaaccccctggccgccagcctggaggccaccccagccttccggctggccgacagcaggaccaacccagctggccgcttcagcacccaggaggagatccaggcccggctgagctctgtgattgccaaccaggaccccatcgctgtgtag

SEQ ID NO: 3321 - DNA, 1836 bp, synthetic construct
  misc_feature 1..1836: note = source = /note="Description of Artificial Sequence: Synthetic coding sequence"
  source 1..1836: mol_type = other DNA
atgtctgagaggaaggagggccggggcaagggcaagggcaagaagaaggagcggggcagcggcaagaagccagagagcgctgctggcagccagagccctgccctgcccccccggctgaaggagatgaagagccaggagagcgctgctggcagcaagctggtgctgcgctgtgagaccagcagcgagtacagcagcctgcgcttcaagtggttcaagaatggaaatgagctgaacaggaagaacaagccccagaacatcaagatccagaagaagccaggcaagtctgagctgcgcatcaacaaggccagcctggccgacagcggggagtacatgtgcaaggtgatcagcaagctgggcaatgacagcgccagcgccaacatcaccatcgtggagagcaatgccaccagcaccagcaccaccggcaccagccacctggtgaagtgtgccgagaaggagaagaccttctgtgtgaatggaggagagtgcttcatggtgaaggacctgagcaaccccagccgctacctgtgcaagtgccccaatgagttcaccggggaccgctgccagaactacgtgatggccagcttctacaagcacctgggcatcgagttcatggaggccgaggagctgtaccagaagagggtgctgaccatcaccggcatctgcatcgccctgctggtggtgggcatcatgtgtgtggtggcctactgcaagaccaagaagcagaggaagaagctgcatgaccggctgcggcagagcctgcggagtgaaagaaacaacatgatgaacatcgccaacggcccccaccaccccaaccccccaccagaaaatgtgcagctggtgaaccagtatgtgtccaagaatgtcatcagcagcgagcacatcgtggagcgggaggccgagaccagcttcagcaccagccactacaccagcacagcccaccacagcaccaccgtgacccagacccccagccacagctggagcaatggccacacagagagcatcctgtctgagagccacagcgtcatcgtgatgagctctgtggagaacagccgccacagcagccccaccggcggcccccggggccgcctgaatggcaccggcggcccccgggagtgcaacagcttcctgcggcatgcccgggagaccccagacagctacagagacagcccccacagcgagagatatgtgtctgccatgaccaccccagccaggatgagccctgtggacttccacacccccagcagccccaagagccccccatctgagatgagcccccctgtgtcctccatgacagtgtccatgcccagcatggctgtgagccccttcatggaggaggagcggcccctgctgctggtgaccccaccccggctgcgggagaagaagtttgaccaccacccccagcagttcagcagcttccaccacaacccagcccatgacagcaacagcctgcctgccagccccctgcgcatcgtggaggatgaggagtatgagaccacccaggagtatgagcccgcccaggagcctgtgaagaagctggccaacagccggcgggccaagaggaccaagcccaacggccacatcgccaaccggctggaggtggacagcaacaccagcagccagagcagcaacagcgagagcgagacagaagatgagcgggtgggggaggacacccccttcctgggcatccagaaccccctggccgccagcctggaggccaccccagccttccggctggccgacagcaggaccaacccagctggccgcttcagcacccaggaggagatccaggcccggctgagctctgtgattgccaaccaggaccccatcgctgtgtag

SEQ ID NO: 3322 - DNA, 1947 bp, synthetic construct
  misc_feature 1..1947: note = source = /note="Description of Artificial Sequence: Synthetic coding sequence"
  source 1..1947: mol_type = other DNA
atgtctgagaggaaggagggccggggcaagggcaagggcaagaagaaggagcggggcagcggcaagaagccagagagcgctgctggcagccagagccctgccctgcccccccggctgaaggagatgaagagccaggagagcgctgctggcagcaagctggtgctgcgctgtgagaccagcagcgagtacagcagcctgcgcttcaagtggttcaagaatggaaatgagctgaacaggaagaacaagccccagaacatcaagatccagaagaagccaggcaagtctgagctgcgcatcaacaaggccagcctggccgacagcggggagtacatgtgcaaggtgatcagcaagctgggcaatgacagcgccagcgccaacatcaccatcgtggagagcaatgagatcatcaccggcatgcctgccagcacagaaggagcctacgtgagcagcgagagccccatccgcatctctgtgtccacagagggcgccaacaccagcagcagcaccagcaccagcaccaccggcaccagccacctggtgaagtgtgccgagaaggagaagaccttctgtgtgaatggaggagagtgcttcatggtgaaggacctgagcaaccccagccgctacctgtgcaagtgccagcccggcttcaccggggcccgctgcacagaaaatgtgcccatgaaggtgcagaaccaggagaagcacagcggggagcccttccctgaggccgaggagctgtaccagaagagggtgctgaccatcaccggcatctgcatcgccctgctggtggtgggcatcatgtgtgtggtggcctactgcaagaccaagaagcagaggaagaagctgcatgaccggctgcggcagagcctgcggtctgagaggaacaacatgatgaacatcgccaacggcccccaccaccccaaccccccaccagaaaatgtgcagctggtgaaccagtatgtgtccaagaatgtcatcagcagcgagcacatcgtggagcgggaggccgagaccagcttcagcaccagccactacaccagcacagcccaccacagcaccaccgtgacccagacccccagccacagctggagcaatggccacacagagagcatcctgtctgagagccacagcgtgattgtgatgagctctgtggagaacagccgccacagcagccccactggaggcccccggggccgcctgaatggaactggaggcccccgggagtgcaacagcttcctgcggcatgcccgggagaccccagacagctacagagacagcccccacagcgagcgctacgtgtctgccatgaccaccccagccaggatgagccctgtggacttccacacccccagcagccccaagagcccccccagcgagatgagcccccctgtgtcctccatgacagtgtccatgcccagcatggctgtgagccccttcatggaggaggagcggcccctgctgctggtgaccccaccccggctgcgggagaagaagtttgaccaccacccccagcagttcagcagcttccaccacaacccagcccatgacagcaacagcctgcctgccagccccctgagaattgtggaggatgaggagtatgagaccacccaggagtatgagcccgcccaggagcctgtgaagaagctggccaacagcagaagagccaagaggaccaagcccaacggccacatcgccaaccggctggaggtggacagcaacaccagcagccagagcagcaacagcgagagcgagacagaagatgagcgggtgggggaggacacccccttcctgggcatccagaaccccctggccgccagcctggaggccaccccagccttccggctggccgacagcaggaccaacccagctggccgcttcagcacccaggaggagatccaggcccggctgagcagcgtcatcgccaaccaggaccccatcgctgtgtag

SEQ ID NO: 3323 - DNA, 744 bp, synthetic construct
  misc_feature 1..744: note = source = /note="Description of Artificial Sequence: Synthetic coding sequence"
  source 1..744: mol_type = other DNA
atgtctgagaggaaggagggccggggcaagggcaagggcaagaagaaggagcggggcagcggcaagaagccagagagcgctgctggcagccagagccctgccctgcccccccggctgaaggagatgaagagccaggagagcgctgctggcagcaagctggtgctgcgctgtgagaccagcagcgagtacagcagcctgcgcttcaagtggttcaagaatggaaatgagctgaacaggaagaacaagccccagaacatcaagatccagaagaagccaggcaagtctgagctgcgcatcaacaaggccagcctggccgacagcggggagtacatgtgcaaggtgatcagcaagctgggcaatgacagcgccagcgccaacatcaccatcgtggagagcaatgagatcatcaccggcatgcctgccagcacagaaggagcctacgtgagcagcgagagccccatccgcatctctgtgtccacagagggcgccaacaccagcagcagcaccagcaccagcaccaccggcaccagccacctggtgaagtgtgccgagaaggagaagaccttctgtgtgaatggaggagagtgcttcatggtgaaggacctgagcaaccccagccgctacctgtgcaagtgccagcccggcttcaccggggcccgctgcacagaaaatgtgcccatgaaggtgcagaaccaggagagcgcccagatgagcctgctggtgattgctgccaagaccacctag

SEQ ID NO: 3324 - DNA, 1938 bp, synthetic construct
  misc_feature 1..1938: note = source = /note="Description of Artificial Sequence: Synthetic coding sequence"
  source 1..1938: mol_type = other DNA
atgtctgagaggaaggagggccggggcaagggcaagggcaagaagaaggagcggggcagcggcaagaagccagagagcgctgctggcagccagagccctgccctgcccccccggctgaaggagatgaagagccaggagagcgctgctggcagcaagctggtgctgcgctgtgagaccagcagcgagtacagcagcctgcgcttcaagtggttcaagaatggaaatgagctgaacaggaagaacaagccccagaacatcaagatccagaagaagccaggcaagtctgagctgcgcatcaacaaggccagcctggccgacagcggggagtacatgtgcaaggtgatcagcaagctgggcaatgacagcgccagcgccaacatcaccatcgtggagagcaatgagatcatcaccggcatgcctgccagcacagaaggagcctacgtgagcagcgagagccccatccgcatctctgtgtccacagagggcgccaacaccagcagcagcaccagcaccagcaccaccggcaccagccacctggtgaagtgtgccgagaaggagaagaccttctgtgtgaatggaggagagtgcttcatggtgaaggacctgagcaaccccagccgctacctgtgcaagtgccccaatgagttcaccggggaccgctgccagaactacgtgatggccagcttctacaagcacctgggcatcgagttcatggaggccgaggagctgtaccagaagagggtgctgaccatcaccggcatctgcatcgccctgctggtggtgggcatcatgtgtgtggtggcctactgcaagaccaagaagcagaggaagaagctgcatgaccggctgcggcagagcctgcggagtgaaagaaacaacatgatgaacatcgccaacggcccccaccaccccaaccccccaccagaaaatgtgcagctggtgaaccagtatgtgtccaagaatgtcatcagcagcgagcacatcgtggagcgggaggccgagaccagcttcagcaccagccactacaccagcacagcccaccacagcaccaccgtgacccagacccccagccacagctggagcaatggccacacagagagcatcctgtctgagagccacagcgtcatcgtgatgagctctgtggagaacagccgccacagcagccccaccggcggcccccggggccgcctgaatggcaccggcggcccccgggagtgcaacagcttcctgcggcatgcccgggagaccccagacagctacagagacagcccccacagcgagagatatgtgtctgccatgaccaccccagccaggatgagccctgtggacttccacacccccagcagccccaagagccccccatctgagatgagcccccctgtgtcctccatgacagtgtccatgcccagcatggctgtgagccccttcatggaggaggagcggcccctgctgctggtgaccccaccccggctgcgggagaagaagtttgaccaccacccccagcagttcagcagcttccaccacaacccagcccatgacagcaacagcctgcctgccagccccctgcgcatcgtggaggatgaggagtatgagaccacccaggagtatgagcccgcccaggagcctgtgaagaagctggccaacagccggcgggccaagaggaccaagcccaacggccacatcgccaaccggctggaggtggacagcaacaccagcagccagagcagcaacagcgagagcgagacagaagatgagcgggtgggggaggacacccccttcctgggcatccagaaccccctggccgccagcctggaggccaccccagccttccggctggccgacagcaggaccaacccagctggccgcttcagcacccaggaggagatccaggcccggctgagctctgtgattgccaaccaggaccccatcgctgtgtag

SEQ ID NO: 3325 - DNA, 1923 bp, synthetic construct; identical to SEQ ID NO: 3319
  misc_feature 1..1923: note = source = /note="Description of Artificial Sequence: Synthetic coding sequence"
  source 1..1923: mol_type = other DNA

SEQ ID NO: 3326 - DNA, 1773 bp, synthetic construct
  misc_feature 1..1773: note = source = /note="Description of Artificial Sequence: Synthetic coding sequence"
  source 1..1773: mol_type = other DNA
atgggcaagggccgggccggccgggtgggcaccacagccctgcccccccggctgaaggagatgaagagccaggagagcgctgctggcagcaagctggtgctgcgctgtgagaccagcagcgagtacagcagcctgcgcttcaagtggttcaagaatggaaatgagctgaacaggaagaacaagccccagaacatcaagatccagaagaagccaggcaagtctgagctgcgcatcaacaaggccagcctggccgacagcggggagtacatgtgcaaggtgatcagcaagctgggcaatgattctgccagcgccaacatcaccatcgtggagagcaatgccaccagcaccagcaccaccggcaccagccacctggtgaagtgtgccgagaaggagaagaccttctgtgtgaatggaggagagtgcttcatggtgaaggacctgagcaaccccagccgctacctgtgcaagtgccccaatgagttcaccggggaccgctgccagaactacgtgatggccagcttctacaagcacctgggcatcgagttcatggaggccgaggagctgtaccagaagagggtgctgaccatcaccggcatctgcatcgccctgctggtggtgggcatcatgtgtgtggtggcctactgcaagaccaagaagcagaggaagaagctgcatgaccggctgcggcagagcctgcggtctgagaggaacaacatgatgaacatcgccaacggcccccaccaccccaaccccccaccagaaaatgtgcagctggtgaaccagtatgtgtccaagaatgtcatcagcagcgagcacatcgtggagcgggaggccgagaccagcttcagcaccagccactacaccagcacagcccaccacagcaccaccgtgacccagacccccagccacagctggagcaatggccacacagagagcatcctgtctgagagccacagcgtgattgtgatgagctctgtggagaacagccgccacagcagccccactggaggcccccggggccgcctgaatggaactggaggcccccgggagtgcaacagcttcctgcggcatgcccgggagaccccagacagctacagagacagcccccacagcgagcgctacgtgtctgccatgaccaccccagccaggatgagccctgtggacttccacacccccagcagccccaagagcccccccagcgagatgagcccccctgtgtcctccatgacagtgtccatgcccagcatggctgtgagccccttcatggaggaggagcggcccctgctgctggtgaccccaccccggctgcgggagaagaagtttgaccaccacccccagcagttcagcagcttccaccacaacccagcccatgacagcaacagcctgcctgccagccccctgagaattgtggaggatgaggagtatgagaccacccaggagtatgagcccgcccaggagcctgtgaagaagctggccaacagcagaagagccaagaggaccaagcccaacggccacatcgccaaccggctggaggtggacagcaacaccagcagccagagcagcaacagcgagagcgagacagaagatgagcgggtgggggaggacacccccttcctgggcatccagaaccccctggccgccagcctggaggccaccccagccttccggctggccgacagcaggaccaacccagctggccgcttcagcacccaggaggagatccaggcccggctgagcagcgtcatcgccaaccaggaccccatcgctgtgtag

SEQ ID NO: 3327 - DNA, 1269 bp, synthetic construct
  misc_feature 1..1269: note = source = /note="Description of Artificial Sequence: Synthetic coding sequence"
  source 1..1269: mol_type = other DNA
atgcgctggaggcgggccccccggcgcagcggccggcccggcccccgggcccagaggcctggcagcgctgcccggagcagcccccccctgcccctgctgcccctgctgctgctgctgggcacagctgccctggcccctggagctgctgctggaaatgaggccgccccagctggggcctctgtgtgctacagcagcccccccagcgtgggctctgtgcaggagctggcccagagagctgctgtggtgattgagggcaaggtgcacccccagaggcggcagcagggcgccctggacaggaaggctgctgctgctgctggggaggccggggcctggggcggggaccgggagcccccagctgctggcccccgggccctgggccccccagctgaggagcccctgctggccgccaatggaacagtgcccagctggcccacagcccctgtgcccagcgctggggagcccggggaggaggccccctacctggtgaaggtgcaccaggtgtgggccgtgaaggccggcggcctgaagaaggacagcctgctgactgtgcggctgggcacctggggccacccagccttccccagctgtggccgcctgaaggaggacagccgctacatcttcttcatggagccagatgccaacagcaccagccgggccccagctgccttccgggccagcttcccccccctggagaccggcaggaacctgaagaaggaggtgtcccgggtgctgtgcaagagatgtgccctgcccccccggctgaaggagatgaagagccaggagagcgctgctggcagcaagctggtgctgcgctgtgagaccagcagcgagtacagcagcctgcgcttcaagtggttcaagaatggaaatgagctgaacaggaagaacaagccccagaacatcaagatccagaagaagccaggcaagtctgagctgcgcatcaacaaggccagcctggccgacagcggggagtacatgtgcaaggtgatcagcaagctgggcaatgattctgccagcgccaacatcaccatcgtggagagcaatgccaccagcaccagcaccaccggcaccagccacctggtgaagtgtgccgagaaggagaagaccttctgtgtgaatggaggagagtgcttcatggtgaaggacctgagcaaccccagccgctacctgtgcaagtgccccaatgagttcaccggggaccgctgccagaactacgtgatggccagcttctacagcaccagcacccccttcctgagcctgcctgagtag

SEQ ID NO: 3328 - DNA, 891 bp, synthetic construct
  misc_feature 1..891: note = source = /note="Description of Artificial Sequence: Synthetic coding sequence"
  source 1..891: mol_type = other DNA
atggagatctacagcccagacatgtctgaggtggccgctgagaggagcagcagccccagcacccagctgtctgctgaccccagcctggatggcctgcctgctgctgaggacatgcctgagccccagacagaagatggccgcaccccaggcctggtgggcctggccgtgccctgctgtgcctgcctggaggccgagcggctgcggggctgcctgaacagcgagaagatctgcatcgtgcccatcctggcctgcctggtgtccctgtgcctgtgcatcgccggcctgaagtgggtgtttgtggacaagatctttgaatatgacagccccacccacctggaccccggcggcctgggccaggaccccatcatcagcctggatgccacagctgccagcgctgtgtgggtgtcctctgaggcctacaccagccctgtgtcccgggcccagagcgagagcgaggtgcaggtgacagtgcagggcgacaaggctgtggtgtcctttgagcccagcgctgcccccacccccaagaaccgcatctttgccttctccttcctgcccagcacagcccccagcttccccagccccaccaggaaccctgaggtgaggacccccaagagcgccacccagccccagaccacagagaccaacctgcagacagcccccaagctgagcaccagcaccagcaccaccggcaccagccacctggtgaagtgtgccgagaaggagaagaccttctgtgtgaatggaggagagtgcttcatggtgaaggacctgagcaaccccagccgctacctgtgcaagtgccccaatgagttcaccggggaccgctgccagaactacgtgatggccagcttctacagcaccagcacccccttcctgagcctgcctgagtag

SEQ ID NO: 3329 - DNA, 1389 bp, synthetic construct
  misc_feature 1..1389: note = source = /note="Description of Artificial Sequence: Synthetic coding sequence"
  source 1..1389: mol_type = other DNA
atgtctgagaggaaggagggccggggcaagggcaagggcaagaagaaggagcggggcagcggcaagaagccagagagcgctgctggcagccagagccctgccctgcccccccggctgaaggagatgaagagccaggagagcgctgctggcagcaagctggtgctgcgctgtgagaccagcagcgagtacagcagcctgcgcttcaagtggttcaagaatggaaatgagctgaacaggaagaacaagccccagaacatcaagatccagaagaagccaggcaagtctgagctgcgcatcaacaaggccagcctggccgacagcggggagtacatgtgcaaggtgatcagcaagctgggcaatgacagcgccagcgccaacatcaccatcgtggagagcaatgagatcatcaccggcatgcctgccagcacagaaggagcctacgtgagcagcgagagccccatccgcatctctgtgtccacagagggcgccaacaccagcagcagcaccagcaccagcaccaccggcaccagccacctggtgaagtgtgccgagaaggagaagaccttctgtgtgaatggaggagagtgcttcatggtgaaggacctgagcaaccccagccgctacctgtgcaagtgccagcccggcttcaccggggcccgctgcacagaaaatgtgcccatgaaggtgcagaaccaggagaaggccgaggagctgtaccagaagagggtgctgaccatcaccggcatctgcatcgccctgctggtggtgggcatcatgtgtgtggtggcctactgcaagaccaagaagcagaggaagaagctgcatgaccggctgcggcagagcctgcggtctgagaggaacaacatgatgaacatcgccaacggcccccaccaccccaaccccccaccagaaaatgtgcagctggtgaaccagtatgtgtccaagaatgtcatcagcagcgagcacatcgtggagcgggaggccgagaccagcttcagcaccagccactacaccagcacagcccaccacagcaccaccgtgacccagacccccagccacagctggagcaatggccacacagagagcatcctgtctgagagccacagcgtgattgtgatgagctctgtggagaacagccgccacagcagccccactggaggcccccggggccgcctgaatggaactggaggcccccgggagtgcaacagcttcctgcggcatgcccgggagaccccagacagctacagagacagcccccacagcgagcggcacaacctgattgctgagctgcggaggaacaaggcccacaggagcaagtgcatgcagatccagctgagcgccacccacctgcggagcagcagcatcccccacctgggcttcatcctgtag

SEQ ID NO: 3330 - DNA, 1452 bp, synthetic construct
  misc_feature 1..1452: note = source = /note="Description of Artificial Sequence: Synthetic coding sequence"
  source 1..1452: mol_type = other DNA
atgcagatccccaagcacatcagcattgaggacatcacagccaccagcaccagcaccaccggcaccagccacctggtgaagtgtgccgagaaggagaagaccttctgtgtgaatggaggagagtgcttcatggtgaaggacctgagcaaccccagccgctacctgtgcaagtgccccaatgagttcaccggggaccgctgccagaactacgtgatggccagcttctacaaggccgaggagctgtaccagaagagggtgctgaccatcaccggcatctgcatcgccctgctggtggtgggcatcatgtgtgtggtggcctactgcaagaccaagaagcagaggaagaagctgcatgaccggctgcggcagagcctgcggagtgaaagaaacaacatgatgaacatcgccaacggcccccaccaccccaaccccccaccagaaaatgtgcagctggtgaaccagtatgtgtccaagaatgtcatcagcagcgagcacatcgtggagcgggaggccgagaccagcttcagcaccagccactacaccagcacagcccaccacagcaccaccgtgacccagacccccagccacagctggagcaatggccacacagagagcatcctgtctgagagccacagcgtcatcgtgatgagctctgtggagaacagccgccacagcagccccaccggcggcccccggggccgcctgaatggcaccggcggcccccgggagtgcaacagcttcctgcggcatgcccgggagaccccagacagctacagagacagcccccacagcgagagatatgtgtctgccatgaccaccccagccaggatgagccctgtggacttccacacccccagcagccccaagagccccccatctgagatgagcccccctgtgtcctccatgacagtgtccatgcccagcatggctgtgagccccttcatggaggaggagcggcccctgctgctggtgaccccaccccggctgcgggagaagaagtttgaccaccacccccagcagttcagcagcttccaccacaacccagcccatgacagcaacagcctgcctgccagccccctgcgcatcgtggaggatgaggagtatgagaccacccaggagtatgagcccgcccaggagcctgtgaagaagctggccaacagccggcgggccaagaggaccaagcccaacggccacatcgccaaccggctggaggtggacagcaacaccagcagccagagcagcaacagcgagagcgagacagaagatgagcgggtgggggaggacacccccttcctgggcatccagaaccccctggccgccagcctggaggccaccccagccttccggctggccgacagcaggaccaacccagctggccgcttcagcacccaggaggagatccaggcccggctgagctctgtgattgccaaccaggaccccatcgctgtgtag

SEQ ID NO: 3331 - DNA, 1263 bp, synthetic construct
  misc_feature 1..1263: note = source = /note="Description of Artificial Sequence: Synthetic coding sequence"
  source 1..1263: mol_type = other DNA
atgtctgagaggaaggagggccggggcaagggcaagggcaagaagaaggagcggggcagcggcaagaagccagagagcgctgctggcagccagagccctgccctgcccccccggctgaaggagatgaagagccaggagagcgctgctggcagcaagctggtgctgcgctgtgagaccagcagcgagtacagcagcctgcgcttcaagtggttcaagaatggaaatgagctgaacaggaagaacaagccccagaacatcaagatccagaagaagccaggcaagtctgagctgcgcatcaacaaggccagcctggccgacagcggggagtacatgtgcaaggtgatcagcaagctgggcaatgacagcgccagcgccaacatcaccatcgtggagagcaatgagatcatcaccggcatgcctgccagcacagaaggagcctacgtgagcagcgagagccccatccgcatctctgtgtccacagagggcgccaacaccagcagcagcaccagcaccagcaccaccggcaccagccacctggtgaagtgtgccgagaaggagaagaccttctgtgtgaatggaggagagtgcttcatggtgaaggacctgagcaaccccagccgctacctgtgcaagtgccccaatgagttcaccggggaccgctgccagaactacgtgatggccagcttctacaaggccgaggagctgtaccagaagagggtgctgaccatcaccggcatctgcatcgccctgctggtggtgggcatcatgtgtgtggtggcctactgcaagaccaagaagcagaggaagaagctgcatgaccggctgcggcagagcctgcggagtgaaagaaacaacatgatgaacatcgccaacggcccccaccaccccaaccccccaccagaaaatgtgcagctggtgaaccagtatgtgtccaagaatgtcatcagcagcgagcacatcgtggagcgggaggccgagaccagcttcagcaccagccactacaccagcacagcccaccacagcaccaccgtgacccagacccccagccacagctggagcaatggccacacagagagcatcctgtctgagagccacagcgtcatcgtgatgagctctgtggagaacagccgccacagcagccccaccggcggcccccggggccgcctgaatggcaccggcggcccccgggagtgcaacagcttcctgcggcatgcccgggagaccccagacagctacagagacagcccccacagcgagaggtag

SEQ ID NO: 3332 - DNA, 1065 bp, synthetic construct
  misc_feature 1..1065: note = source = /note="Description of Artificial Sequence: Synthetic coding sequence"
  source 1..1065: mol_type = other DNA
atgctgttcaacctgcgcatcctgctgaacaatgctgccttcagaaatggccacaacttcatggtgaggaacttccgctgtggccagcccctgcagaacaaggtgcagctgaagggccgggacctgctgaccctgaagaacttcaccggggaggagatcaagtacatgctgtggctgtctgctgacctgaagttccgcatcaagcagaagggggagtacctgcccctgctgcagggcaagagcctgggcatgatctttgagaagaggagcaccaggacccggctgagcacagaaacaggctttgccctgctgggcggccacccctgcttcctgaccacccaggacatccacctgggcgtgaatgaaagcctgacagacacagcccgggtgctgagctccatggctgatgctgtgctggcccgggtgtacaagcagagcgacctggacaccctggccaaggaggccagcatccccatcatcaatggcctgagtgacctgtaccaccccatccagatcctggccgactacctgaccctgcaggagcactacagcagcctgaagggcctgaccctgtcctggattggagatggcaacaacatcctgcacagcatcatgatgtctgctgccaagtttggcatgcacctgcaggccgccacccccaagggctatgagccagatgcctctgtgaccaagctggccgagcagtatgccaaggaaaatggcaccaagctgctgctgaccaatgaccccctggaggccgcccatggaggaaatgtgctgatcacagacacctggatctccatgggccaggaggaggagaagaagaagaggctgcaggccttccagggctaccaggtgaccatgaagacagccaaggtggccgccagtgactggaccttcctgcactgcctgcccaggaagccagaggaggtggatgatgaggtgttctacagccccaggagcctggtgtttcctgaggccgagaacaggaagtggaccatcatggctgtgatggtgtccctgctgacagactacagcccccagctgcagaagcccaagttctag

SEQ ID NO: 3333 - DNA, 348 bp, synthetic construct
  misc_feature 1..348: note = source = /note="Description of Artificial Sequence: Synthetic coding sequence"
  source 1..348: mol_type = other DNA
atgatcccagccaaggacatggccaaggtgatgattgtgatgctggccatctgcttcctgaccaagagtgatggcaagtctgtgaagaagaggtctgtgtctgagatccagctgatgcacaacctgggcaagcacctgaacagcatggagcgggtggagtggctgaggaagaagctgcaggatgtgcacaactttgtggccctgggcgcccccctggcccccagagatgctggcagccagaggcccaggaagaaggaggacaacgtgctggtggagagccatgagaagagcctgggggaggccgacaaggcagatgtgaatgtgctgaccaaggccaagagccagtag

SEQ ID NO: 3334 - DNA, 348 bp, synthetic construct; identical to SEQ ID NO: 3333
  misc_feature 1..348: note = source = /note="Description of Artificial Sequence: Synthetic coding sequence"
  source 1..348: mol_type = other DNA

SEQ ID NO: 3335 - DNA, 354 bp, synthetic construct
  misc_feature 1..354: note = source = /note="Description of Artificial Sequence: Synthetic coding sequence"
  source 1..354: mol_type = other DNA
atgagcacagctgtgctggagaaccctggcctgggcaggaagctgagtgactttggccaggagaccagctacatcgaggacaactgcaaccagaatggagccatcagcctcatcttcagcctgaaggaggaggtgggcgccctggccaaggtgctgcggctgtttgaagaaaatgatgtgaacctgacccacatcgagagccggcccagccggctgaagaaggatgaatatgagttcttcacccacctggacaagaggagcctgcctgccctgaccaacatcatcaagatcctgcggcatgacatcggggccaccgtgcatgagctgagccgggacaagaagaaggacacctag

SEQ ID NO: 3336 - DNA, 411 bp, synthetic construct
  misc_feature 1..411: note = source = /note="Description of Artificial Sequence: Synthetic coding sequence"
  source 1..411: mol_type = other DNA
atgagcacagctgtgctggagaaccctggcctgggcaggaagctgagtgactttggccaggagaccagctacatcgaggacaactgcaaccagaatggagccatcagcctcatcttcagcctgaaggaggaggtgggcgccctggccaaggtgctgcggctgtttgaagaaaatgatgtgaacctgacccacatcgagagccggcccagccggctgaagaaggatgaatatgagttcttcacccacctggacaagaggagcctgcctgccctgaccaacatcatcaagatcctgcggcatgacatcggggccaccgtgcatgagctgagccgggacaagaagaaggacacagtgccctggttccccaggaccatccaggagctggacagatttgccaaccagatcctgtag

SEQ ID NO: 3337 - DNA, 1359 bp, synthetic construct
  misc_feature 1..1359: note = source = /note="Description of Artificial Sequence: Synthetic coding sequence"
  source 1..1359: mol_type = other DNA
atgagcacagctgtgctggagaaccctggcctgggcaggaagctgagtgactttggccaggagaccagctacatcgaggacaactgcaaccagaatggagccatcagcctcatcttcagcctgaaggaggaggtgggcgccctggccaaggtgctgcggctgtttgaagaaaatgatgtgaacctgacccacatcgagagccggcccagccggctgaagaaggatgaatatgagttcttcacccacctggacaagaggagcctgcctgccctgaccaacatcatcaagatcctgcggcatgacatcggggccaccgtgcatgagctgagccgggacaagaagaaggacacagtgccctggttccccaggaccatccaggagctggacagatttgccaaccagatcctgtcctatggagctgagctggatgctgaccaccctggcttcaaggaccctgtgtaccgggcccggaggaagcagtttgctgacatcgcctacaactaccgccacggccagcccatcccccgggtggagtacatggaggaggagaagaagacctggggcaccgtcttcaagaccctgaagagcctgtacaagacccacgcctgctatgagtacaaccacatcttccccctgctggagaagtactgcggcttccacgaggacaacatcccccagctggaggatgtgtcccagttcctgcagacctgcaccggcttccggctgcggcctgtggccggcctgctgagcagccgggacttcctgggcggcctggccttccgggtcttccactgcacccagtacatcagacatggcagcaagcccatgtacaccccagagccagacatctgccacgagctgctgggccacgtgcccctcttcagtgacaggagctttgcccagttcagccaggagatcggcctggccagcctgggcgccccagatgagtacatcgagaagctggccaccatctactggttcaccgtggagtttggcctgtgcaagcagggcgacagcatcaaggcctatggagctggcctgctgagcagctttggagagctgcagtactgcctgtctgagaagcccaagctgctgcccctggagctggagaagacagccatccagaactacacagtgacagagttccagcccctgtactacgtggccgagagcttcaatgatgccaaggagaaggtgaggaactttgctgccaccatcccccggcccttctctgtgcgctatgacccctacacccagagaattgaggtgctggacaacacccagcagctgaagatcctggccgacagcatcaacagcgagatcggcatcctgtgcagcgccctgcagaagatcaagtag

SEQ ID NO: 3338 - DNA, 3261 bp, synthetic construct
  misc_feature 1..3261: note = source = /note="Description of Artificial Sequence: Synthetic coding sequence"
  source 1..3261: mol_type = other DNA
atggcctgcagcccagatgctgtggtgagccccagcagcgccttcctgcggagcggctctgtgtatgagcccctgaagagcatcaacctgcccaggccagacaatgagaccctgtgggacaagctggaccactactaccgcatcgtgaagagcaccctgctgctgtaccagagccccaccaccggcctcttccccaccaagacctgtggcggggaccagaaggccaagatccaggacagcctgtactgtgccgccggggcctgggccctggccctggcctacagaagaattgatgatgacaagggccgcacccatgagctggagcacagcgccatcaagtgcatgaggggcatcctgtactgctacatgaggcaggccgacaaggtgcagcagttcaagcaggacccccggcccaccacctgcctgcacagcgtcttcaacgtgcacactggagatgagctgctgtcctatgaggagtatggccacctgcagatcaatgctgtgtccctgtacctgctgtacctggtggagatgatcagcagcggcctgcagatcatctacaacacagatgaggtgtccttcatccagaacctggtgttctgtgtggagcgggtgtacagagtgcctgactttggagtgtgggagcggggcagcaagtacaacaacggcagcacagagctgcacagcagctctgtgggcctggccaaggccgccctggaggccatcaatggcttcaacctgtttggaaaccagggctgctcctggagcgtcatctttgtggacctggatgcccacaacagaaaccggcagaccctgtgcagcctgctgccccgggagagccgcagccacaacacagatgctgccctgctgccctgcatctcctacccagcctttgccctggatgatgaggtgctcttcagccagaccctggacaaggtggtgaggaagctgaagggcaagtatggcttcaagcgcttcctgagagatggctaccgcaccagcctggaggaccccaaccgctgctactacaagccagctgagatcaagctgtttgatggcattgaatgtgagttccccatcttcttcctgtacatgatgattgatggagtcttccggggcaaccccaagcaggtgcaggagtaccaggacctgctgacccctgtgctgcaccacaccacagagggctaccctgtggtgcccaagtactactacgtgcctgctgactttgtggagtatgagaagaacaaccctggcagccagaagcgcttccccagcaactgtggcagagatggcaagctgttcctgtggggccaggccctgtacatcatcgccaagctgctggctgatgagctgatcagccccaaggacattgatcctgtgcagagatatgtgcccctgaaggaccagagaaatgtgtccatgaggttcagcaaccagggccccctggagaatgacctggtggtgcacgtggccctgattgctgagagccagaggctgcaggtgttcctgaacacctacggcatccagacccagaccccccagcaggtggagcccatccagatctggccccagcaggagctggtgaaggcctacctgcagctgggcatcaatgagaagctgggcctgagcggccgcccagaccggcccatcggctgcctgggcaccagcaagatctaccgcatcctgggcaagacagtggtgtgctaccccatcatctttgacctgagtgacttctacatgagccaggatgtgttcctgctgattgatgacatcaagaatgccctgcagttcatcaagcagtactggaagatgcacggccggcccctcttcctggtgctgatccgggaggacaacatccggggcagccgcttcaaccccatcctggacatgctggccgccctgaagaagggcatcattggaggagtgaaggtgcacgtggaccggctgcagaccctcatcagcggggctgtggtggagcagctggacttcctgcgcatcagtgacacagaggagctgcctgagttcaagagctttgaggagctggagccccccaagcacagcaaggtgaagaggcagagcagcaccccatctgcccctgagctgggccagcagccagatgtgaacatcagcgagtggaaggacaagcccacccatgagatcctgcagaagctgaatgactgcagctgcctggccagccaggccatcctgctgggcatcctgctgaagcgggagggccccaacttcatcaccaaggagggcaccgtgtctgaccacatcgagcgggtgtaccgccgggccggcagccagaagctgtggagcgtggtgcggcgggccgccagcctgctgagcaaggtggtggacagcctggcccccagcatcaccaacgtgctggtgcagggcaagcaggtgaccctgggcgccttcggccacgaggaggaggtgatcagcaaccccctgagccccagggtcatccagaacatcatctactacaagtgcaacacccatgatgagcgggaggccgtcatccagcaggagctggtgatccacatcggctggatcatcagcaacaaccctgagctgttcagcggcatgctgaagatcagaattggctggatcatccacgccatggagtatgagctgcagatccggggcggggacaagccagccctggacctgtaccagctgagccccagcgaggtgaagcagctgctgctggacatcctgcagccccagcagaatggccgctgctggctgaacagacggcagattgatggcagcctgaacagaacacccaccggcttctatgacagagtgtggcagatcctggagaggaccccaaatggcatcatcgtggccggcaagcacctgccccagcagcccaccctgagtgacatgaccatgtatgagatgaacttcagcctgctggtggaggacaccctgggcaacatcgaccagccccagtaccggcagatcgtggtggagctgctgatggtggtgtccatcgtgctggagagaaatcctgagctggagttccaggacaaggtggacctggaccggctggtgaaggaggccttcaatgagttccagaaggaccagagccggctgaaggagattgagaagcaggatgacatgaccagcttctacaacaccccacccctgggcaagaggggcacctgcagctacctgaccaaggctgtgatgaacctgctgctggagggggaggtgaagcccaacaatgatgacccctgcctgatctcctag

SEQ ID NO: 3339 - DNA, 1221 bp, synthetic construct
  misc_feature 1..1221: note = source = /note="Description of Artificial Sequence: Synthetic coding sequence"
  source 1..1221: mol_type = other DNA
atgaccctggatgtgggcccagaagatgagctgcctgactgggccgccgccaaggagttctaccagaagtatgaccccaaggatgtgattggccggggcgtgtcctctgtggtgagaagatgtgtgcaccgggccaccggccacgagtttgctgtgaagatcatggaggtgacagctgagcggctgagccctgagcagctggaggaggtgcgggaggccacccggcgggagacccacatcctgcggcaggtggccggccacccccacatcatcaccctgattgacagctatgagagcagcagcttcatgttcctggtgtttgacctgatgaggaagggggagctgtttgactacctgacagagaaggtggccctgtctgagaaggagaccaggagcatcatgaggagcctgctggaggccgtgtccttcctgcacgccaacaacatcgtgcaccgggacctgaagccagagaacatcctgctggatgacaacatgcagatccggctgagtgactttggcttcagctgccacctggagcccggggagaagctgcgggagctgtgtggcaccccaggctacctggcccctgagatcctgaagtgcagcatggatgagacccaccctggctacggcaaggaggtggacctgtgggcctgtggggtcatcctcttcaccctgctggccggcagcccccccttctggcaccggcggcagatcctgatgctgaggatgatcatggagggccagtaccagttcagcagccctgagtgggatgacaggagcagcacagtgaaggacctgatcagccggctgctgcaggtggaccctgaggcccggctgacagctgagcaggccctgcagcaccccttctttgagcgctgtgagggcagccagccctggaacctgaccccccggcagcgcttccgggtggccgtgtggacagtgctggccgccggccgggtggccctgagcacccaccgggtgcggcccctgaccaagaatgccctgctgcgggacccctatgccctgcggtctgtgcgccacctgattgacaactgtgccttccggctgtatggccactgggtgaagaagggggagcagcagaacagagctgccctcttccagcaccggcccccaggccccttccccatcatgggccctgaggaggagggggacagcgctgccatcacagaagatgaagctgtgctggtgctgggctag

SEQ ID NO: 3340 - DNA, 3708 bp, synthetic construct
  misc_feature 1..3708: note = source = /note="Description of Artificial Sequence: Synthetic coding sequence"
  source 1..3708: mol_type = other DNA
atgaggagccgcagcaacagcggcgtgcggctggatggctacgcccggctggtgcagcagaccatcctgtgctaccagaaccctgtgacaggcctgctgagcgccagccatgagcagaaggatgcctgggtgcgggacaacatctacagcatcctggccgtgtggggcctgggcatggcctacaggaagaatgctgacagagatgaggacaaggccaaggcctatgagctggagcagaatgtggtgaagctgatgaggggcctgctgcagtgcatgatgaggcaggtggccaaggtggagaagttcaagcacacccagagcaccaaggacagcctgcacgccaagtacaacacagccacctgtggcaccgtggtgggagatgaccagtggggccacctgcaggtggatgccaccagcctcttcctgctcttcctggcccagatgacagccagcggcctgcgcatcatcttcaccctggatgaggtggccttcatccagaacctggtgttctacatcgaggccgcctacaaggtggccgactatggcatgtgggagcggggggacaagaccaaccagggcatccctgagctgaatgccagctctgtgggcatggccaaggccgccctggaggccattgatgagctggacctgtttggagcccatggaggcaggaagagcgtcatccacgtgctgcctgatgaggtggagcactgccagagcatcctcttctccatgctgccccgggccagcaccagcaaggagattgatgctggcctgctgagcatcatctccttccctgcctttgctgtggaggatgtgaacctggtgaatgtgaccaagaatgagatcatcagcaagctgcagggccgctatggctgctgccgcttcctgagagatggctacaagaccccccgggaggaccccaaccggctgcactatgaccctgctgagctgaagctgtttgagaacattgaatgtgagtggcctgtgttctggacctacttcatcattgatggagtcttctctggagatgctgtgcaggtgcaggagtaccgggaggccctggagggcatcctgatccggggcaagaatggcatccggctggtgcctgagctgtatgctgtgccccccaacaaggtggatgaggagtacaagaacccccacacagtggacagagtgcccatgggcaaggtgccccacctgtggggccagagcctgtacatcctgagcagcctgctggccgagggcttcctggccgccggggagattgaccccctgaacagacgcttcagcacctctgtgaagccagatgtggtggtgcaggtgacagtgctggccgagaacaaccacatcaaggacctgctgaggaagcacggcgtgaatgtgcagagcattgctgacatccaccccatccaggtgcagcccggccgcatcctgagccacatctatgccaagctgggcaggaacaagaacatgaacctgagcggccggccctaccgccacatcggcgtgctgggcaccagcaagctgtatgtgatccggaaccagatcttcaccttcaccccccagttcacagaccagcaccacttctacctggccctggacaatgagatgattgtggagatgctgagaattgagctggcctacctgtgcacctgctggaggatgacaggccggcccaccctgaccttccccatcagcaggaccatgctgaccaatgatggcagtgacatccacagcgctgtgctgagcaccatcaggaagctggaggatggctactttggaggagcccgggtgaagctgggcaacctgtctgagttcctgaccaccagcttctacacctacctgaccttcctggaccctgactgtgatgagaagctgtttgacaatgccagcgagggcaccttctccccagacagcgacagcgacctggtgggctacctggaggacacctgcaaccaggagagccaggatgagctggaccactacatcaaccacctgctgcagagcaccagcctgcggagctacctgccccccctgtgcaagaacacagaagatagacatgtgttttctgccatccacagcacccgggacatcctgtctgtgatggccaaggccaagggcctggaggtgccctttgtgcccatgaccctgcccaccaaggtgctgagcgcccacaggaagagcctgaacctggtggacagcccccagcccctgctggagaaggtgcctgagagtgacttccagtggcccagagatgaccatggagatgtggactgtgagaagctggtggagcagctgaaggactgcagcaacctgcaggaccaggccgacatcctgtacatcctgtatgtgatcaagggccccagctgggacaccaacctgagcggccagcacggcgtgacagtgcagaacctgctgggggagctgtatggcaaggccggcctgaaccaggagtggggcctcatccgctacatcagcggcctgctgaggaagaaggtggaggtgctggccgaggcctgcacagacctgctgagccaccagaagcagctgactgtgggcctgcccccagagccccgggagaagatcatcagcgcccccctgcccccagaggagctgaccaagctgatctatgaggccagcggccaggacatcagcattgctgtgctgacccaggagatcgtggtgtacctggccatgtatgtgcgggcccagcccagcctgtttgtggagatgctgcggctgagaattggcctcatcatccaggtgatggccacagagctggcccggagcctgaactgcagcggggaggaggccagcgagagcctgatgaacctgagcccctttgacatgaagaacctgctgcaccacatcctgagcggcaaggagtttggagtggagaggtctgtgcggcccatccacagcagcaccagcagccccaccatcagcatccacgaggtgggccacactggagtgaccaagacagagaggagcggcatcaaccggctgcggtctgagatgaagcagatgacccggcgcttcagcgcagatgagcagttcttctctgtgggccaggccgccagcagcagcgcccacagcagcaagagcgcccggagcagcacccccagcagccccaccggcaccagcagcagtgacagcggcggccaccacatcggctggggcgagcggcagggccagtggctgcggcggcggcggctggatggagccatcaacagagtgcctgtgggcttctaccagagggtgtggaagatcctgcagaagtgccacggcctgagcattgatggctacgtgctgcccagcagcaccacccgggagatgacccctcatgagatcaagtttgctgtgcacgtggagagcgtgctgaacagagtgccccagcctgagtaccggcagctgctggtggaggccatcatggtgctgaccctgctgagtgacacagagatgaccagcatcggcggcatcatccacgtggaccagatcgtgcagatggccagccagctgttcctgcaggaccaggtgtccatcggggccatggacaccctggagaaggaccaggccaccggcatctgccacttcttctatgattctgcccccagcggggcctacggcaccatgacctacctgaccagggctgtggccagctacctgcaggagctgctgcccaacagcggctgccagatgcagtag

SEQ ID NO: 3341 - DNA, 3261 bp, synthetic construct; identical to SEQ ID NO: 3338
  misc_feature 1..3261: note = source = /note="Description of Artificial Sequence: Synthetic coding sequence"
  source 1..3261: mol_type = other DNA

SEQ ID NO: 3342 - DNA, 3282 bp, synthetic construct
  misc_feature 1..3282: note = source = /note="Description of Artificial Sequence: Synthetic coding sequence"
  source 1..3282: mol_type = other DNA
atggccggggctgctggcctgacagctgaggtgtcctggaaggtgctggagcggcgggcccggaccaagaggagcggctctgtgtatgagcccctgaagagcatcaacctgcccaggccagacaatgagaccctgtgggacaagctggaccactactacagaattgtgaagagcaccctgctgctgtaccagagccccaccaccggcctcttccccaccaagacctgtggcggggaccagaaggccaagatccaggacagcctgtactgtgccgccggggcctgggccctggccctggcctacagaagaattgatgatgacaagggccgcacccatgagctggagcacagcgccatcaagtgcatgaggggcatcctgtactgctacatgaggcaggccgacaaggtgcagcagttcaagcaggacccccggcccaccacctgcctgcacagcgtcttcaacgtgcacactggagatgagctgctgtcctatgaggagtatggccacctgcagatcaatgctgtgtccctgtacctgctgtacctggtggagatgatcagcagcggcctgcagatcatctacaacacagatgaggtgtccttcatccagaacctggtgttctgtgtggagcgggtgtacagagtgcctgactttggagtgtgggagcggggcagcaagtacaacaacggcagcacagagctgcacagcagctctgtgggcctggccaaggccgccctggaggccatcaatggcttcaacctgtttggaaaccagggctgctcctggagcgtcatctttgtggacctggatgcccacaacagaaaccggcagaccctgtgcagcctgctgccccgggagagccgcagccacaacacagatgctgccctgctgccctgcatctcctacccagcctttgccctggatgatgaggtgctcttcagccagaccctggacaaggtggtgaggaagctgaagggcaagtatggcttcaagcgcttcctgagagatggctaccgcaccagcctggaggaccccaaccgctgctactacaagccagctgagatcaagctgtttgatggcattgaatgtgagttccccatcttcttcctgtacatgatgattgatggagtcttccggggcaaccccaagcaggtgcaggagtaccaggacctgctgacccctgtgctgcaccacaccacagagggctaccctgtggtgcccaagtactactacgtgcctgctgactttgtggagtatgagaagaacaaccctggcagccagaagcgcttccccagcaactgtggcagagatggcaagctgttcctgtggggccaggccctgtacatcatcgccaagctgctggctgatgagctgatcagccccaaggacatcgaccctgtgcagcgctacgtgcccctgaaggaccagagaaatgtgtccatgaggttcagcaaccagggccccctggagaatgacctggtggtgcacgtggccctgattgctgagagccagaggctgcaggtgttcctgaacacctacggcatccagacccagaccccccagcaggtggagcccatccagatctggccccagcaggagctggtgaaggcctacctgcagctgggcatcaatgagaagctgggcctgagcggccgcccagaccggcccatcggctgcctgggcaccagcaagatctaccgcatcctgggcaagacagtggtgtgctaccccatcatctttgacctgagtgacttctacatgagccaggatgtgttcctgctgattgatgacatcaagaatgccctgcagttcatcaagcagtactggaagatgcacggccggcccctcttcctggtgctgatccgggaggacaacatccggggcagccgcttcaaccccatcctggacatgctggccgccctgaagaagggcatcatcggcggcgtgaaggtgcacgtggaccggctgcagaccctcatctctggagctgtggtggagcagctggacttcctgcgcatcagtgacacagaggagctgcctgagttcaagagctttgaggagctggagccccccaagcacagcaaggtgaagaggcagagcagcacccccagcgcccctgagctgggccagcagccagatgtgaacatcagcgagtggaaggacaagcccacccatgagatcctgcagaagctgaatgactgcagctgcctggccagccaggccatcctgctgggcatcctgctgaagcgggagggccccaacttcatcaccaaggagggcaccgtgtctgaccacatcgagcgggtgtacagaagagctggcagccagaagctgtggctggccgtgcgctacggggccgccttcacccagaagttcagcagcagcatcgccccccacatcaccaccttcctggtgcacggcaagcaggtgaccctgggcgcctttggacatgaggaggaggtgatcagcaaccccctgagccccagggtcatccagaacatcatctactacaagtgcaacacccatgatgagcgggaggccgtcatccagcaggagctggtgatccacatcggctggatcatcagcaacaaccctgagctgttcagcggcatgctgaagatccgcatcggctggatcatccacgccatggagtatgagctgcagatccggggcggggacaagccagccctggacctgtaccagctgagccccagcgaggtgaagcagctgctgctggacatcctgcagccccagcagaatggccgctgctggctgaacagacggcagattgatggcagcctgaacagaacacccaccggcttctatgacagagtgtggcagatcctggagaggacccccaacggcatcatcgtggccggcaagcacctgccccagcagcccaccctgagtgacatgaccatgtatgagatgaacttcagcctgctggtggaggacaccctgggcaacatcgaccagccccagtaccggcagatcgtggtggagctgctgatggtggtgtccatcgtgctggagaggaaccctgagctggagttccaggacaaggtggacctggaccggctggtgaaggaggccttcaatgagttccagaaggaccagagccggctgaaggagattgagaagcaggatgacatgaccagcttctacaacaccccacccctgggcaagaggggcacctgcagctacctgaccaaggctgtgatgaacctgctgctggagggggaggtgaagcccaacaatgatgacccctgcctgatctcctag

SEQ ID NO: 3343 - DNA, 3261 bp, synthetic construct
  misc_feature 1..3261: note = source = /note="Description of Artificial Sequence: Synthetic coding sequence"
  source 1..3261: mol_type = other DNA
atggcctgcagcccagatgctgtggtgagccccagcagcgccttcctgcggagcggctctgtgtatgagcccctgaagagcatcaacctgcccaggccagacaatgagaccctgtgggacaagctggaccactactaccgcatcgtgaagagcaccctgctgctgtaccagagccccaccaccggcctcttccccaccaagacctgtggcggggaccagaaggccaagatccaggacagcctgtactgtgccgccggggcctgggccctggccctggcctacagaagaattgatgatgacaagggccgcacccatgagctggagcacagcgccatcaagtgcatgaggggcatcctgtactgctacatgaggcaggccgacaaggtgcagcagttcaagcaggacccccggcccaccacctgcctgcacagcgtcttcaacgtgcacactggagatgagctgctgtcctatgaggagtatggccacctgcagatcaatgctgtgtccctgtacctgctgtacctggtggagatgatcagcagcggcctgcagatcatctacaacacagatgaggtgtccttcatccagaacctggtgttctgtgtggagcgggtgtacagagtgcctgactttggagtgtgggagcggggcagcaagtacaacaacggcagcacagagctgcacagcagctctgtgggcctggccaaggccgccctggaggccatcaatggcttcaacctgtttggaaaccagggctgctcctggagcgtcatctttgtggacctggatgcccacaacagaaaccggcagaccctgtgcagcctgctgccccgggagagccgcagccacaacacagatgctgccctgctgccctgcatctcctacccagcctttgccctggatgatgaggtgctcttcagccagaccctggacaaggtggtgaggaagctgaagggcaagtatggcttcaagcgcttcctgagagatggctaccgcaccagcctggaggaccccaaccgctgctactacaagccagctgagatcaagctgtttgatggcattgaatgtgagttccccatcttcttcctgtacatgatgattgatggagtcttccggggcaaccccaagcaggtgcaggagtaccaggacctgctgacccctgtgctgcaccacaccacagagggctaccctgtggtgcccaagtactactacgtgcctgctgactttgtggagtatgagaagaacaaccctggcagccagaagcgcttccccagcaactgtggcagagatggcaagctgttcctgtggggccaggccctgtacatcatcgccaagctgctggctgatgagctgatcagccccaaggacattgatcctgtgcagagatatgtgcccctgaaggaccagagaaatgtgtccatgaggttcagcaaccagggccccctggagaatgacctggtggtgcacgtggccctgattgctgagagccagaggctgcaggtgttcctgaacacctacggcatccagacccagaccccccagcaggtggagcccatccagatctggccccagcaggagctggtgaaggcctacctgcagctgggcatcaatgagaagctgggcctgagcggccgcccagaccggcccatcggctgcctgggcaccagcaagatctaccgcatcctgggcaagacagtggtgtgctaccccatcatctttgacctgagtgacttctacatgagccaggatgtgttcctgctgattgatgacatcaagaatgccctgcagttcatcaagcagtactggaagatgcacggccggcccctcttcctggtgctgatccgggaggacaacatccggggcagccgcttcaaccccatcctggacatgctggccgccctgaagaagggcatcattggaggagtgaaggtgcacgtggaccggctgcagaccctcatcagcggggctgtggtggagcagctggacttcctgcgcatcagtgacacagaggagctgcctgagttcaagagctttgaggagctggagccccccaagcacagcaaggtgaagaggcagagcagcaccccatctgcccctgagctgggccagcagccagatgtgaacatcagcgagtggaaggacaagcccacccatgagatcctgcagaagctgaatgactgcagctgcctggccagccaggccatcctgctgggcatcctgctgaagcgggagggccccaacttcatcaccaaggagggcaccgtgtctgaccacatcgagcgggtgtaccgccgggccggcagccagaagctgtggctggccgtgcgctatggagctgccttcacccagaagttcagcagcagcatcgccccccacatcaccaccttcctggtgcacggcaagcaggtgaccctgggcgccttcggccacgaggaggaggtgatcagcaaccccctgagccccagggtcatccagaacatcatctactacaagtgcaacacccatgatgagcgggaggccgtcatccagcaggagctggtgatccacatcggctggatcatcagcaacaaccctgagctgttcagcggcatgctgaagatcagaattggctggatcatccacgccatggagtatgagctgcagatccggggcggggacaagccagccctggacctgtaccagctgagccccagcgaggtgaagcagctgctgctggacatcctgcagccccagcagaatggccgctgctggctgaacagacggcagattgatggcagcctgaacagaacacccaccggcttctatgacagagtgtggcagatcctggagaggaccccaaatggcatcatcgtggccggcaagcacctgccccagcagcccaccctgagtgacatgaccatgtatgagatgaacttcagcctgctggtggaggacaccctgggcaacatcgaccagccccagtaccggcagatcgtggtggagctgctgatggtggtgtccatcgtgctggagagaaatcctgagctggagttccaggacaaggtggacctggaccggctggtgaaggaggccttcaatgagttccagaaggaccagagccggctgaaggagattgagaagcaggatgacatgaccagcttctacaacaccccacccctgggcaagaggggcacctgcagctacctgaccaaggctgtgatgaacctgctgctggagggggaggtgaagcccaacaatgatgacccctgcctgatctcctag

SEQ ID NO: 3344 - DNA, 1221 bp, synthetic construct; identical to SEQ ID NO: 3339
  misc_feature 1..1221: note = source = /note="Description of Artificial Sequence: Synthetic coding sequence"
  source 1..1221: mol_type = other DNA

SEQ ID NO: 3345 - DNA, 1125 bp, synthetic construct
  misc_feature 1..1125: note = source = /note="Description of Artificial Sequence: Synthetic coding sequence"
  source 1..1125: mol_type = other DNA
atgaccctggatgtgggcccagaagatgagctgcctgactgggccgccgccaaggagttctaccagaagtatgaccccaaggatgtgattggccggggcgtgtcctctgtggtgagaagatgtgtgcaccgggccaccggccacgagtttgctgtgaagatcatggaggtgacagctgagcggctgagccctgagcagctggaggaggtgcgggaggccacccggcgggagacccacatcctgcggcaggtggccggccacccccacatcatcaccctgattgacagctatgagagcagcagcttcatgttcctggtgtttgacctgatgaggaagggggagctgtttgactacctgacagagaaggtggccctgtctgagaaggagaccaggagcatcatgaggagcctgctggaggccgtgtccttcctgcacgccaacaacatcgtgcaccgggacctgaagccagagaacatcctgctggatgacaacatgcagatccggctgagtgactttggcttcagctgccacctggagcccggggagaagctgcgggagctgtgtggcaccccaggctacctggcccctgagatcctgaagtgcagcatggatgagacccaccctggctacggcaaggaggtggacctgtgggcctgtggggtcatcctcttcaccctgctggccggcagcccccccttctggcaccggcggcagatcctgatgctgaggatgatcatggagggccagtaccagttcagcagccctgagtgggatgacaggagcagcacagtgaaggacctgatcagccggctgctgcaggtggaccctgaggcccggctgacagctgagcaggccctgcagcaccccttctttgagcgctgtgagggcagccagccctggaacctgaccccccggcagcgcttccgggtggccgtgtggacagtgctggccgccggccgggtggccctgagcacccaccgggtgcggcccctgaccaagaatgccctgctgcgggacccctatgccctgcggtctgtgcgccacctgattgacaactgtgccttccggctgtatggccactggatcaggaagcagtggattggcaagctgatggcctgtgtgtag

SEQ ID NO: 3346 - DNA, 3999 bp, synthetic construct
  misc_feature 1..3999: note = source = /note="Description of Artificial Sequence: Synthetic coding sequence"
  source 1..3999: mol_type = other DNA
atgcagcaggccccccagccctatgagttcttcagcgaggagaacagccccaagtggaggggcctgctggtgtctgccctgaggaaggtgcaggagcaggtgcaccccaccctgagcgccaatgaggagagcctgtactacatcgaggagctgatcttccagctgctgaacaagctgtgcatggcccagcccaggacagtgcaggatgtggaggagcgggtgcagaagaccttcccccaccccatcgacaagtgggccatcgcagatgcccagagcgccatcgagaagaggaagagaagaaaccccctgctgctgcctgtggacaagatccaccccagcctgaaggaggtgctgggctacaaggtggactaccacgtgtccctgtacatcgtggccgtgctggagtacatctctgctgacatcctgaagctggccggcaactacgtgttcaacatccgccactatgagatcagccagcaggacatcaaggtgtccatgtgtgccgacaaggtgctgatggacatgtttgaccaggatgacatcggcctggtgtccctgtgtgaagatgagcccagcagcagcggggagctgaactactatgacctggtgaggacagaaattgctgaggagcggcagtacctgcgggagctgaacatgatcatcaaggtgttccgggaggccttcctgagtgacaggaagctgttcaagcccagcgacatcgagaagatcttcagcaacatcagtgacatccacgagctgactgtgaagctgctgggcctgattgaggacacagtggagatgacagatgagagcagcccccaccccctggccggcagctgctttgaggacctggccgaggagcaggcctttgacccctatgagaccctgagccaggacatcctgagccctgagttccacgagcacttcaacaagctgatggcccggcctgctgtggccctgcacttccagagcattgctgatggcttcaaggaggccgtgcgctacgtgctgccccggctgatgctggtgcctgtgtaccactgctggcactactttgagctgctgaagcagctgaaggcctgcagcgaggagcaggaggacagagaatgtctgaaccaggccatcacagccctgatgaacctgcagggctccatggaccgcatctacaagcagtacagcccccggcggcggcctggggaccctgtgtgccccttctacagccaccagctgcggagcaagcacctggccatcaagaagatgaatgagatccagaagaacattgatggctgggagggcaaggacatcggccagtgctgcaatgagttcatcatggagggccccctgaccagaattggagccaagcatgagcggcacatcttcctgtttgatggcctgatgatcagctgcaagcccaaccacggccagacccggctgcccggctacagcagcgctgagtaccgcctgaaggagaagtttgtgatgaggaagatccagatctgtgacaaggaggacacctgtgagcacaagcacgcctttgagctggtgtccaaggatgaaaattccatcatctttgctgccaagtctgctgaggagaagaacaactggatggccgccctgatcagcctgcactaccgcagcaccctggacaggatgctggacagcgtgctgctgaaggaggagaatgagcagcccctgcggctgcccagccctgaggtgtacagatttgtggtgaaggacagcgaggagaacatcgtgtttgaggacaacctgcagagccgcagcggcatccccatcatcaagggcggcaccgtggtgaagctgattgaaaggctgacctaccacatgtatgctgaccccaactttgtgaggaccttcctgaccacctaccgctccttctgcaagccccaggagctgctgagcctgctgattgaaagatttgagatccctgagcctgagcccacagatgctgacaagctggccattgaaaaaggagagcagcccatctctgctgacctgaagcgcttcaggaaggagtatgtgcagcctgtgcagctgcgcatcctgaatgtgttccgccactgggtggagcaccacttctatgactttgagcgggacctggagctgctggagcggctggagagcttcatcagctctgtgcggggcaaggccatgaagaagtgggtggagagcatcgccaagatcatccggaggaagaagcaggcccaggccaacggggtgagccacaacatcacctttgagagccccccaccacccatcgagtggcacatcagcaagccaggccagtttgagacctttgacctgatgaccctgcaccccatcgagatcgcccggcagctgaccctgctggagagtgacctgtacaggaaggtgcagcccagcgagctggtgggctctgtgtggaccaaggaggacaaggagatcaacagccccaacctgctgaagatgatccgccacaccaccaacctgaccctgtggtttgagaagtgcatcgtggaggctgaaaattttgaggagcgggtggccgtgctgagccgcatcatcgagatcctgcaggtgttccaggacctgaacaacttcaatggagtgctggagatcgtgtctgctgtgaacagcgtgtctgtgtaccgcctggaccacacctttgaggccctgcaggagaggaagaggaagatcctggatgaggccgtggagctgagccaggaccacttcaagaagtacctggtgaagctgaagagcatcaaccccccctgtgtgcccttcttcggcatctacctgaccaacatcctgaagacagaggagggcaacaatgacttcctgaagaagaagggcaaggacctgatcaacttcagcaagaggaggaaggtggccgagatcaccggggagatccagcagtaccagaaccagccctactgcctgagaattgaaccagacatgaggcgcttctttgagaacctgaaccccatgggcagcgccagcgagaaggagttcacagactacctgttcaacaagagcctggagattgagcccaggaactgcaagcagcccccacgcttccccaggaagagcaccttcagcctgaagagccctggcatccggcccaacacaggaagacatggcagcaccagcggcaccctgcggggccaccccacccccctggagcgggagccctgcaagatctccttcagcagaattgctgagacagagctggagagcacagtgtctgcccccaccagccccaacacccccagcaccccacctgtgtctgccagcagtgacctgtctgtgttcctggatgtggacctgaacagcagctgtggcagcaacagcatctttgcccctgtgctgctgccccacagcaagagcttcttcagcagctgtggcagcctgcacaagctgtctgaggagcccctcatccccccacccctgccccccaggaagaagtttgaccatgatgccagcaacagcaaaggaaacatgaagagtgatgatgaccccccagccatccccccccggcagcccccaccacccaaggtgaagccccgggtgcctgtgcccactggagcctttgatggccccctgcacagccccccacctcctccaccccgggaccccctgcctgacaccccacctcctgtgcccctgcggcccccagagcacttcatcaactgccccttcaacctgcagcccccacccctgggccacctgcaccgggacagcgactggctgcgggacatcagcacctgccccaacagccccagcaccccacccagcacccccagcccccgggtgccccggcgctgctacgtgctgagcagcagccagaacaacctggcccaccccccagcccctcctgtgcccccccggcagaacagcagcccccacctgcccaagctgccccccaagacctacaagcgggagctgagccacccccccctgtaccgcctgcccctgctggagaatgctgagaccccccagtag

SEQ ID NO: 3347 - DNA, 2442 bp, synthetic construct
  misc_feature 1..2442: note = source = /note="Description of Artificial Sequence: Synthetic coding sequence"
  source 1..2442: mol_type = other DNA
atggccaagcccctgacagaccaggagaagaggcggcagatcagcatccggggcatcgtgggcgtggagaatgtggccgagctgaagaagagcttcaacagacacctgcacttcaccctggtgaaggacagaaatgtggccaccacccgggactactactttgccctggcccacacagtgcgggaccacctggtgggccgctggatccgcacccagcagcactactatgacaagtgccccaagctgggcctggacatcgaggagctggaggagattgaggaggatgctggcctgggcaatggaggcctgggccgcctggccgcctgcttcctggacagcatggccaccctgggcctggccgcctacggctacggcatccgctatgaatatggcatcttcaaccagaagatcagagatggctggcaggtggaggaggctgatgactggctgcgctatggcaacccctgggagaagagcaggcctgagttcatgctgcctgtgcacttctacggcaaggtggagcacaccaacacaggcaccaagtggattgacacccaggtggtgctggccctgccctatgacacccctgtgcccggctacatgaacaacacagtgaacaccatgaggctgtggagcgcccgggccccaaatgacttcaacctgcgggacttcaacgtgggggactacatccaggccgtgctggacaggaacctggccgagaacatcagccgggtgctgtacccaaatgacaacttctttgagggcaaggagctgcggctgaagcaggagtactttgtggtggccgccaccctgcaggacatcatccgccgcttcaaggccagcaagtttggcagcaccagaggagctggcaccgtgtttgatgccttcccagaccaggtggccatccagctgaatgacacccacccagccctggccatccctgagctgatgaggatctttgtggacatcgagaagctgccctggagcaaggcctgggagctgacccagaagacctttgcctacaccaaccacacagtgctgcctgaggccctggagcgctggcctgtggacctggtggagaagctgctgcccaggcacctggagatcatctatgagatcaaccagaagcacctggacagaattgtggccctcttccccaaggatgtggaccggctgcggaggatgagcctcatcgaggaggagggcagcaagaggatcaacatggcccacctgtgcatcgtgggcagccatgctgtgaatggagtggccaagatccacagcgacatcgtgaagaccaaggtgttcaaggacttcagcgagctggagccagacaagttccagaacaagaccaacggcatcaccccccggcgctggctgctgctgtgcaaccctggcctggccgagctgattgctgagaagatcggggaggactatgtgaaggacctgagccagctgaccaagctgcacagcttcctgggagatgatgtgttcctgcgggagctggccaaggtgaagcaggagaacaagctgaagttcagccagttcctggagacagagtacaaggtgaagatcaaccccagctccatgtttgatgtgcaggtgaagaggatccacgagtacaagaggcagctgctgaactgcctgcacgtgatcaccatgtacaaccgcatcaagaaggaccccaagaagctgtttgtgcccaggacagtcatcatcggcggcaaggccgcccctggctaccacatggccaagatgatcatcaagctgatcacctctgtggctgatgtggtgaacaatgaccccatggtgggcagcaagctgaaggtgatcttcctggagaactacagagtgtccctggccgagaaggtgatcccagccacagacctgtctgagcagatcagcacagctggaacagaggccagcggcactggaaacatgaagttcatgctgaatggagccctgaccatcggcaccatggatggagccaacgtggagatggccgaggaggccggggaggagaacctcttcatcttcggcatgagaattgatgatgtggccgccctggacaagaagggctatgaggccaaggagtactatgaggccctgcctgagctgaagctggtgattgaccagattgacaatggcttcttcagccccaagcagcctgacctcttcaaggacatcatcaacatgctgttctaccatgaccgcttcaaggtgtttgctgactatgaggcctacgtgaagtgccaggacaaggtgtcccagctgtacatgaaccccaaggcctggaacaccatggtgctgaagaacattgctgccagcggcaagttcagcagtgacaggaccatcaaggagtatgcccagaacatctggaatgtggagcccagcgacctgaagatcagcctgagcaatgaaagcaacaaggtgaatggaaattag

SEQ ID NO: 3348 - DNA, 2433 bp, synthetic construct
  misc_feature 1..2433: note = source = /note="Description of Artificial Sequence: Synthetic coding sequence"
  source 1..2433: mol_type = other DNA
atggagcacaaggaggtggtgctgctgctgctgctcttcctgaagagcggccagggcgagcccctggatgattatgtgaacacccagggcgccagcctcttctctgtgaccaagaagcagctgggcgccggcagcattgaggagtgtgccgccaagtgtgaagaagatgaggagttcacctgccgggccttccagtaccacagcaaggagcagcagtgtgtgatcatggccgagaacaggaagagcagcatcatcatccgcatgagagatgtggtgctgtttgagaagaaggtgtacctgtctgagtgcaagacaggaaatggcaagaactaccggggcaccatgagcaagaccaagaatggcatcacctgccagaagtggagcagcaccagcccccaccggccccgcttctccccagccacccaccccagcgagggcctggaggagaactactgcagaaatccagacaatgacccccagggcccctggtgctacaccacagatcctgagaagagatatgactactgtgacatcctggagtgtgaggaggagtgcatgcactgcagcggagaaaattatgatggcaagatcagcaagaccatgagcggcctggagtgccaggcctgggacagccagagcccccacgcccacggctacatccccagcaagttccccaacaagaacctgaagaagaactactgcagaaatccagaccgggagctgcggccctggtgcttcaccacagaccccaacaagcgctgggagctgtgtgacatcccccgctgcaccaccccaccacccagcagcggccccacctaccagtgcctgaagggcactggagagaactacagaggaaatgtggccgtgacagtgtctggccacacctgccagcactggagcgcccagaccccccacacccacaacagaacacctgagaacttcccctgcaagaacctggatgagaactactgcagaaatccagatggcaagagggccccctggtgccacaccaccaacagccaggtgcgctgggagtactgcaagatccccagctgtgacagcagccctgtgtccacagagcagctggcccccacagcccctcctgagctgacccctgtggtgcaggactgctaccatggagatggccagagctaccggggcaccagcagcaccaccaccaccgggaagaagtgccagagctggagctccatgaccccccaccgccaccagaagaccccagagaactacccaaatgccggcctgaccatgaactactgcagaaatccagatgctgacaagggcccctggtgcttcaccacagaccccagcgtgcgctgggagtactgcaacctgaagaagtgcagcggcacagaggcctctgtggtggcccctcctcctgtggtgctgctgcctgatgtggagaccccatctgaggaggactgcatgtttggaaatggcaagggctaccggggcaagagggccaccaccgtgacaggcaccccctgccaggactgggccgcccaggagccccaccgccacagcatcttcaccccagagaccaacccccgggccggcctggagaagaactactgcaggaacccagatggagatgtgggcggcccctggtgctacaccaccaaccccaggaagctgtatgactactgtgatgtgccccagtgtgccgcccccagctttgactgtgggaagccccaggtggagcccaagaagtgccccggccgggtggtgggcggctgtgtggcccacccccacagctggccctggcaggtgtccctgcggacccgcttcggcatgcacttctgtggcggcaccctcatcagccctgagtgggtgctgacagctgcccactgcctggagaagagcccccggcccagcagctacaaggtgatcctgggcgcccaccaggaggtgaacctggagccccacgtgcaggagattgaggtgagccgcctcttcctggagcccaccaggaaggacatcgccctgctgaagctgagcagccctgctgtgatcacagacaaggtgatcccagcctgcctgcccagccccaactacgtggtggccgacagaacagagtgcttcatcaccggctggggcgagacccagggcacctttggagctggcctgctgaaggaggcccagctgcctgtgattgagaacaaggtgtgcaacagatatgagttcctgaatggccgggtgcagagcacagagctgtgtgccggccacctggccggcggcacagacagctgccagggcgacagcggcggccccctggtgtgctttgagaaggacaagtacatcctgcagggcgtgacctcctggggcctgggctgtgcccggcccaacaagccaggagtgtatgtgcgggtgtccagatttgtgacctggattgaaggagtgatgaggaacaactag

SEQ ID NO: 3349 - DNA, 633 bp, synthetic construct
  misc_feature 1..633: note = source = /note="Description of Artificial Sequence: Synthetic coding sequence"
  source 1..633: mol_type = other DNA
cgcttcggcatgcacttctgtggcggcaccctcatcagccctgagtgggtgctgacagctgcccactgcctggagaagagcccccggcccagcagctacaaggtgatcctgggcgcccaccaggaggtgaacctggagccccacgtgcaggagattgaggtgagccgcctcttcctggagcccaccaggaaggacatcgccctgctgaagctgagcagccctgctgtgatcacagacaaggtgatcccagcctgcctgcccagccccaactacgtggtggccgacagaacagagtgcttcatcaccggctggggcgagacccagggcacctttggagctggcctgctgaaggaggcccagctgcctgtgattgagaacaaggtgtgcaacagatatgagttcctgaatggccgggtgcagagcacagagctgtgtgccggccacctggccggcggcacagacagctgccagggcgacagcggcggccccctggtgtgctttgagaaggacaagtacatcctgcagggcgtgacctcctggggcctgggctgtgcccggcccaacaagccaggagtgtatgtgcgggtgtccagatttgtgacctggattgaaggagtgatgaggaacaactag

SEQ ID NO: 3350 - DNA, 411 bp, synthetic construct
  misc_feature 1..411: note = source = /note="Description of Artificial Sequence: Synthetic coding sequence"
  source 1..411: mol_type = other DNA
atggagcacaaggaggtggtgctgctgctgctgctcttcctgaagagcggccagggcgagcccctggatgattatgtgaacacccagggcgccagcctcttctctgtgaccaagaagcagctgggcgccggcagcattgaggagtgtgccgccaagtgtgaagaagatgaggagttcacctgccgggccttccagtaccacagcaaggagcagcagtgtgtgatcatggccgagaacaggaagagcagcatcatcatccgcatgagagatgtggtgctgtttgagaagaaggtgtacctgtctgagtgcaagacaggaaatggcaagaactaccggggcaccatgagcaagaccaagaatggcatcacctgccagaagtggagcagcaccagcccccaccggcccaggtag

SEQ ID NO: 3351 - DNA, 945 bp, synthetic construct
  misc_feature 1..945: note = source = /note="Description of Artificial Sequence: Synthetic coding sequence"
  source 1..945: mol_type = other DNA
atgggcatcggccgctctgagggcggcagaagaggagctgccctgggcgtgctgctggccctgggcgccgccctgctggccgtgggcagcgcctctgaatatgactatgtgtccttccagagcgacatcggcccctaccagagcggccgcttctacaccaagccaccccagtgtgtggacatcccagctgacctgcggctgtgccacaacgtgggctacaagaagatggtgctgcccaacctgctggagcacgagaccatggccgaggtgaagcagcaggccagctcctgggtgcccctgctgaacaagaactgccacgccggcacccaggtgttcctgtgcagcctgtttgcccctgtgtgcctggaccggcccatctacccctgccgctggctgtgtgaggccgtgcgggacagctgtgagcctgtgatgcagttcttcggcttctactggccagagatgctgaagtgtgacaagtttcctgaaggagatgtgtgcatcgccatgaccccaccaaatgccacagaggccagcaagccccagggcaccaccgtgtgccccccctgtgacaatgagctgaagtctgaggccatcatcgagcacctgtgtgccagcgagtttgccctgaggatgaagatcaaggaggtgaagaaggaaaatggagacaagaagatcgtgcccaagaagaagaagcccctgaagctgggccccatcaagaagaaggacctgaagaagctggtgctgtacctgaagaatggagctgactgcccctgccaccagctggacaacctgagccaccacttcctgatcatgggcaggaaggtgaagagccagtacctgctgacagccatccacaagtgggacaagaagaacaaggagttcaagaacttcatgaagaagatgaagaaccatgaatgtcccaccttccagagcgtcttcaagtag

SEQ ID NO: 3352 - DNA, 882 bp, synthetic construct
  misc_feature 1..882: note = source = /note="Description of Artificial Sequence: Synthetic coding sequence"
  source 1..882: mol_type = other DNA
atggatgccatgaagaggggcctgtgctgcgtgctgctgctgtgtggggctgtgtttgtgagccccagccaggagatccacgcccgcttcagaagaggagcccggagctaccaggtgatctgcagagatgagaagacccagatgatctaccagcagcaccagagctggctgcggcctgtgctgcggagcaacagagtggagtactgctggtgcaacagcggccgggcccagtgccacagcgtgcctgtgaagagctgcagcgagccccgctgcttcaatggaggcacctgccagcaggccctgtacttcagtgactttgtgtgccagtgcccagagggctttgctgggaagtgctgtgaaattgacacccgggccacctgctatgaggaccagggcatctcctaccggggcacctggagcacagctgagagcggggctgaatgtaccaactggaacagcagcgccctggcccagaagccctacagcggccggcggccagatgccatccggctgggcctgggcaaccacaactactgcaggaacccagaccgggacagcaagccctggtgctacgtgttcaaggccggcaagtacagcagcgagttctgcagcaccccagcctgcagcgagggcaacagcgactgctactttggaaatggaagtgcctaccggggcacccacagcctgacagagagcggggccagctgcctgccctggaacagcatgatcctgattggcaaggtgtacacagcccagaaccccagcgcccaggccctgggcctgggcaagcacaactactgccgctgcaggacaggccgctctgtgagcagccctgccacagcctccatgaggccctgcctgctgagcatccgcagcggctag

SEQ ID NO: 3353 - DNA, 1551 bp, synthetic construct
  misc_feature 1..1551: note = source = /note="Description of Artificial Sequence: Synthetic coding sequence"
  source 1..1551: mol_type = other DNA
atggatgccatgaagaggggcctgtgctgcgtgctgctgctgtgtggggctgtgtttgtgagccccagccaggagatccacgcccgcttcagaagaggagcccggagctaccagggctgcagcgagccccgctgcttcaatggaggcacctgccagcaggccctgtacttcagtgactttgtgtgccagtgcccagagggctttgctgggaagtgctgtgaaattgacacccgggccacctgctatgaggaccagggcatctcctaccggggcacctggagcacagctgagagcggggctgaatgtaccaactggaacagcagcgccctggcccagaagccctacagcggccggcggccagatgccatccggctgggcctgggcaaccacaactactgcaggaacccagaccgggacagcaagccctggtgctacgtgttcaaggccggcaagtacagcagcgagttctgcagcaccccagcctgcagcgagggcaacagcgactgctactttggaaatggaagtgcctaccggggcacccacagcctgacagagagcggggccagctgcctgccctggaacagcatgatcctgattggcaaggtgtacacagcccagaaccccagcgcccaggccctgggcctgggcaagcacaactactgcaggaacccagatggagatgccaagccctggtgccacgtgctgaagaacagaaggctgacctgggagtactgtgatgtgcccagctgcagcacctgtggcctgcggcagtacagccagccccagttccgcatcaagggcggcctgtttgctgacatcgccagccacccctggcaggccgccatctttgccaagcacagaagaagccctggagagcgcttcctgtgtggcggcatcctgatcagcagctgctggatcctgtctgctgcccactgcttccaggagcgcttccccccccaccacctgaccgtcatcctgggccgcacctacagagtggtgcctggagaggaggagcagaagtttgaggtggagaagtacatcgtgcacaaggagtttgatgatgacacctatgacaatgacatcgccctgctgcagctgaagagtgacagcagccgctgtgcccaggagagctctgtggtgaggacagtgtgcctgcccccagctgacctgcagctgcctgactggacagaatgtgagctgagcggctacggcaagcatgaggccctgagccccttctacagcgagcggctgaaggaggcccacgtgcggctgtaccccagcagccgctgcaccagccagcacctgctgaacagaacagtgacagacaacatgctgtgtgccggggacaccaggtctgggggcccccaggccaacctgcatgatgcctgccagggcgacagcggcggccccctggtgtgcctgaatgatggccgcatgaccctggtgggcatcatctcctggggcctgggctgcggccagaaggatgtgcctggggtgtacaccaaggtgaccaactacctggactggatccgggacaacatgaggccctag

SEQ ID NO: 3354 - DNA, 1689 bp, synthetic construct
  misc_feature 1..1689: note = source = /note="Description of Artificial Sequence: Synthetic coding sequence"
  source 1..1689: mol_type = other DNA
atggatgccatgaagaggggcctgtgctgcgtgctgctgctgtgtggggctgtgtttgtgagccccagccaggagatccacgcccgcttcagaagaggagcccggagctaccaggtgatctgcagagatgagaagacccagatgatctaccagcagcaccagagctggctgcggcctgtgctgcggagcaacagagtggagtactgctggtgcaacagcggccgggcccagtgccacagcgtgcctgtgaagagctgcagcgagccccgctgcttcaatggaggcacctgccagcaggccctgtacttcagtgactttgtgtgccagtgcccagagggctttgctgggaagtgctgtgaaattgacacccgggccacctgctatgaggaccagggcatctcctaccggggcacctggagcacagctgagagcggggctgaatgtaccaactggaacagcagcgccctggcccagaagccctacagcggccggcggccagatgccatccggctgggcctgggcaaccacaactactgcaggaacccagaccgggacagcaagccctggtgctacgtgttcaaggccggcaagtacagcagcgagttctgcagcaccccagcctgcagcgagggcaacagcgactgctactttggaaatggaagtgcctaccggggcacccacagcctgacagagagcggggccagctgcctgccctggaacagcatgatcctgattggcaaggtgtacacagcccagaaccccagcgcccaggccctgggcctgggcaagcacaactactgcaggaacccagatggagatgccaagccctggtgccacgtgctgaagaacagaaggctgacctgggagtactgtgatgtgcccagctgcagcacctgtggcctgcggcagtacagccagccccagttccgcatcaagggcggcctgtttgctgacatcgccagccacccctggcaggccgccatctttgccaagcacagaagaagccctggagagcgcttcctgtgtggcggcatcctgatcagcagctgctggatcctgtctgctgcccactgcttccaggagcgcttccccccccaccacctgaccgtcatcctgggccgcacctacagagtggtgcctggagaggaggagcagaagtttgaggtggagaagtacatcgtgcacaaggagtttgatgatgacacctatgacaatgacatcgccctgctgcagctgaagagtgacagcagccgctgtgcccaggagagctctgtggtgaggacagtgtgcctgcccccagctgacctgcagctgcctgactggacagaatgtgagctgagcggctacggcaagcatgaggccctgagccccttctacagcgagcggctgaaggaggcccacgtgcggctgtaccccagcagccgctgcaccagccagcacctgctgaacagaacagtgacagacaacatgctgtgtgccggggacaccaggtctgggggcccccaggccaacctgcatgatgcctgccagggcgacagcggcggccccctggtgtgcctgaatgatggccgcatgaccctggtgggcatcatctcctggggcctgggctgcggccagaaggatgtgcctggggtgtacaccaaggtgaccaactacctggactggatccgggacaacatgaggccctag

SEQ ID NO: 3355 - DNA, 1311 bp, synthetic construct
  misc_feature 1..1311: note = source = /note="Description of Artificial Sequence: Synthetic coding sequence"
  source 1..1311: mol_type = other DNA
atggatgccatgaagaggggcctgtgctgcgtgctgctgctgtgtggggctgtgtttgtgagccccagccaggagatccacgcccgcttcagaagaggagcccggagctaccaggtgatctgcagagatgagaagacccagatgatctaccagcagcaccagagctggctgcggcctgtgctgcggagcaacagagtggagtactgctggtgcaacagcggccgggcccagtgccacagcgtgcctgtgaagaggaacagcgactgctactttggaaatggaagtgcctaccggggcacccacagcctgacagagagcggggccagctgcctgccctggaacagcatgatcctgattggcaaggtgtacacagcccagaaccccagcgcccaggccctgggcctgggcaagcacaactactgcaggaacccagatggagatgccaagccctggtgccacgtgctgaagaacagaaggctgacctgggagtactgtgatgtgcccagctgcagcacctgtggcctgcggcagtacagccagccccagttccgcatcaagggcggcctgtttgctgacatcgccagccacccctggcaggccgccatctttgccaagcacagaagaagccctggagagcgcttcctgtgtggcggcatcctgatcagcagctgctggatcctgtctgctgcccactgcttccaggagcgcttccccccccaccacctgaccgtcatcctgggccgcacctacagagtggtgcctggagaggaggagcagaagtttgaggtggagaagtacatcgtgcacaaggagtttgatgatgacacctatgacaatgacatcgccctgctgcagctgaagagtgacagcagccgctgtgcccaggagagctctgtggtgaggacagtgtgcctgcccccagctgacctgcagctgcctgactggacagaatgtgagctgagcggctacggcaagcatgaggccctgagccccttctacagcgagcggctgaaggaggcccacgtgcggctgtaccccagcagccgctgcaccagccagcacctgctgaacagaacagtgacagacaacatgctgtgtgccggggacaccaggtctgggggcccccaggccaacctgcatgatgcctgccagggcgacagcggcggccccctggtgtgcctgaatgatggccgcatgaccctggtgggcatcatctcctggggcctgggctgcggccagaaggatgtgcctggggtgtacaccaaggtgaccaactacctggactggatccgggacaacatgaggccctag

SEQ ID NO: 3356 - DNA, 1500 bp, synthetic construct
  misc_feature 1..1500: note = source = /note="Description of Artificial Sequence: Synthetic coding sequence"
  source 1..1500: mol_type = other DNA
atggatgccatgaagaggggcctgtgctgcgtgctgctgctgtgtggggctgtgtttgtgagccccagccaggagatccacgcccgcttcagaagaggagcccggagctaccaggtgatctgcagagatgagaagacccagatgatctaccagcagcaccagagctggctgcggcctgtgctgcggagcaacagagtggagtactgctggtgcaacagcggccgggcccagtgccacagcgtgcctgtgaagagctgcagcgagccccgctgcttcaatggaggcacctgccagcaggccctgtacttcagtgactttgtgtgccagtgcccagagggctttgctgggaagtgctgtgaaattgacagcaagccctggtgctacgtgttcaaggccggcaagtacagcagcgagttctgcagcaccccagcctgcagcgagggcaacagcgactgctactttggaaatggcagcgcctaccggggcacccacagcctgacagaaagtggggccagctgcctgccctggaacagcatgatcctgattggcaaggtgtacacagcccagaaccccagcgcccaggccctgggcctgggcaagcacaactactgcagaaatccagatggagatgccaagccctggtgccacgtgctgaagaacagaaggctgacctgggagtactgtgatgtgcccagctgcagcacctgtggcctgcggcagtacagccagccccagttccgcatcaagggcggcctgtttgctgacatcgccagccacccctggcaggccgccatctttgccaagcaccggcgcagccctggagagcgcttcctgtgtggcggcatcctgatcagcagctgctggatcctgtctgctgcccactgcttccaggagcgcttccccccccaccacctgaccgtcatcctgggccgcacctacagagtggtgcctggagaggaggagcagaagtttgaggtggagaagtacatcgtgcacaaggagtttgatgatgacacctatgacaatgacatcgccctgctgcagctgaagagtgacagcagccgctgtgcccaggagagctctgtggtgaggacagtgtgcctgcccccagctgacctgcagctgcctgactggacagaatgtgagctgagcggctacggcaagcatgaggccctgagccccttctacagcgagcggctgaaggaggcccacgtgcggctgtaccccagcagccgctgcaccagccagcacctgctgaacagaacagtgacagacaacatgctgtgtgccggggacaccaggtctgggggcccccaggccaacctgcatgatgcctgccagggcgacagcggcggccccctggtgtgcctgaatgatggccgcatgaccctggtgggcatcatctcctggggcctgggctgcggccagaaggatgtgcctggggtgtacaccaaggtgaccaactacctggactggatccgggacaacatgaggccctag

SEQ ID NO: 3357 - DNA, 537 bp, synthetic construct
  misc_feature 1..537: note = source = /note="Description of Artificial Sequence: Synthetic coding sequence"
  source 1..537: mol_type = other DNA
atggatgccatgaagaggggcctgtgctgcgtgctgctgctgtgtggggctgtgtttgtgagccccagccaggagatccacgcccgcttcagaagaggagcccggagctaccaggtgatctgcagagatgagaagacccagatgatctaccagcagcaccagagctggctgcggcctgtgctgcggagcaacagagtggagtactgctggtgcaacagcggccgggcccagtgccacagcgtgcctgtgaagagctgcagcgagccccgctgcttcaatggaggcacctgccagcaggccctgtacttcagtgactttgtgtgccagtgcccagagggctttgctgggaagtgctgtgaaattgacacccgggccacctgctatgaggaccagggcatctcctaccggggcacctggagcacagctgagagcggggctgaatgtaccaactggaacagcagcgccctggcccagaagccctacagcggccggcggccagatgccatccggctgggcctgggcaaccacaactactag

SEQ ID NO: 3358 - DNA, 474 bp, synthetic construct
  misc_feature 1..474: note = source = /note="Description of Artificial Sequence: Synthetic coding sequence"
  source 1..474: mol_type = other DNA
atggatgccatgaagaggggcctgtgctgcgtgctgctgctgtgtggggctgtgtttgtgagccccagccaggagatccacgcccgcttcagaagaggagcccggagctaccaggtgatctgcagagatgagaagacccagatgatctaccagcagcaccagagctggctgcggcctgtgctgcggagcaacagagtggagtactgctggtgcaacagcggccgggcccagtgccacagcgtgcctgtgaagagctgcagcgagccccgctgcttcaatggaggcacctgccagcaggccctgtacttcagtgactttgtgtgccagtgcccagagggctttgctgggaagtgctgtgaaattgacacccgggccacctgctatgaggaccagggcatctcctaccggggcacctggagcacagctgagagcggggctgaatgtaccaactggaacagcagcgccctggcctag

SEQ ID NO: 3359 - DNA, 1422 bp, synthetic construct
  misc_feature 1..1422: note = source = /note="Description of Artificial Sequence: Synthetic coding sequence"
  source 1..1422: mol_type = other DNA
atggatgccatgaagaggggcctgtgctgcgtgctgctgctgtgtggggctgtgtttgtgagccccagccaggagatccacgcccgcttcagaagaggagcccggagctaccaggtgatctgcagagatgagaagacccagatgatctaccagcagcaccagagctggctgcggcctgtgctgcggagcaacagagtggagtactgctggtgcaacagcggccgggcccagtgccacagcgtgcctgtgaagagctgcagcgagccccgctgcttcaatggaggcacctgccagcaggccctgtacttcagtgactttgtgtgccagtgcccagagggctttgctgggaagtgctgtgaaattggcaacagcgactgctactttggaaatggcagcgcctaccggggcacccacagcctgacagaaagtggggccagctgcctgccctggaacagcatgatcctgattggcaaggtgtacacagcccagaaccccagcgcccaggccctgggcctgggcaagcacaactactgcagaaatccagatggagatgccaagccctggtgccacgtgctgaagaacagaaggctgacctgggagtactgtgatgtgcccagctgcagcacctgtggcctgcggcagtacagccagccccagttccgcatcaagggcggcctgtttgctgacatcgccagccacccctggcaggccgccatctttgccaagcaccggcgcagccctggagagcgcttcctgtgtggcggcatcctgatcagcagctgctggatcctgtctgctgcccactgcttccaggagcgcttccccccccaccacctgaccgtcatcctgggccgcacctacagagtggtgcctggagaggaggagcagaagtttgaggtggagaagtacatcgtgcacaaggagtttgatgatgacacctatgacaatgacatcgccctgctgcagctgaagagtgacagcagccgctgtgcccaggagagctctgtggtgaggacagtgtgcctgcccccagctgacctgcagctgcctgactggacagaatgtgagctgagcggctacggcaagcatgaggccctgagccccttctacagcgagcggctgaaggaggcccacgtgcggctgtaccccagcagccgctgcaccagccagcacctgctgaacagaacagtgacagacaacatgctgtgtgccggggacaccaggtctgggggcccccaggccaacctgcatgatgcctgccagggcgacagcggcggccccctggtgtgcctgaatgatggccgcatgaccctggtgggcatcatctcctggggcctgggctgcggccagaaggatgtgcctggggtgtacaccaaggtgaccaactacctggactggatccgggacaacatgaggccctag

SEQ ID NO: 3360 - DNA, 1083 bp, synthetic construct
  misc_feature 1..1083: note = source = /note="Description of Artificial Sequence: Synthetic coding sequence"
  source 1..1083: mol_type = other DNA
atggccggccacctggccagtgactttgccttcagccccccacctgggggcggcggagatggccctgggggccctgagcccggctgggtggaccccaggacctggctgtccttccagggccccccaggcggccctggcatcggccctggggtgggccctggcagcgaggtgtggggcatccccccctgccccccaccctatgagttctgtggcggcatggcctactgcggcccccaggtgggcgtgggcctggtgccccagggcggcctggagaccagccagcctgagggggaggccggcgtgggcgtggagagcaacagtgatggagccagccctgagccctgcaccgtgaccccaggagctgtgaagctggagaaggagaagctggagcagaaccctgaggagagccaggacatcaaggccctgcagaaggagctggagcagtttgccaagctgctgaagcagaagaggatcaccctgggctacacccaggctgatgtgggcctgaccctgggcgtgctgtttgggaaggtgttcagccagaccaccatctgccgctttgaggccctgcagctgtccttcaagaacatgtgcaagctgcggcccctgctgcagaagtgggtggaggaggccgacaacaatgaaaacctgcaggagatctgcaaggccgagaccctggtgcaggccaggaagaggaagaggaccagcattgagaacagagtgcggggcaacctggagaacctcttcctgcagtgccccaagcccaccctgcagcagatcagccacatcgcccagcagctgggcctggagaaggatgtggtgcgggtgtggttctgcaacagacggcagaagggcaagaggagcagcagtgactatgcccagcgggaggactttgaggccgccggcagccccttcagcggcggccctgtgtccttccccctggcccctggcccccacttcggcaccccaggctacggcagcccccacttcaccgccctgtacagctctgtgcccttccctgagggggaggccttcccccctgtgtctgtgaccaccctgggcagccccatgcacagcaactag

SEQ ID NO: 3361 - DNA, 798 bp, synthetic construct
  misc_feature 1..798: note = source = /note="Description of Artificial Sequence: Synthetic coding sequence"
  source 1..798: mol_type = other DNA
atgcacttctaccgcctcttcctgggcgccacccggcgcttcctgaaccctgagtggaagggggagattgacaactggtgtgtgtatgtgctgaccagcctgctgcccttcaagatccagagccaggacatcaaggccctgcagaaggagctggagcagtttgccaagctgctgaagcagaagaggatcaccctgggctacacccaggctgatgtgggcctgaccctgggcgtgctgtttgggaaggtgttcagccagaccaccatctgccgctttgaggccctgcagctgtccttcaagaacatgtgcaagctgcggcccctgctgcagaagtgggtggaggaggccgacaacaatgaaaacctgcaggagatctgcaaggccgagaccctggtgcaggccaggaagaggaagaggaccagcattgaaaatagagtgcggggcaacctggagaacctcttcctgcagtgccccaagcccaccctgcagcagatcagccacatcgcccagcagctgggcctggagaaggatgtggtgcgggtgtggttctgcaacagacggcagaagggcaagaggagcagcagtgactatgcccagagagaagattttgaagctgctggcagccccttcagcggcggccctgtgtccttccccctggcccctggcccccacttcggcaccccaggctacggcagcccccacttcaccgccctgtacagctctgtgcccttccctgagggggaggccttcccccctgtgtctgtgaccaccctgggcagccccatgcacagcaactag

SEQ ID NO: 3362 - DNA, 1083 bp, synthetic construct; identical to SEQ ID NO: 3360
  misc_feature 1..1083: note = source = /note="Description of Artificial Sequence: Synthetic coding sequence"
  source 1..1083: mol_type = other DNA

SEQ ID NO: 3363 - DNA, 798 bp, synthetic construct; identical to SEQ ID NO: 3361
  misc_feature 1..798: note = source = /note="Description of Artificial Sequence: Synthetic coding sequence"
  source 1..798: mol_type = other DNA

SEQ ID NO: 3364 - DNA, 798 bp, synthetic construct; identical to SEQ ID NO: 3361
  misc_feature 1..798: note = source = /note="Description of Artificial Sequence: Synthetic coding sequence"
  source 1..798: mol_type = other DNA

SEQ ID NO: 3365 - DNA, 1083 bp, synthetic construct; identical to SEQ ID NO: 3360
  misc_feature 1..1083: note = source = /note="Description of Artificial Sequence: Synthetic coding sequence"
  source 1..1083: mol_type = other DNA

SEQ ID NO: 3366 - DNA, 1083 bp, synthetic construct; identical to SEQ ID NO: 3360
  misc_feature 1..1083: note = source = /note="Description of Artificial Sequence: Synthetic coding sequence"
  source 1..1083: mol_type = other DNA

SEQ ID NO: 3367 - DNA, 798 bp, synthetic construct; identical to SEQ ID NO: 3361
  misc_feature 1..798: note = source = /note="Description of Artificial Sequence: Synthetic coding sequence"
  source 1..798: mol_type = other DNA

SEQ ID NO: 3368 - DNA, 1083 bp, synthetic construct; identical to SEQ ID NO: 3360
  misc_feature 1..1083: note = source = /note="Description of Artificial Sequence: Synthetic coding sequence"
  source 1..1083: mol_type = other DNA

SEQ ID NO: 3369 - DNA, 369 bp, synthetic construct
  misc_feature 1..369: note = source = /note="Description of Artificial Sequence: Synthetic coding sequence"
  source 1..369: mol_type = other DNA
atggccggccacctggccagtgactttgccttcagccccccacctgggggcggcggagatggccctgggggccctgagcccggctgggtggaccccaggacctggctgtccttccagggccccccaggcggccctggcatcggccctggggtgggccctggcagcgaggtgtggggcatccccccctgccccccaccctatgagttctgtggcggcatggcctactgcggcccccaggtgggcgtgggcctggtgccccagggcggcctggagaccagccagcctgagggggaggccggcggcggggagcagctgcgctggggcctgcccggggccctgcaccgccacccctggtgccgggaggcctag

SEQ ID NO: 3370 - DNA, 798 bp, synthetic construct; identical to SEQ ID NO: 3361
  misc_feature 1..798: note = source = /note="Description of Artificial Sequence: Synthetic coding sequence"
  source 1..798: mol_type = other DNA

SEQ ID NO: 3371 - DNA, 1083 bp, synthetic construct; identical to SEQ ID NO: 3360
  misc_feature 1..1083: note = source = /note="Description of Artificial Sequence: Synthetic coding sequence"
  source 1..1083: mol_type = other DNA

SEQ ID NO: 3372 - DNA, 372 bp, synthetic construct
  misc_feature 1..372: note = source = /note="Description of Artificial Sequence: Synthetic coding sequence"
  source 1..372: mol_type = other DNA
atggccggccacctggccagtgactttgccttcagccccccacctgggggcggcggagatggccctgggggccctgagcccggctgggtggaccccaggacctggctgtccttccagggccccccaggcggccctggcatcggccctggggtgggccctggcagcgaggtgtggggcatccccccctgccccccaccctatgagttctgtggcggcatggcctactgcggcccccaggtgggcgtgggcctggtgccccagggcggcctggagaccagccagcctgagggggaggccggcgtgggcgtggagacccccatgggccccccaagaagccctgccccccaccccttccccttccccctgctgtag

SEQ ID NO: 3373 - DNA, 558 bp, synthetic construct
  misc_feature 1..558: note = source = /note="Description of Artificial Sequence: Synthetic coding sequence"
  source 1..558: mol_type = other DNA
atggccggccacctggccagtgactttgccttcagccccccacctgggggcggcggagatggccctgggggccctgagcccggctgggtggaccccaggacctggctgtccttccagggccccccaggcggccctggcatcggccctggggtgggccctggcagcgaggtgtggggcatccccccctgccccccaccctatgagttctgtggcggcatggcctactgcggcccccaggtgggcgtgggcctggtgccccagggcggcctggagaccagccagcctgagggggaggccggcgtgggcgtggagagcaacagtgatggagccagccctgagccctgcaccgtgaccccaggagctgtgaagctggagaaggagaagctggagcagaaccctgaggagagccaggacatcaaggccctgcagaaggagctggagcagtttgccaagctgctgaagcagaagaggatcaccctgggctacacccaggctgatgtgcaccctgggggcagcatctgggagggcatccagcccaatgaccacctgcccctgtag

SEQ ID NO: 3374 - DNA, 372 bp, synthetic construct; identical to SEQ ID NO: 3372
  misc_feature 1..372: note = source = /note="Description of Artificial Sequence: Synthetic coding sequence"
  source 1..372: mol_type = other DNA

SEQ ID NO: 3375 - DNA, 558 bp, synthetic construct; identical to SEQ ID NO: 3373
  misc_feature 1..558: note = source = /note="Description of Artificial Sequence: Synthetic coding sequence"
  source 1..558: mol_type = other DNA

SEQ ID NO: 3376 - DNA, 372 bp, synthetic construct; identical to SEQ ID NO: 3372
  misc_feature 1..372: note = source = /note="Description of Artificial Sequence: Synthetic coding sequence"
  source 1..372: mol_type = other DNA

SEQ ID NO: 3377 - DNA, 558 bp, synthetic construct; identical to SEQ ID NO: 3373
  misc_feature 1..558: note = source = /note="Description of Artificial Sequence: Synthetic coding sequence"
  source 1..558: mol_type = other DNA

SEQ ID NO: 3378 - DNA, 558 bp, synthetic construct; identical to SEQ ID NO: 3373
  misc_feature 1..558: note = source = /note="Description of Artificial Sequence: Synthetic coding sequence"
  source 1..558: mol_type = other DNA

SEQ ID NO: 3379 - DNA, 372 bp, synthetic construct; identical to SEQ ID NO: 3372
  misc_feature 1..372: note = source = /note="Description of Artificial Sequence: Synthetic coding sequence"
  source 1..372: mol_type = other DNA

SEQ ID NO: 3380 - DNA, 372 bp, synthetic construct; identical to SEQ ID NO: 3372
  misc_feature 1..372: note = source = /note="Description of Artificial Sequence: Synthetic coding sequence"
  source 1..372: mol_type = other DNA

SEQ ID NO: 3381 - DNA, 2079 bp, synthetic construct
  misc_feature 1..2079: note = source = /note="Description of Artificial Sequence: Synthetic coding sequence"
  source 1..2079: mol_type = other DNA
atgggcaccgtgagcagcagaagatcctggtggcccctgcccctgctgctgctgctgctgctgctgctgggccctgctggggcccgggcccaggaggatgaagatggagactatgaggagctggtgctggccctgcggagtgaagaagatggcctggccgaggcccctgagcacggcaccacagccaccttccaccgctgtgccaaggacccctggaggctgcccggcacctacgtggtggtgctgaaggaggagacccacctgagccagagcgagaggacagcccggcggctgcaggcccaggccgcccggcggggctacctgaccaagatcctgcacgtgttccacggcctgctgcccggcttcctggtgaagatgtctggggacctgctggagctggccctgaagctgccccacgtggactacatcgaggaggacagctctgtgtttgcccagagcatcccctggaacctggagcgcatcaccccaccccgctacagagcagatgagtaccagcccccagatggcggcagcctggtggaggtgtacctgctggacaccagcatccagagcgaccaccgggagattgagggccgggtgatggtgacagactttgaaaatgtgcctgaagaagatggcacccgcttccaccggcaggccagcaaatgtgacagccacggcacccacctggccggcgtggtgtctggaagagatgctggggtggccaagggggcctccatgaggagcctgcgggtgctgaactgccagggcaagggcaccgtgtctggcaccctcatcggcctggagttcatcaggaagagccagctggtgcagcctgtgggccccctggtggtgctgctgcccctggccggcggctacagccgggtgctgaatgctgcctgccagaggctggcccgggccggcgtggtgctggtgacagctgctggcaacttcagagatgatgcctgcctgtacagccctgccagcgcccctgaggtgatcaccgtgggcgccaccaatgcccaggaccagcctgtgaccctgggcaccctgggcaccaactttggccgctgtgtggacctgtttgcccctggagaggacatcattggagccagcagtgactgcagcacctgctttgtgtcccagagcggcaccagccaggccgccgcccacgtggccggcattgctgccatgatgctgtctgctgagcctgagctgaccctggccgagctgcggcagaggctcatccacttcagcgccaaggatgtgatcaatgaggcctggttccctgaggaccagagggtgctgacccccaacctggtggccgccctgccccccagcacccatggagctggctggcagctgttctgcaggacagtgtggagcgcccacagcggccccaccaggatggccacagctgtggcccgctgtgccccagatgaggagctgctgagctgcagcagcttcagccgcagcggcaagagaagaggagagaggatggaggcccagggcggcaagctggtgtgccgggcccacaatgcctttggaggagaaggagtgtatgccatcgcccgctgctgcctgctgccccaggccaactgcagcgtgcacacagcccccccagctgaggcctccatgggcaccagggtgcactgccaccagcagggccacgtgctgaccggctgcagcagccactgggaggtggaggacctgggcacccacaagccccctgtgctgcggccccggggccagcccaaccagtgtgtgggccaccgggaggccagcatccacgccagctgctgccacgcccctggcctggagtgcaaggtgaaggagcacggcatcccagccccccaggagcaggtgacagtggcctgtgaggagggctggaccctgaccggctgcagcgccctgcccggcaccagccacgtgctgggcgcctatgctgtggacaacacctgtgtggtgcgcagcagagatgtgtccaccaccggcagcaccagcgagggcgctgtgacagctgtggccatctgctgccgcagccgccacctggcccaggccagccaggagctgcagtag

SEQ ID NO: 3382 - DNA, 618 bp, synthetic construct
  misc_feature 1..618: note = source = /note="Description of Artificial Sequence: Synthetic coding sequence"
  source 1..618: mol_type = other DNA
atgggcaccgtgagcagcagaagatcctggtggcccctgcccctgctgctgctgctgctgctgctgctgggccctgctggggcccgggcccaggaggatgaagatggagactatgaggagctggtgctggccctgcggagtgaagaagatggcctggccgaggcccctgagcacggcaccacagccaccttccaccgctgtgccaaggacccctggaggctgcccggcacctacgtggtggtgctgaaggaggagacccacctgagccagagcgagaggacagcccggcggctgcaggcccaggccgcccggcggggctacctgaccaagatcctgcacgtgttccacggcctgctgcccggcttcctggtgaagatgtctggggacctgctggagctggccctgaagctgccccacgtggactacatcgaggaggacagctctgtgtttgcccagagcatcccctggaacctggagcgcatcaccccaccccgctacagagcagatgagtaccagcccccagcctacctggaggaccactgcggcggccacagaggagctgtgcagatggccctgcagaagacccaggagaccctgggccaggagcagtttgattag

SEQ ID NO: 3383 - DNA, 801 bp, synthetic construct
  misc_feature 1..801: note = source = /note="Description of Artificial Sequence: Synthetic coding sequence"
  source 1..801: mol_type = other DNA
atggtgacagactttgaaaatgtgcctgaagaagatggcacccgcttccaccggcaggccagcaaatgtgacagccacggcacccacctggccggcgtggtgtctggaagagatgctggggtggccaagggggcctccatgaggagcctgcgggtgctgaactgccagggcaagggcaccgtgtctggcaccctcatcggcctggagttcatcaggaagagccagctggtgcagcctgtgggccccctggtggtgctgctgcccctggccggcggctacagccgggtgctgaatgctgcctgccagaggctggcccgggccggcgtggtgctggtgacagctgctggcaacttcagagatgatgcctgcctgtacagccctgccagcgcccctgaggtgatcaccgtgggcgccaccaatgcccaggaccagcctgtgaccctgggcaccctgggcaccaactttggccgctgtgtggacctgtttgcccctggagaggacatcattggagccagcagtgactgcagcacctgctttgtgtcccagagcggcaccagccaggccgccgcccacgtggccggcattgctgccatgatgctgtctgctgagcctgagctgaccctggccgagctgcggcagaggctcatccacttcagcgccaaggatgtgatcaatgaggcctggttccctgaggaccagagggtgggcagctgctttgctggcctgtatggccagcacacccggggcctgcacggctggccccagcccagccctgctgccccccagatgaggagctgctag

SEQ ID NO: 3384 - DNA, 3972 bp, synthetic construct
  misc_feature 1..3972: note = source = /note="Description of Artificial Sequence: Synthetic coding sequence"
  source 1..3972: mol_type = other DNA
atggaggatggcggcctgacagcctttgaggaggaccagcgctgcctgagccagagcctgcccctgcctgtgtctgctgagggccctgctgcccagaccacagctgagcccagccgctccttcagcagcgcccaccgccacctgagcagaagaaatggcctgagccggctgtgccagagcaggacagccctgtctgaggaccgctggagcagctactgcctgagcagcctggccgcccagaacatctgcaccagcaagctgcactgcccagctgcccctgagcacacagaccccagcgagccccggggctctgtgtcctgctgcagcctgctgcggggcctgagcagcggctggagcagccccctgctgcctgcccctgtgtgcaaccccaacaaggccatcttcaccgtggatgccaagaccacagagatcctggtggccaatgacaaggcctgtggcctgctgggctacagcagccaggacctgattggccagaagctgacccagttcttcctgcggagtgacagtgatgtggtggaggccctgtctgaggagcacatggaggctgatggccatgctgctgtggtgtttggaacagtggtggacatcatcagccgctctggagagaagatccctgtgtctgtgtggatgaagaggatgaggcaggagcggcggctgtgctgcgtggtggtgctggagcctgtggagcgggtgtccacctgggtggccttccagagtgatggcaccgtgaccagctgtgacagcctgtttgcccacctgcacggctacgtgtctggagaagatgtggccggccagcacatcacagacctgatccccagcgtgcagctgccccccagcggccagcacatccccaagaacctgaagatccagaggtctgtgggccgggccagagatggcaccaccttccccctgagcctgaagctgaagagccagcccagcagcgaggaggccaccaccggggaggccgcccctgtgtctggctaccgggcctctgtgtgggtgttctgcaccatcagcggcctcatcaccctgctgcctgatggcaccatccacggcatcaaccacagctttgccctgaccctgtttggctacggcaagacagagctgctgggcaagaacatcaccttcctgatccctggcttctacagctacatggacctggcctacaacagcagcctgcagctgcctgacctggccagctgcctggatgtgggcaatgaaagtggctgtggggagaggaccctggacccctggcagggccaggaccctgctgagggcggccaggacccccgcatcaacgtggtgctggccggcggccacgtggtgcccagagatgagatcaggaagctgatggagagccaggacatcttcaccggcacccagacagagctgattgctgggggccagctgctgagctgcctgagcccccagcctgcccctggggtggacaacgtgcctgagggcagcctgcctgtgcacggggagcaggccctgcccaaggaccagcagatcacagccctgggccgggaggagcctgtggccatcgagagccctggccaggacctgctgggggagagccgctctgagcctgtggatgtgaagccctttgccagctgtgaagattctgaggcccctgtgcctgcagaagatggcggcagtgatgctggcatgtgtggcctgtgccagaaggcccagctggagaggatgggcgtgtctggccccagcggcagtgacctgtgggccggggctgctgtggccaagccccaggccaagggccagctggccggcggcagcctgctgatgcactgcccctgctacggcagcgagtggggcctgtggtggaggagccaggacctggcccccagccccagcggcatggccggcctgagctttggcacccccaccctggatgagccctggctgggcgtggagaatgaccgggaggagctgcagacctgcctgatcaaggagcagctgagccagctgagcctggccggggccctggatgtgccccacgccgagctggtgcccacagagtgccaggccgtgacagcccctgtgagcagctgtgacctgggcggccgggacctgtgtggcggctgcaccggcagcagcagcgcctgctacgccctggccacagacctgcccggcggcctggaggccgtggaggcccaggaggtggatgtgaacagcttctcctggaacctgaaggagctgttcttcagtgaccagacagaccagaccagcagcaactgcagctgtgccaccagcgagctgcgggagacccccagcagcctggccgtgggcagtgaccctgatgtgggcagcctgcaggagcagggcagctgtgtgctggatgaccgggagctgctgctgctgaccggcacctgtgtggacctgggccagggccgccgcttccgggagagctgtgtgggccatgaccccacagagcccctggaggtgtgcctggtgtcctctgagcactatgctgccagtgaccgggagagccctggccacgtgcccagcaccctggatgctggccctgaggacacctgccccagcgctgaggagccccggctgaatgtgcaggtgaccagcacccctgtgattgtgatgagaggagctgctggcctgcagcgggagatccaggagggcgcctacagcggcagctgctaccacagagatggcctgcggctgagcatccagtttgaggtgagaagagtggagctgcagggccccacccccctcttctgctgctggctggtgaaggacctgctgcacagccagagggacagcgctgcccggaccaggctcttcctggccagcctgcccggcagcacccacagcacagctgctgagctgaccggccccagcctggtggaggtgctgcgggcccggccctggtttgaggagccccccaaggctgtggagctggagggcctggccgcctgtgagggggagtacagccagaagtacagcaccatgagccccctgggcagcggggccttcggctttgtgtggacagctgtggacaaggagaagaacaaggaggtggtggtgaagttcatcaagaaggagaaggtgctggaggactgctggattgaggaccccaagctgggcaaggtgaccctggagatcgccatcctgagccgggtggagcacgccaacatcatcaaggtgctggacatctttgagaaccagggcttcttccagctggtgatggagaagcacggcagcggcctggacctgtttgccttcatcgacagacacccccggctggatgagcccctggccagctacatcttccggcagctggtgtctgctgtgggctacctgcggctgaaggacatcatccaccgggacatcaaggatgagaacatcgtgattgctgaggacttcaccatcaagctgattgactttggatctgctgcctacctggagcggggcaagctgttctacaccttctgtggcaccatcgagtactgtgcccctgaggtgctgatgggcaacccctaccggggccctgagctggagatgtggagcctgggcgtgaccctgtacaccctggtgtttgaggagaaccccttctgtgagctggaggagaccgtggaggccgccatccaccccccctacctggtgtccaaggagctgatgagcctggtgtctggcctgctgcagcctgtgcctgagaggaggaccaccctggagaagctggtgacagacccctgggtgacccagcctgtgaacctggccgactacacctgggaggaggtgttccgggtgaacaagccagagagcggcgtgctgtctgctgccagcctggagatgggcaacagaagcctgagtgatgtggcccaggcccaggagctgtgtggcggccctgtgcctggagaggcccccaacggccagggctgcctgcaccctggggacccccggctgctgaccagctag

SEQ ID NO: 3385 - DNA, 1488 bp, synthetic construct
  misc_feature 1..1488: note = source = /note="Description of Artificial Sequence: Synthetic coding sequence"
  source 1..1488: mol_type = other DNA
atgtggcagctgaccagcctgctgctgtttgtggccacctggggcatcagcggcaccccagcccccctggacagcgtcttcagcagcagcgagcgggcccaccaggtgctgcgcatcaggaagagggccaacagcttcctggaggagctgcggcacagcagcctggagcgggagtgcatcgaggagatctgtgactttgaggaggccaaggagatcttccagaatgtggatgacaccctggccttctggagcaagcacgtggatggagaccagtgcctggtgctgcccctggagcacccctgtgccagcctgtgctgcggccacggcacctgcattgatggcatcggcagcttcagctgtgactgccgcagcggctgggagggccgcttctgccagagaggagagggggagcgctggatgctggccggcggcggggccggcctgggccctggctggggccggggcaccagcaccagctgccccaggcctcccctgcctgctgaggtgtccttcctgaactgcagcctggacaatggaggctgcacccactactgcctggaggaggtgggctggaggcgctgcagctgtgcccctggctacaagctgggagatgacctgctgcagtgccaccctgctgtgaagttcccctgtggccggccctggaagaggatggagaagaagaggagccacctgaagagggacacagaggaccaggaggaccaggtggacccccggctgattgatggcaagatgaccaggagaggagacagcccctggcaggtggtgctgctggacagcaagaagaagctggcctgtggggctgtgctgatccaccccagctgggtgctgacagctgcccactgcatggatgagagcaagaagctgctggtgcggctgggggagtatgacctgcggcgctgggagaagtgggagctggacctggacatcaaggaggtgtttgtgcaccccaactacagcaagagcaccacagacaatgacatcgccctgctgcacctggcccagcctgccaccctgagccagaccatcgtgcccatctgcctgcctgattctggcctggccgagcgggagctgaaccaggccggccaggagaccctggtgacaggctggggctaccacagcagccgggagaaggaggccaagaggaacagaacatttgtgctgaacttcatcaagatccctgtggtgccccacaatgaatgttctgaggtgatgagcaacatggtgtctgagaacatgctgtgtgccggcatcctgggggaccggcaggatgcctgtgagggggacagcggcggccccatggtggccagcttccacggcacctggttcctggtgggcctggtgtcctggggcgagggctgcggcctgctgcacaactacggcgtgtacaccaaggtgagccgctacctggactggatccacggccacatccgggacaaggaggccccccagaagtcctgggccccctag

SEQ ID NO: 3386 - DNA, 1386 bp, synthetic construct
  misc_feature 1..1386: note = source = /note="Description of Artificial Sequence: Synthetic coding sequence"
  source 1..1386: mol_type = other DNA
atgtggcagctgaccagcctgctgctgtttgtggccacctggggcatcagcggcaccccagcccccctggacagcgtcttcagcagcagcgagcgggcccaccaggtgctgcgcatcaggaagagggccaacagcttcctggaggagctgcggcacagcagcctggagcgggagtgcatcgaggagatctgtgactttgaggaggccaaggagatcttccagaatgtggatgacaccctggccttctggagcaagcacgtggatggagaccagtgcctggtgctgcccctggagcacccctgtgccagcctgtgctgcggccacggcacctgcattgatggcatcggcagcttcagctgtgactgccgcagcggctgggagggccgcttctgccagcgggaggtgtccttcctgaactgcagcctggacaatggaggctgcacccactactgcctggaggaggtgggctggaggcgctgcagctgtgcccctggctacaagctgggagatgacctgctgcagtgccaccctgctgtgaagttcccctgtggccggccctggaagaggatggagaagaagaggagccacctgaagagggacacagaggaccaggaggaccaggtggacccccggctgattgatggcaagatgaccaggagaggagacagcccctggcaggtggtgctgctggacagcaagaagaagctggcctgtggggctgtgctgatccaccccagctgggtgctgacagctgcccactgcatggatgagagcaagaagctgctggtgcggctgggggagtatgacctgcggcgctgggagaagtgggagctggacctggacatcaaggaggtgtttgtgcaccccaactacagcaagagcaccacagacaatgacatcgccctgctgcacctggcccagcctgccaccctgagccagaccatcgtgcccatctgcctgcctgattctggcctggccgagcgggagctgaaccaggccggccaggagaccctggtgacaggctggggctaccacagcagccgggagaaggaggccaagaggaacagaacatttgtgctgaacttcatcaagatccctgtggtgccccacaatgaatgttctgaggtgatgagcaacatggtgtctgagaacatgctgtgtgccggcatcctgggggaccggcaggatgcctgtgagggggacagcggcggccccatggtggccagcttccacggcacctggttcctggtgggcctggtgtcctggggcgagggctgcggcctgctgcacaactacggcgtgtacaccaaggtgagccgctacctggactggatccacggccacatccgggacaaggaggccccccagaagtcctgggccccctag

SEQ ID NO: 3387 - DNA, 351 bp, synthetic construct
  misc_feature 1..351: note = source = /note="Description of Artificial Sequence: Synthetic coding sequence"
  source 1..351: mol_type = other DNA
atgtggcagctgaccagcctgctgctgtttgtggccacctggggcatcagcggcaccccagcccccctggacagcgtcttcagcagcagcgagcgggcccaccaggtgctgcgcatcaggaagagggccaacagcttcctggaggagctgcggcacagcagcctggagcgggagtgcatcgaggagatctgtgactttgaggaggccaaggagatcttccagaatgtggatgacaccctggccttctggagcaagcacgtggatggagaccagtgcctggtgctgcccctggagcacccctgtgccagcctgtgctgcggccacggcacctgcattgatggcattggatag

SEQ ID NO: 3388 - DNA, 381 bp, synthetic construct
  misc_feature 1..381: note = source = /note="Description of Artificial Sequence: Synthetic coding sequence"
  source 1..381: mol_type = other DNA
atgtggcagctgaccagcctgctgctgtttgtggccacctggggcatcagcggcaccccagcccccctggacagcgtcttcagcagcagcgagcgggcccaccaggtgctgcgcatcaggaagagggccaacagcttcctggaggagctgcggcacagcagcctggagcgggagtgcatcgaggagatctgtgactttgaggaggccaaggagatcttccagaatgtggatgacaccctggccttctggagcaagcacgtggatggagaccagtgcctggtgctgcccctggagcacccctgtgccagcctgtgctgcggccacggcacctgcattgatggcatcggcagcttcagctgtgactgccgcagcggctggtag

SEQ ID NO: 3389 - DNA, 1551 bp, synthetic construct
  misc_feature 1..1551: note = source = /note="Description of Artificial Sequence: Synthetic coding sequence"
  source 1..1551: mol_type = other DNA
atggctgctggaagaaggacctgcagcatcagcaccacccggccctgtgccagcgccagcaggatgtggcagctgaccagcctgctgctgtttgtggccacctggggcatcagcggcaccccagcccccctggacagcgtcttcagcagcagcgagcgggcccaccaggtgctgcgcatcaggaagagggccaacagcttcctggaggagctgcggcacagcagcctggagagagaatgtattgaggagatctgtgactttgaggaggccaaggagatcttccagaatgtggatgacaccctggccttctggagcaagcacgtggatggagaccagtgcctggtgctgcccctggagcacccctgtgccagcctgtgctgcggccacggcacctgcattgatggcatcggcagcttcagctgtgactgccgcagcggctgggagggccgcttctgccagagaggagagggggagcgctggatgctggccggcggcggggccggcctgggccctggctggggccggggcaccagcaccagctgcccccggccccccctgcctgctgaggtgtccttcctgaactgcagcctggacaatggaggctgcacccactactgcctggaggaggtgggctggaggcgctgcagctgtgcccctggctacaagctgggagatgacctgctgcagtgccaccctgctgtgaagttcccctgtggccggccctggaagaggatggagaagaagaggagccacctgaagagggacacagaggaccaggaggaccaggtggacccccggctgattgatggcaagatgacccggcggggggacagcccctggcaggtggtgctgctggacagcaagaagaagctggcctgtggggctgtgctgatccaccccagctgggtgctgacagctgcccactgcatggatgagagcaagaagctgctggtgcggctgggggagtatgacctgcggcgctgggagaagtgggagctggacctggacatcaaggaggtgtttgtgcaccccaactacagcaagagcaccacagacaatgacatcgccctgctgcacctggcccagcctgccaccctgagccagaccatcgtgcccatctgcctgcctgacagcggcctggccgagcgggagctgaaccaggccggccaggagaccctggtgacaggctggggctaccacagcagccgggagaaggaggccaagaggaacagaacatttgtgctgaacttcatcaagatccctgtggtgccccacaatgaatgttctgaggtgatgagcaacatggtgtctgagaacatgctgtgtgccggcatcctgggggaccggcaggatgcctgtgagggggacagcggcggccccatggtggccagcttccacggcacctggttcctggtgggcctggtgtcctggggcgagggctgcggcctgctgcacaactatggagtgtacaccaaggtgagccgctacctggactggattcatggccacatccgggacaaggaggccccccagaagtcctgggccccctag

SEQ ID NO: 3390 - DNA, 1263 bp, synthetic construct
  misc_feature 1..1263: note = source = /note="Description of Artificial Sequence: Synthetic coding sequence"
  source 1..1263: mol_type = other DNA
atgtggatgacccactggcccagcggccccagcaccagcacagtgaccagcgcctggagctgcccctggagcacccgggccccagcctgtgccgccggcacagcccgggccagcacagccagcgctgccagcgctgccacagctgctgctgctggccgggccgccagcgccagcgctgtgcggggccggggcggctgctggaggggcggggccggcctgggccctggctggggccggggcaccagcaccagctgcccccggccccccctgcctgctgaggtgtccttcctgaactgcagcctggacaatggaggctgcacccactactgcctggaggaggtgggctggaggcgctgcagctgtgcccctggctacaagctgggagatgacctgctgcagtgccaccctgctgtgaagttcccctgtggccggccctggaagaggatggagaagaagaggagccacctgaagagggacacagaggaccaggaggaccaggtggacccccggctgattgatggcaagatgacccggcggggggacagcccctggcaggtggtgctgctggacagcaagaagaagctggcctgtggggctgtgctgatccaccccagctgggtgctgacagctgcccactgcatggatgagagcaagaagctgctggtgcggctgggggagtatgacctgcggcgctgggagaagtgggagctggacctggacatcaaggaggtgtttgtgcaccccaactacagcaagagcaccacagacaatgacatcgccctgctgcacctggcccagcctgccaccctgagccagaccatcgtgcccatctgcctgcctgacagcggcctggccgagcgggagctgaaccaggccggccaggagaccctggtgacaggctggggctaccacagcagccgggagaaggaggccaagaggaacagaacatttgtgctgaacttcatcaagatccctgtggtgccccacaatgaatgttctgaggtgatgagcaacatggtgtctgagaacatgctgtgtgccggcatcctgggggaccggcaggatgcctgtgagggggacagcggcggccccatggtggccagcttccacggcacctggttcctggtgggcctggtgtcctggggcgagggctgcggcctgctgcacaactatggagtgtacaccaaggtgagccgctacctggactggattcatggccacatccgggacaaggaggccccccagaagtcctgggccccctag

SEQ ID NO: 3391 - DNA, 354 bp, synthetic construct
  misc_feature 1..354: note = source = /note="Description of Artificial Sequence: Synthetic coding sequence"
  source 1..354: mol_type = other DNA
atgcccaggctcttcttcttccacctgctgggcgtgtgcctgctgctgaaccagttcagcagagctgtggccgacagctggatggaggaggtgatcaagctgtgtggccgggagctggtgcgggcccagatcgccatctgtggcatgagcacctggagcaagaggagcctgagccaggaggatgccccccagacccccaggcctgtggccggggacttcatccagacagtgtccctgggcatcagcccagatggcggcaaggccctgaggacaggcagctgcttcacccgggagttcctgggcgccctgagcaagctgtgccaccccagcagcaccaagatccagaagccctag

SEQ ID NO: 3392 - DNA, 558 bp, synthetic construct
  misc_feature 1..558: note = source = /note="Description of Artificial Sequence: Synthetic coding sequence"
  source 1..558: mol_type = other DNA
atgcccaggctcttcttcttccacctgctgggcgtgtgcctgctgctgaaccagttcagcagagctgtggccgacagctggatggaggaggtgatcaagctgtgtggccgggagctggtgcgggcccagatcgccatctgtggcatgagcacctggagcaagaggagcctgagccaggaggatgccccccagacccccaggcctgtggccgagatcgtgcccagcttcatcaacaaggacacagagaccatcaacatgatgtctgaatttgtggccaacctgccccaggagctgaagctgaccctgtctgagatgcagcctgccctgccccagctgcagcagcacgtgcctgtgctgaaggacagcagcctgctgtttgaggagttcaagaagctgatccggaaccggcagagcgaggccgctgacagcagccccagcgagctgaagtacctgggcctggacacccacagcaggaagaagaggcagctgtacagcgccctggccaacaagtgctgccacgtgggctgcaccaagaggagcctggcccgcttctgctag

SEQ ID NO: 3393 - DNA, 1047 bp, synthetic construct
  misc_feature 1..1047: note = source = /note="Description of Artificial Sequence: Synthetic coding sequence"
  source 1..1047: mol_type = other DNA
atgaatggaacagagggccccaacttctacgtgcccttcagcaatgccactggagtggtgcgcagcccctttgagtacccccagtactacctggccgagccctggcagttctccatgctggccgcctacatgttcctgctgattgtgctgggcttccccatcaacttcctgaccctgtatgtgacagtgcagcacaagaagctgcggacccccctgaactacatcctgctgaacctggccgtggccgacctcttcatggtgctgggcggcttcaccagcaccctgtacaccagcctgcacggctactttgtgtttggccccaccggctgcaacctggagggcttctttgccaccctgggcggggagatcgccctgtggagcctggtggtgctggccatcgagcgctacgtggtggtgtgcaagcccatgagcaacttccgctttggagagaaccacgccatcatgggcgtggccttcacctgggtgatggccctggcctgtgccgccccacccctggccggctggagccgctacatccctgagggcctgcagtgcagctgtggcatcgactactacaccctgaagccagaggtgaacaatgaaagctttgtgatctacatgtttgtggtgcacttcaccatccccatgatcatcatcttcttctgctacggccagctggtgttcaccgtgaaggaggccgccgcccagcagcaggagagcgccaccacccagaaggccgagaaggaggtgaccaggatggtgatcatcatggtgattgccttcctgatctgctgggtgccctatgcctctgtggccttctacatcttcacccaccagggcagcaactttggccccatcttcatgaccatcccagccttctttgccaagtctgctgccatctacaaccctgtgatctacatcatgatgaacaagcagttcaggaactgcatgctgaccaccatctgctgcggcaagaaccccctgggagatgatgaggccagcgccaccgtgtccaagacagagaccagccaggtggccccagcctag

SEQ ID NO: 3394 - DNA, 1257 bp, synthetic construct
  misc_feature 1..1257: note = source = /note="Description of Artificial Sequence: Synthetic coding sequence"
  source 1..1257: mol_type = other DNA
atgcccagctctgtgtcctggggcatcctgctgctggccggcctgtgctgcctggtgcctgtgtccctggccgaggacccccagggagatgctgcccagaagacagacaccagccaccacgaccaggaccaccccaccttcaacaagatcacccccaacctggccgagtttgccttcagcctgtaccggcagctggcccaccagagcaacagcaccaacatcttcttcagccctgtgtccatcgccacagcctttgccatgctgagcctgggcaccaaggctgacacccatgatgagatcctggagggcctgaacttcaacctgacagagatccctgaggcccagatccacgagggcttccaggagctgctgcggaccctgaaccagcctgacagccagctgcagctgaccactggaaatggcctcttcctgtctgagggcctgaagctggtggacaagttcctggaggatgtgaagaagctgtaccacagcgaggccttcaccgtgaactttggagacacagaggaggccaagaagcagatcaatgactatgtggagaagggcacccagggcaagatcgtggacctggtgaaggagctggaccgggacacagtgtttgccctggtgaactacatcttcttcaagggcaagtgggagcggccctttgaggtgaaggacacagaggaggaggacttccacgtggaccaggtgaccaccgtgaaggtgcccatgatgaagaggctgggcatgttcaacatccagcactgcaagaagctgagctcctgggtgctgctgatgaagtacctgggcaatgccacagccatcttcttcctgcctgatgagggcaagctgcagcacctggagaatgagctgacccatgacatcatcaccaagttcctggagaatgaagatagaagaagtgccagcctgcacctgcccaagctgagcatcaccggcacctatgacctgaagtctgtgctgggccagctgggcatcaccaaggtgttcagcaatggagctgacctgtctggagtgacagaggaggcccccctgaagctgagcaaggctgtgcacaaggctgtgctgaccattgatgagaagggcacagaagctgctggggccatgttcctggaggccatccccatgagcatccccccagaggtgaagttcaacaagccctttgtgttcctgatgattgagcagaacaccaagagccccctcttcatgggcaaggtggtgaaccccacccagaagtag

SEQ ID NO: 3395 - DNA, 1257 bp, synthetic construct; identical to SEQ ID NO: 3394
  misc_feature 1..1257: note = source = /note="Description of Artificial Sequence: Synthetic coding sequence"
  source 1..1257: mol_type = other DNA

SEQ ID NO: 3396 - DNA, 1257 bp, synthetic construct; identical to SEQ ID NO: 3394
  misc_feature 1..1257: note = source = /note="Description of Artificial Sequence: Synthetic coding sequence"
  source 1..1257: mol_type = other DNA

SEQ ID NO: 3397 - DNA, 1080 bp, synthetic construct
  misc_feature 1..1080: note = source = /note="Description of Artificial Sequence: Synthetic coding sequence"
  source 1..1080: mol_type = other DNA
atgcccagctctgtgtcctggggcatcctgctgctggccggcctgtgctgcctggtgcctgtgtccctggccgaggacccccagggagatgctgcccagaagacagacaccagccaccacgaccaggaccaccccaccttcaacaagatcacccccaacctggccgagtttgccttcagcctgtaccggcagctggcccaccagagcaacagcaccaacatcttcttcagccctgtgtccatcgccacagcctttgccatgctgagcctgggcaccaaggctgacacccatgatgagatcctggagggcctgaacttcaacctgacagagatccctgaggcccagatccacgagggcttccaggagctgctgcggaccctgaaccagcctgacagccagctgcagctgaccactggaaatggcctcttcctgtctgagggcctgaagctggtggacaagttcctggaggatgtgaagaagctgtaccacagcgaggccttcaccgtgaactttggagacacagaggaggccaagaagcagatcaatgactatgtggagaagggcacccagggcaagatcgtggacctggtgaaggagctggaccgggacacagtgtttgccctggtgaactacatcttcttcaagggcaagtgggagcggccctttgaggtgaaggacacagaggaggaggacttccacgtggaccaggtgaccaccgtgaaggtgcccatgatgaagaggctgggcatgttcaacatccagcactgcaagaagctgagctcctgggtgctgctgatgaagtacctgggcaatgccacagccatcttcttcctgcctgatgagggcaagctgcagcacctggagaatgagctgacccatgacatcatcaccaagttcctggagaatgaagatagaagaagtgccagcctgcacctgcccaagctgagcatcaccggcacctatgacctgaagtctgtgctgggccagctgggcatcaccaaggtgttcagcaatggagctgacctgtctggagtgacagaggaggcccccctgaagctgagcaaggtgcgcagcccctag

SEQ ID NO: 3398 - DNA, 1257 bp, synthetic construct; identical to SEQ ID NO: 3394
  misc_feature 1..1257: note = source = /note="Description of Artificial Sequence: Synthetic coding sequence"
  source 1..1257: mol_type = other DNA

SEQ ID NO: 3399 - DNA, 1257 bp, synthetic construct; identical to SEQ ID NO: 3394
  misc_feature 1..1257: note = source = /note="Description of Artificial Sequence: Synthetic coding sequence"
  source 1..1257: mol_type = other DNA

SEQ ID NO: 3400 - DNA, 1257 bp, synthetic construct; identical to SEQ ID NO: 3394
  misc_feature 1..1257: note = source = /note="Description of Artificial Sequence: Synthetic coding sequence"
  source 1..1257: mol_type = other DNA

SEQ ID NO: 3401 - DNA, 1257 bp, synthetic construct; identical to SEQ ID NO: 3394
  misc_feature 1..1257: note = source = /note="Description of Artificial Sequence: Synthetic coding sequence"
  source 1..1257: mol_type = other DNA

SEQ ID NO: 3402 - DNA, 1257 bp, synthetic construct; identical to SEQ ID NO: 3394
  misc_feature 1..1257: note = source = /note="Description of Artificial Sequence: Synthetic coding sequence"
  source 1..1257: mol_type = other DNA

SEQ ID NO: 3403 - DNA, 279 bp, synthetic construct
  misc_feature 1..279: note = source = /note="Description of Artificial Sequence: Synthetic coding sequence"
  source 1..279: mol_type = other DNA
atgcccagctctgtgtcctggggcatcctgctgctggccggcctgtgctgcctggtgcctgtgtccctggccgaggacccccagggagatgctgcccagaagacagacaccagccaccacgaccaggaccaccccaccttcaacaagatcacccccaacctggccgagtttgccttcagcctgtaccggcagctggcccaccagagcaacagcaccaacatcttcttcagccctgtgtccatcgccacagcctttgccatgctgagcctgggcacctag

SEQ ID NO: 3404 - DNA, 471 bp, synthetic construct
  misc_feature 1..471: note = source = /note="Description of Artificial Sequence: Synthetic coding sequence"
  source 1..471: mol_type = other DNA
atgcccagctctgtgtcctggggcatcctgctgctggccggcctgtgctgcctggtgcctgtgtccctggccgaggacccccagggagatgctgcccagaagacagacaccagccaccacgaccaggaccaccccaccttcaacaagatcacccccaacctggccgagtttgccttcagcctgtaccggcagctggcccaccagagcaacagcaccaacatcttcttcagccctgtgtccatcgccacagcctttgccatgctgagcctgggcaccaaggctgacacccatgatgagatcctggagggcctgaacttcaacctgacagagatccctgaggcccagatccacgagggcttccaggagctgctgcggaccctgaaccagcctgacagccagctgcagctgaccactggaaatggcctcttcctgtctgagggcctgaagctggtggacaagttcctggagtag

SEQ ID NO: 3405 - DNA, 354 bp, synthetic construct
  misc_feature 1..354: note = source = /note="Description of Artificial Sequence: Synthetic coding sequence"
  source 1..354: mol_type = other DNA
atgcccagctctgtgtcctggggcatcctgctgctggccggcctgtgctgcctggtgcctgtgtccctggccgaggacccccagggagatgctgcccagaagacagacaccagccaccacgaccaggaccaccccaccttcaacaagatcacccccaacctggccgagtttgccttcagcctgtaccggcagctggcccaccagagcaacagcaccaacatcttcttcagccctgtgtccatcgccacagcctttgccatgctgagcctgggcaccaaggctgacacccatgatgagatcctggagggcctgaacttcaacctgacagagatccctgaggcccagatccactag

SEQ ID NO: 3406 - DNA, 69 bp, synthetic construct
  misc_feature 1..69: note = source = /note="Description of Artificial Sequence: Synthetic coding sequence"
  source 1..69: mol_type = other DNA
atgcccagctctgtgtcctggggcatcctgctgctggccggcctgtgctgcctggtgcctgtgtcctag

SEQ ID NO: 3407 - DNA, 435 bp, synthetic construct
  misc_feature 1..435: note = source = /note="Description of Artificial Sequence: Synthetic coding sequence"
  source 1..435: mol_type = other DNA
atgcccagctctgtgtcctggggcatcctgctgctggccggcctgtgctgcctggtgcctgtgtccctggccgaggacccccagggagatgctgcccagaagacagacaccagccaccacgaccaggaccaccccaccttcaacaagatcacccccaacctggccgagtttgccttcagcctgtaccggcagctggcccaccagagcaacagcaccaacatcttcttcagccctgtgtccatcgccacagcctttgccatgctgagcctgggcaccaaggctgacacccatgatgagatcctggagggcctgaacttcaacctgacagagatccctgaggcccagatccacgagggcttccaggagctgctgcggaccctgaaccagcctgacagccagctgcagctgaccactggaaatggcctcttcctgtag

SEQ ID NO: 3408 - DNA, 780 bp, synthetic construct
  misc_feature 1..780: note = source = /note="Description of Artificial Sequence: Synthetic coding sequence"
  source 1..780: mol_type = other DNA
atgtacagcaatgtcatcggcaccgtgaccagcggcaagaggaaggtgtacctgctgagcctgctgctgattggcttctgggactgtgtgacctgccacggcagccctgtggacatctgcacagccaagccccgggacatccccatgaaccccatgtgcatctaccgcagccctgagaagaaggccacagaagatgagggcagcgagcagaagatccctgaggccaccaacagaagagtgtgggagctgagcaaggccaacagcagatttgccaccaccttctaccagcacctggccgacagcaagaatgacaatgacaacatcttcctgagccccctgagcatcagcacagcctttgccatgaccaagctgggcgcctgcaatgacaccctgcagcagctgatggaggtgttcaagtttgacaccatcagcgagaagaccagtgaccagatccacttcttctttgccaagctgaactgccgcctgtacaggaaggccaacaagagcagcaagctggtgtctgccaaccggctgtttggagacaagagcctgaccttcaatgacctgtatgtgtctgatgccttccacaaggccttcctggaggtgaatgaggagggcagcgaggccgccgccagcacagctgtggtgattgctggccgcagcctgaaccccaacagagtgaccttcaaggccaaccggcccttcctggtgttcatccgggaggtgcccctgaacaccatcatcttcatgggccgggtggccaacccctgtgtgaagtag

SEQ ID NO: 3409 - DNA, 1395 bp, synthetic construct
  misc_feature 1..1395: note = source = /note="Description of Artificial Sequence: Synthetic coding sequence"
  source 1..1395: mol_type = other DNA
atgtacagcaatgtcatcggcaccgtgaccagcggcaagaggaaggtgtacctgctgagcctgctgctgattggcttctgggactgtgtgacctgccacggcagccctgtggacatctgcacagccaagccccgggacatccccatgaaccccatgtgcatctaccgcagccctgagaagaaggccacagaagatgagggcagcgagcagaagatccctgaggccaccaacagaagagtgtgggagctgagcaaggccaacagcagatttgccaccaccttctaccagcacctggccgacagcaagaatgacaatgacaacatcttcctgagccccctgagcatcagcacagcctttgccatgaccaagctgggcgcctgcaatgacaccctgcagcagctgatggaggtgttcaagtttgacaccatcagcgagaagaccagtgaccagatccacttcttctttgccaagctgaactgccgcctgtacaggaaggccaacaagagcagcaagctggtgtctgccaaccggctgtttggagacaagagcctgaccttcaatgagacctaccaggacatcagcgagctggtgtatggagccaagctgcagcccctggacttcaaggaaaatgctgagcagagccgggccgccatcaacaagtgggtgagcaacaagacagagggccgcatcacagatgtgatccccagcgaggccatcaatgagctgactgtgctggtgctggtgaacaccatctacttcaagggcctgtggaagagcaagttcagccctgagaacaccaggaaggagctgttctacaaggcagatggagagagctgcagcgcctccatgatgtaccaggagggcaagttccgctacagaagagtggccgagggcacccaggtgctggagctgcccttcaagggagatgacatcaccatggtgctgatcctgcccaagccagagaagagcctggccaaggtggagaaggagctgaccccagaggtgctgcaggagtggctggatgagctggaggagatgatgctggtggtgcacatgccccgcttcagaattgaagatggcttcagcctgaaggagcagctgcaggacatgggcctggtggacctcttcagccctgagaagagcaagctgcccggcatcgtggccgagggcagagatgacctgtatgtgtctgatgccttccacaaggccttcctggaggtgaatgaggagggcagcgaggccgccgccagcacagctgtggtgattgctggccgcagcctgaaccccaacagagtgaccttcaaggccaaccggcccttcctggtgttcatccgggaggtgcccctgaacaccatcatcttcatgggccgggtggccaacccctgtgtgaagtag

SEQ ID NO: 3410 - DNA, 1476 bp, synthetic construct
  misc_feature 1..1476: note = source = /note="Description of Artificial Sequence: Synthetic coding sequence"
  source 1..1476: mol_type = other DNA
atggccctgctgtggggcctgctggtgctgtcctggagctgcctgcagggcccctgcagcgtcttcagccctgtgtctgccatggagcccctgggccggcagctgaccagcggccccaaccaggagcaggtgagccccctgaccctgctgaagctgggcaaccaggagcccggcggccagacagccctgaagagccccccaggagtgtgcagccgggaccccaccccagagcagacccaccggctggcccgggccatgatggccttcaccgctgacctcttcagcctggtggcccagaccagcacctgccccaacctgatcctgagccccctgtctgtggccctggccctgagccacctggccctgggcgcccagaaccacaccctgcagaggctgcagcaggtgctgcacgccggcagcggcccctgcctgccccacctgctgagccggctgtgccaggacctgggccctggggccttccggctggccgccaggatgtacctgcagaagggcttccccatcaaggaggacttcctggagcagagcgagcagctgtttggagccaagcctgtgtccctgaccgggaagcaggaggatgacctggccaacatcaaccagtgggtgaaggaggccacagagggcaagatccaggagttcctgagcggcctgcctgaagatactgtgctgctgctgctgaatgccatccacttccagggcttctggaggaacaagtttgaccccagcctgacccagagggacagcttccacctggatgagcagttcaccgtgcctgtggagatgatgcaggcccggacctaccccctgcgctggttcctgctggagcagcctgagatccaggtggcccacttccccttcaagaacaacatgagctttgtggtgctggtgcccacccactttgagtggaatgtgtcccaggtgctggccaacctgtcctgggacaccctgcacccccccctggtgtgggagcggcccaccaaggtgcggctgcccaagctgtacctgaagcaccagatggacctggtggccaccctgagccagctgggcctgcaggagctgttccaggccccagacctgcggggcatcagcgagcagagcctggtggtgtctggagtgcagcaccagagcaccctggagctgtctgaggtgggcgtggaggccgctgctgccaccagcatcgccatgagcaggatgagcctgagcagcttctctgtgaaccggcccttcctgttcttcatctttgaggacaccaccggcctgcccctgtttgtgggctctgtgaggaaccccaaccccagcgccccccgggagctgaaggagcagcaggacagccctggcaacaaggacttcctgcagagcctgaagggcttccccaggggggacaagctgtttggaccagacctgaagctggtgccccccatggaggaggactacccccagtttggcagccccaagtag

SEQ ID NO: 3411 - DNA, 1476 bp, synthetic construct; identical to SEQ ID NO: 3410
  misc_feature 1..1476: note = source = /note="Description of Artificial Sequence: Synthetic coding sequence"
  source 1..1476: mol_type = other DNA

SEQ ID NO: 3412 - DNA, 1284 bp, synthetic construct
  misc_feature 1..1284: note = source = /note="Description of Artificial Sequence: Synthetic coding sequence"
  source 1..1284: mol_type = other DNA
atggccctgctgtggggcctgctggtgctgtcctggagctgcctgcagggcccctgcagcgtcttcagccctgtgtctgccatggagcccctgggccggcagctgaccagcggccccaaccaggagcaggtgagccccctgaccctgctgaagctgggcaaccaggtgcagcccggggcccagaaccacaccctgcagaggctgcagcaggtgctgcacgccggcagcggcccctgcctgccccacctgctgagccggctgtgccaggacctgggccctggggccttccggctggccgccaggatgtacctgcagaagggcttccccatcaaggaggacttcctggagcagagcgagcagctgtttggagccaagcctgtgtccctgaccgggaagcaggaggatgacctggccaacatcaaccagtgggtgaaggaggccacagagggcaagatccaggagttcctgagcggcctgcctgaagatactgtgctgctgctgctgaatgccatccacttccagggcttctggaggaacaagtttgaccccagcctgacccagagggacagcttccacctggatgagcagttcaccgtgcctgtggagatgatgcaggcccggacctaccccctgcgctggttcctgctggagcagcctgagatccaggtggcccacttccccttcaagaacaacatgagctttgtggtgctggtgcccacccactttgagtggaatgtgtcccaggtgctggccaacctgtcctgggacaccctgcacccccccctggtgtgggagcggcccaccaaggtgcggctgcccaagctgtacctgaagcaccagatggacctggtggccaccctgagccagctgggcctgcaggagctgttccaggccccagacctgcggggcatcagcgagcagagcctggtggtgtctggagtgcagcaccagagcaccctggagctgtctgaggtgggcgtggaggccgctgctgccaccagcatcgccatgagcaggatgagcctgagcagcttctctgtgaaccggcccttcctgttcttcatctttgaggacaccaccggcctgcccctgtttgtgggctctgtgaggaaccccaaccccagcgccccccgggagctgaaggagcagcaggacagccctggcaacaaggacttcctgcagagcctgaagggcttccccaggggggacaagctgtttggaccagacctgaagctggtgccccccatggaggaggactacccccagtttggcagccccaagtag

SEQ ID NO: 3413 - DNA, 768 bp, synthetic construct
  misc_feature 1..768: note = source = /note="Description of Artificial Sequence: Synthetic coding sequence"
  source 1..768: mol_type = other DNA
atggccctgctgtggggcctgctggtgctgtcctggagctgcctgcagggcccctgcagcgtcttcagccctgtgtctgccatggagcccctgggccggcagctgaccagcggccccaaccaggagcaggtgagccccctgaccctgctgaagctgggcaaccaggagcccggcggccagacagccctgaagagccccccaggagtgtgcagccgggaccccaccccagagcagacccaccggctggcccgggccatgatggccttcaccgctgacctcttcagcctggtggcccagaccagcacctgccccaacctgatcctgagccccctgtctgtggccctggccctgagccacctggccctgggcgcccagaaccacaccctgcagaggctgcagcaggtgctgcacgccggcagcggcccctgcctgccccacctgctgagccggctgtgccaggacctgggccctggggccttccggctggccgccaggatgtacctgcagaagggcttccccatcaaggaggacttcctggagcagagcgagcagctgtttggagccaagcctgtgtccctgaccgggaagcaggaggatgacctggccaacatcaaccagtgggtgaaggaggccacagagggcaagatccaggagttcctgagcggcctgcctgaagatactgtgctgctgctgctgaatgccatccacttccagggcttctggaggaacaagtttgaccccagcctgacccagagggacagcttctag

SEQ ID NO: 3414 - DNA, 1503 bp, synthetic construct
  misc_feature 1..1503: note = source = /note="Description of Artificial Sequence: Synthetic coding sequence"
  source 1..1503: mol_type = other DNA
atggccagccggctgaccctgctgaccctgctgctgctgctgctggccggggaccgggccagcagcaaccccaatgccaccagcagcagcagccaggaccctgagagcctgcaggacagaggagagggcaaggtggccaccaccgtcatcagcaagatgctgtttgtggagcccatcctggaggtgagcagcctgcccaccaccaacagcaccaccaacagcgccaccaagatcacagccaacaccacagatgagcccaccacccagcccaccacagagcccaccacccagcccaccatccagcccacccagcccaccacccagctgcccacagacagccccacccagcccaccaccggcagcttctgccccggccctgtgaccctgtgcagcgacctggagagccacagcacagaggccgtgctgggagatgccctggtggacttcagcctgaagctgtaccacgccttcagcgccatgaagaaggtggagaccaacatggccttcagccccttcagcatcgccagcctgctgacccaggtgctgctgggcgctggggagaacaccaagaccaacctggagagcatcctgagctaccccaaggacttcacctgtgtgcaccaggccctgaagggcttcaccaccaagggcgtgacctctgtgtcccagatcttccacagcccagacctggccatccgggacacctttgtgaatgccagcaggaccctgtacagcagcagcccccgggtgctgagcaacaacagtgatgccaacctggagctgatcaacacctgggtggccaagaacaccaacaacaagatcagccggctgctggacagcctgcccagcgacacccggctggtgctgctgaatgccatctacctgagcgccaagtggaagaccacctttgaccccaagaagaccaggatggagcccttccacttcaagaacagcgtcatcaaggtgcccatgatgaacagcaagaagtaccctgtggcccacttcatcgaccagaccctgaaggccaaggtgggccagctgcagctgagccacaacctgagcctggtgatcctggtgccccagaacctgaagcaccggctggaggacatggagcaggccctgagccccagcgtcttcaaggccatcatggagaagctggagatgagcaagttccagcccaccctgctgaccctgccccgcatcaaggtgaccaccagccaggacatgctgagcatcatggagaagctggagttctttgacttctcctatgacctgaacctgtgtggcctgacagaggaccctgacctgcaggtgtctgccatgcagcaccagacagtgctggagctgacagagaccggggtggaggccgccgccgccagcgccatctctgtggcccggaccctgctggtgtttgaggtgcagcagcccttcctgtttgtgctgtgggaccagcagcacaagtttcctgtgttcatgggccgggtgtatgacccccgggcctag

SEQ ID NO: 3415 - DNA, 1518 bp, synthetic construct
  misc_feature 1..1518: note = source = /note="Description of Artificial Sequence: Synthetic coding sequence"
  source 1..1518: mol_type = other DNA
atggccagccggctgaccctgctgaccctgctgctgctgctgctggccggcttcctggagccccaggaccgggccagcagcaaccccaatgccaccagcagcagcagccaggaccctgagagcctgcaggacagaggagagggcaaggtggccaccaccgtcatcagcaagatgctgtttgtggagcccatcctggaggtgagcagcctgcccaccaccaacagcaccaccaacagcgccaccaagatcacagccaacaccacagatgagcccaccacccagcccaccacagagcccaccacccagcccaccatccagcccacccagcccaccacccagctgcccacagacagccccacccagcccaccaccggcagcttctgccccggccctgtgaccctgtgcagcgacctggagagccacagcacagaagctgtgctgggagatgccctggtggacttcagcctgaagctgtaccacgccttcagcgccatgaagaaggtggagaccaacatggccttcagccccttcagcatcgccagcctgctgacccaggtgctgctgggcgctggggagaacaccaagaccaacctggagagcatcctgagctaccccaaggacttcacctgtgtgcaccaggccctgaagggcttcaccaccaagggcgtgacctctgtgtcccagatcttccacagcccagacctggccatccgggacacctttgtgaatgccagcaggaccctgtacagcagcagcccccgggtgctgagcaacaacagtgatgccaacctggagctgatcaacacctgggtggccaagaacaccaacaacaagatcagccggctgctggacagcctgcccagcgacacccggctggtgctgctgaatgccatctacctgagcgccaagtggaagaccacctttgaccccaagaagaccaggatggagcccttccacttcaagaacagcgtcatcaaggtgcccatgatgaacagcaagaagtaccctgtggcccacttcatcgaccagaccctgaaggccaaggtgggccagctgcagctgagccacaacctgagcctggtgatcctggtgccccagaacctgaagcaccggctggaggacatggagcaggccctgagccccagcgtcttcaaggccatcatggagaagctggagatgagcaagttccagcccaccctgctgaccctgccccgcatcaaggtgaccaccagccaggacatgctgagcatcatggagaagctggagttctttgacttctcctatgacctgaacctgtgtggcctgacagaagatcctgacctgcaggtgtctgccatgcagcaccagacagtgctggagctgacagaaacaggagtggaggccgctgctgccagcgccatctctgtggcccggaccctgctggtgtttgaggtgcagcagcccttcctgtttgtgctgtgggaccagcagcacaagtttcctgtgttcatgggccgggtgtatgacccccgggcctag

SEQ ID NO: 3416 - DNA, 1347 bp, synthetic construct
  misc_feature 1..1347: note = source = /note="Description of Artificial Sequence: Synthetic coding sequence"
  source 1..1347: mol_type = other DNA
atgctgtttgtggagcccatcctggaggtgagcagcctgcccaccaccaacagcaccaccaacagcgccaccaagatcacagccaacaccacagatgagcccaccacccagcccaccacagagcccaccacccagcccaccatccagcccacccagcccaccacccagctgcccacagacagccccacccagcccaccaccggcagcttctgccccggccctgtgaccctgtgcagcgacctggagagccacagcacagaggccgtgctgggagatgccctggtggacttcagcctgaagctgtaccacgccttcagcgccatgaagaaggtggagaccaacatggccttcagccccttcagcatcgccagcctgctgacccaggtgctgctgggcgctggggagaacaccaagaccaacctggagagcatcctgagctaccccaaggacttcacctgtgtgcaccaggccctgaagggcttcaccaccaagggcgtgacctctgtgtcccagatcttccacagcccagacctggccatccgggacacctttgtgaatgccagcaggaccctgtacagcagcagcccccgggtgctgagcaacaacagtgatgccaacctggagctgatcaacacctgggtggccaagaacaccaacaacaagatcagccggctgctggacagcctgcccagcgacacccggctggtgctgctgaatgccatctacctgagcgccaagtggaagaccacctttgaccccaagaagaccaggatggagcccttccacttcaagaacagcgtcatcaaggtgcccatgatgaacagcaagaagtaccctgtggcccacttcatcgaccagaccctgaaggccaaggtgggccagctgcagctgagccacaacctgagcctggtgatcctggtgccccagaacctgaagcaccggctggaggacatggagcaggccctgagccccagcgtcttcaaggccatcatggagaagctggagatgagcaagttccagcccaccctgctgaccctgccccgcatcaaggtgaccaccagccaggacatgctgagcatcatggagaagctggagttctttgacttctcctatgacctgaacctgtgtggcctgacagaggaccctgacctgcaggtgtctgccatgcagcaccagacagtgctggagctgacagagaccggggtggaggccgccgccgccagcgccatctctgtggcccggaccctgctggtgtttgaggtgcagcagcccttcctgtttgtgctgtgggaccagcagcacaagtttcctgtgttcatgggccgggtgtatgacccccgggcctag

SEQ ID NO: 3417 - DNA, 483 bp, synthetic construct
  misc_feature 1..483: note = source = /note="Description of Artificial Sequence: Synthetic coding sequence"
  source 1..483: mol_type = other DNA
atggccagccggctgaccctgctgaccctgctgctgctgctgctggccggggaccgggccagcagcaaccccaatgccaccagcagcagcagccaggaccctgagagcctgcaggacagaggagagggcaaggtggccaccaccgtcatcagcaagatgctgtttgtggagcccatcctggaggtgagcagcctgcccaccaccaacagcaccaccaacagcgccaccaagatcacagccaacaccacagatgagcccaccacccagcccaccacagagcccaccacccagcccaccatccagcccacccagcccaccacccagctgcccacagacagccccacccagcccaccaccggcagcttctgccccggccctgtgaccctgtgcagcgacctggagagccacagcacagaggccgtgctgggagatgccctggtggacttcagcctgaagctgtaccacgccttcagcgccatgtag

SEQ ID NO: 3418 - DNA, 402 bp, synthetic construct
  misc_feature 1..402: note = source = /note="Description of Artificial Sequence: Synthetic coding sequence"
  source 1..402: mol_type = other DNA
atggccagccggctgaccctgctgaccctgctgctgctgctgctggccggggaccgggccagcagcaaccccaatgccaccagcagcagcagccaggaccctgagagcctgcaggacagaggagagggcaaggtggccaccaccgtcatcagcaagatgctgtttgtggagcccatcctggaggtgagcagcctgcccaccaccaacagcaccaccaacagcgccaccaagatcacagccaacaccacagatgagcccaccacccagcccaccacagagcccaccacccagcccaccatccagcccacccagcccaccacccagctgcccacagacagccccacccagcccggctacgccctgaaccacggggagatcggcatcctgcgcttcttcctgtag

SEQ ID NO: 3419 - DNA, 3405 bp, synthetic construct
  misc_feature 1..3405: note = source = /note="Description of Artificial Sequence: Synthetic coding sequence"
  source 1..3405: mol_type = other DNA
atgcctgtgttccacaccaggaccatcgagagcatcctggagcctgtggcccagcagatcagccacctggtgatcatgcatgaggagggggaggtggatggcaaggccatcccagacctgacagcccctgtggccgctgtgcaggccgctgtgagcaacctggtgcgggtgggcaaggagaccgtgcagaccacagaggaccagatcctgaagagggacatgcccccagccttcatcaaggtggagaatgcctgcaccaagctggtgcaggccgcccagatgctgcagagcgacccctacagcgtgcctgcccgggactacctgattgatggcagccggggcatcctgagcggcaccagtgacctgctgctgacctttgatgaagctgaggtgaggaagatcatccgggtgtgcaagggcatcctggagtacctgactgtggccgaggtggtggagaccatggaggacctggtgacctacaccaagaacctgggccctggcatgaccaagatggccaagatgattgatgagcggcagcaggagctgacccaccaggagcaccgggtgatgctggtgaacagcatgaacacagtgaaggagctgctgcctgtgctgatcagcgccatgaagatctttgtgaccaccaagaacagcaagaaccagggcatcgaggaggccctgaagaacagaaacttcaccgtggagaagatgtctgctgagatcaatgagatcatccgggtgctgcagctgacctcctgggatgaagatgcctgggccagcaaggacacagaggccatgaagagggccctggccagcattgacagcaagctgaaccaggccaagggctggctgcgggaccccagcgccagccctggagatgctggggagcaggccatccggcagatcctggatgaggccggcaaggtgggggagctgtgtgccggcaaggagcggcgggagatcctgggcacctgcaagatgctgggccagatgacagaccaggtggccgacctgcgggcccggggccagggcagcagccctgtggccatgcagaaggcccagcaggtgtcccagggcctggatgtgctgacagccaaggtggagaatgctgccaggaagctggaggccatgaccaacagcaagcagagcatcgccaagaagattgatgctgcccagaactggctggccgaccccaatggaggccctgagggggaggagcagatccggggggccctggccgaggccaggaagattgctgagctgtgtgatgaccccaaggagagagatgacatcctgcggagcctgggggagatcagcgccctgaccagcaagctggccgacctgcggcggcagggcaaaggagacagccctgaggcccgggccctggccaagcaggtggccacagccctgcagaacctgcagaccaagaccaacagagctgtggccaacagcaggcctgccaaggctgctgtgcacctggagggcaagattgagcaggcccagcgctggattgacaaccccaccgtggatgacagaggagtgggccaggccgccatccggggcctggtggccgagggccaccggctggccaacgtgatgatgggcccctaccggcaggacctgctggccaagtgtgacagagtggaccagctgacagcccagctggccgacctggccgcccggggggagggggagagcccccaggcccgggccctggccagccagctgcaggacagcctgaaggacctgaaggccaggatgcaggaggccatgacccaggaggtgtctgatgtgttcagtgacaccaccacccccatcaagctgctggccgtggccgccacagcccccccagatgcccccaaccgggaggaggtgtttgatgagcgggccgccaactttgagaaccacagcggcaagctgggcgccacagctgagaaggctgctgctgtgggcacagccaacaagagcacagtggagggcatccaggcctctgtgaagacagcccgggagctgaccccccaggtggtgtctgctgcccgcatcctgctgaggaaccctggcaaccaggccgcctatgagcactttgagaccatgaagaaccagtggattgacaacgtggagaagatgacaggcctggtggatgaggccatcgacaccaagagcctgctggatgccagcgaggaggccatcaagaaggacctggacaagtgcaaggtggccatggccaacatccagccccagatgctggtggccggggccaccagcatcgcccggcgggccaaccgcatcctgctggtggccaagcgggaggtggagaacagcgaggaccccaagttccgggaggccgtgaaggccgccagtgatgagctgagcaagaccatcagccccatggtgatggatgccaaggctgtggccggcaacatcagtgaccccggcctgcagaagagcttcctggacagcggctaccgcatcctgggcgctgtggccaaggtgcgggaggccttccagccccaggagccagacttccccccacctcctccagacctggagcagctgcggctgacagatgagctggccccacccaagccacccctgcctgagggggaggtgcccccacccaggcctcctcctcctgaggagaaggatgaggagttccctgagcagaaggccggggaggtgatcaaccagcccatgatgatggccgcccggcagctgcatgatgaggccaggaagtggagcagcaagccaggcatcccagctgctgaggtgggcattggagtggtggccgaggctgatgctgctgatgctgctggcttccctgtgcccccagacatggaggatgattatgagcctgagctgctgctgatgcccagcaaccagcctgtgaaccagcccatcctggccgccgcccagagcctgcaccgggaggccaccaagtggagcagcaaaggaaatgacatcatcgccgccgccaagaggatggccctgctgatggccgagatgagccggctggtgcggggcggcagcggcaccaagagggccctgatccagtgtgccaaggacatcgccaaggccagtgatgaggtgacccggctggccaaggaggtggccaagcagtgcacagacaagaggatccgcaccaacctgctgcaggtgtgtgagcgcatccccaccatcagcacccagctgaagatcctgagcacagtgaaggccaccatgctgggccgcaccaacatcagtgatgaggagagcgagcaggccacagagatgctggtgcacaatgcccagaacctgatgcagagcgtgaaggagaccgtgcgggaggccgaggccgccagcatcaagatcagaacagatgctggcttcaccctgcgctgggtgaggaagaccccctggtaccagtag

SEQ ID NO: 3420 - DNA, 1335 bp, synthetic construct
  misc_feature 1..1335: note = source = /note="Description of Artificial Sequence: Synthetic coding sequence"
  source 1..1335: mol_type = other DNA
atgtgcctgtgcagcggcaggaagaccatcctggagatctacccaggccagttccagcccagcctgtgccacaagttcatcgccctgagtgacaaggagggcaagctgctgaggaactacacccagaacatcgacaccctggagcaggtggccggcatccagaggatcatccagtgccacggcagctttgccacagccagctgcctgatctgcaagtacaaggtggactgtgaggccgtgcggggggacatcttcaaccaggtggtgccccgctgcccccgctgcccagcagatgagcccctggccatcatgaagccagagatcgtgttctttggagagaacctgcctgagcagttccaccgggccatgaagtatgacaaggatgaggtggacctgctgattgtcatcggcagcagcctgaaggtgcggcctgtggccctgatccccagcagcatcccccatgaggtgccccagatcctgatcaaccgggagcccctgccccacctgcactttgatgtggagctgctgggggactgtgatgtgatcatcaatgagctgtgccaccggctgggcggggagtatgccaagctgtgctgcaaccctgtgaagctgtctgagatcacagagaagccacccaggacccagaaggagctggcctacctgtctgagctgccccccacccccctgcacgtgtctgaggacagcagcagccctgagaggaccagccccccagacagctctgtgattgtgaccctgctggaccaggccgccaagagcaatgatgacctggatgtgtctgagagcaagggctgcatggaggagaagccccaggaggtgcagaccagcagaaatgtggagagcattgctgagcagatggagaacccagacctgaagaatgtgggcagcagcactggagagaagaatgaaagaacatctgtggccggcaccgtgaggaagtgctggcccaacagagtggccaaggagcagatcagccggcggctggatggcaaccagtacctgttcctgccccccaaccgctacatcttccacggggctgaggtgtacagcgacagtgaagatgatgtgctgagcagcagcagctgtggcagcaacagcgacagcggcacctgccagagccccagcctggaggagcccatggaggatgagagcgagattgaggagttctacaacggcctggaggatgagccagatgtgcctgagagagctggaggagctggcttcggcacagatggagatgaccaggaggccatcaatgaggccatctctgtgaagcaggaggtgacagacatgaactaccccagcaacaagagctag

SEQ ID NO: 3421 - DNA, 1335 bp, synthetic construct; identical to SEQ ID NO: 3420
  misc_feature 1..1335: note = source = /note="Description of Artificial Sequence: Synthetic coding sequence"
  source 1..1335: mol_type = other DNA

SEQ ID NO: 3422 - DNA, 1359 bp, synthetic construct
  misc_feature 1..1359: note = source = /note="Description of Artificial Sequence: Synthetic coding sequence"
  source 1..1359: mol_type = other DNA
atgtttgacatcgagtacttcaggaaggacccccggcccttcttcaagtttgccaaggagatctacccaggccagttccagcccagcctgtgccacaagttcatcgccctgagtgacaaggagggcaagctgctgaggaactacacccagaacatcgacaccctggagcaggtggccggcatccagaggatcatccagtgccacggcagctttgccacagccagctgcctgatctgcaagtacaaggtggactgtgaggccgtgcggggggacatcttcaaccaggtggtgccccgctgcccccgctgcccagcagatgagcccctggccatcatgaagccagagatcgtgttctttggagagaacctgcctgagcagttccaccgggccatgaagtatgacaaggatgaggtggacctgctgattgtcatcggcagcagcctgaaggtgcggcctgtggccctgatccccagcagcatcccccatgaggtgccccagatcctgatcaaccgggagcccctgccccacctgcactttgatgtggagctgctgggggactgtgatgtgatcatcaatgagctgtgccaccggctgggcggggagtatgccaagctgtgctgcaaccctgtgaagctgtctgagatcacagagaagccacccaggacccagaaggagctggcctacctgtctgagctgccccccacccccctgcacgtgtctgaggacagcagcagccctgagaggaccagccccccagacagctctgtgattgtgaccctgctggaccaggccgccaagagcaatgatgacctggatgtgtctgagagcaagggctgcatggaggagaagccccaggaggtgcagaccagcagaaatgtggagagcattgctgagcagatggagaacccagacctgaagaatgtgggcagcagcactggagagaagaatgaaagaacatctgtggccggcaccgtgaggaagtgctggcccaacagagtggccaaggagcagatcagccggcggctggatggcaaccagtacctgttcctgccccccaaccgctacatcttccacggggctgaggtgtacagcgacagtgaagatgatgtgctgagcagcagcagctgtggcagcaacagcgacagcggcacctgccagagccccagcctggaggagcccatggaggatgagagcgagattgaggagttctacaacggcctggaggatgagccagatgtgcctgagagagctggaggagctggcttcggcacagatggagatgaccaggaggccatcaatgaggccatctctgtgaagcaggaggtgacagacatgaactaccccagcaacaagagctag

SEQ ID NO: 3423 - DNA, 987 bp, synthetic construct
  misc_feature 1..987: note = source = /note="Description of Artificial Sequence: Synthetic coding sequence"
  source 1..987: mol_type = other DNA
atgtctgtgaactatgctgctggcctgagcccctatgctgacaagggcaaatgtggcctgcctgagatctttgaccccccagaggagctggagaggaaggtgtgggagctggcccggctggtgtggcagagcagctctgtggtgttccacactggagctggcatcagcacagccagcggcatcccagacttccggggcccccacggcgtgtggaccatggaggagcggggcctggcccccaagtttgacaccacctttgagagcgcccggcccacccagacccacatggccctggtgcagctggagcgggtgggcctgctgcgcttcctggtgtcccagaatgtggatggcctgcacgtgcgcagcggcttcccccgggacaagctggccgagctgcacggcaacatgtttgtggaggagtgtgccaagtgcaagacccagtatgtgcgggacacagtggtgggcaccatgggcctgaaggccaccggccgcctgtgcaccgtggccaaggcccggggcctgcgggcctgcagaaatgctgacctgagcatcaccctgggcaccagcctgcagatccggcccagcggcaacctgcccctggccaccaagaggcggggcggccgcctggtgattgtgaacctgcagcccaccaagcatgacagacatgctgacctgcgcatccacggctacgtggatgaggtgatgacccggctgatgaagcacctgggcctggagatcccagcctgggatggcccccgggtgctggagcgggccctgccccccctgcccaggcctcccacccccaagctggagcccaaggaggagagccccacccgcatcaatggcagcatcccagctggccccaagcaggagccctgtgcccagcacaatggaagtgagcccgccagccccaagcgggagcggcccaccagccctgccccccacaggcctcccaagagggtgaaggccaaggctgtgcccagctag

SEQ ID NO: 3424 - DNA, 1068 bp, synthetic construct
  misc_feature 1..1068: note = source = /note="Description of Artificial Sequence: Synthetic coding sequence"
  source 1..1068: mol_type = other DNA
atgtctgtgaactatgctgctggcctgagcccctatgctgacaagggcaaatgtggcctgcctgagatctttgaccccccagaggagctggagaggaaggtgtgggagctggcccggctggtgtggcagagcagctctgtggtgttccacactggagctggcatcagcacagccagcggcatcccagacttccggggcccccacggcgtgtggaccatggaggagcggggcctggcccccaagtttgacaccacctttgagagcgcccggcccacccagacccacatggccctggtgcagctggagcgggtgggcctgctgcgcttcctggtgtcccagaatgtggatggcctgcacgtgcgcagcggcttcccccgggacaagctggccgagctgcacggcaacatgtttgtggaggagtgtgccaagtgcaagacccagtatgtgcgggacacagtggtgggcaccatgggcctgaaggccaccggccgcctgtgcaccgtggccaaggcccggggcctgcgggcctgccgcggggagctgcgggacaccatcctggactgggaggacagcctgcctgaccgggacctggccctggctgatgaggccagcagaaatgctgacctgagcatcaccctgggcaccagcctgcagatccggcccagcggcaacctgcccctggccaccaagagaagaggaggccgcctggtgattgtgaacctgcagcccaccaagcatgacagacatgctgacctgcgcatccacggctacgtggatgaggtgatgacccggctgatgaagcacctgggcctggagatcccagcctgggatggcccccgggtgctggagcgggccctgccccccctgccccggccccccacccccaagctggagcccaaggaggagagccccacccgcatcaatggcagcatcccagctggccccaagcaggagccctgtgcccagcacaacggcagcgagcccgccagccccaagcgggagcggcccaccagccctgccccccaccggccccccaagagggtgaaggccaaggctgtgcccagctag

SEQ ID NO: 3425 - DNA, 852 bp, synthetic construct
  misc_feature 1..852: note = source = /note="Description of Artificial Sequence: Synthetic coding sequence"
  source 1..852: mol_type = other DNA
atggaggagcggggcctggcccccaagtttgacaccacctttgagagcgcccggcccacccagacccacatggccctggtgcagctggagcgggtgggcctgctgcgcttcctggtgtcccagaatgtggatggcctgcacgtgcgcagcggcttcccccgggacaagctggccgagctgcacggcaacatgtttgtggaggagtgtgccaagtgcaagacccagtatgtgcgggacacagtggtgggcaccatgggcctgaaggccaccggccgcctgtgcaccgtggccaaggcccggggcctgcgggcctgccgcggggagctgcgggacaccatcctggactgggaggacagcctgcctgaccgggacctggccctggctgatgaggccagcagaaatgctgacctgagcatcaccctgggcaccagcctgcagatccggcccagcggcaacctgcccctggccaccaagagaagaggaggccgcctggtgattgtgaacctgcagcccaccaagcatgacagacatgctgacctgcgcatccacggctacgtggatgaggtgatgacccggctgatgaagcacctgggcctggagatcccagcctgggatggcccccgggtgctggagcgggccctgccccccctgccccggccccccacccccaagctggagcccaaggaggagagccccacccgcatcaatggcagcatcccagctggccccaagcaggagccctgtgcccagcacaacggcagcgagcccgccagccccaagcgggagcggcccaccagccctgccccccaccggccccccaagagggtgaaggccaaggctgtgcccagctag

SEQ ID NO: 3426 - DNA, 1575 bp, synthetic construct
  misc_feature 1..1575: note = source = /note="Description of Artificial Sequence: Synthetic coding sequence"
  source 1..1575: mol_type = other DNA
atgacagaggacaaggtgacaggcaccctggtgttcaccgtcatcacagctgtgctgggcagcttccagtttggctatgacatcggggtcatcaatgccccccagcaggtgatcatcagccactaccgccacgtgctgggcgtgcccctggatgacaggaaggccatcaacaactacgtgatcaacagcacagatgagctgcccaccatctcctacagcatgaaccccaagcccaccccctgggccgaggaggagaccgtggccgccgcccagctgatcaccatgctgtggagcctgtctgtgtcctcctttgctgtgggcggcatgacagccagcttcttcggcggctggctgggggacaccctgggccgcatcaaggccatgctggtggccaacatcctgagcctggtgggcgccctgctgatgggcttcagcaagctgggccccagccacatcctgatcatcgccggccgcagcatcagcggcctgtactgcggcctcatcagcggcctggtgcccatgtacatcggggagatcgcccccacagccctgcggggggccctgggcaccttccaccagctggccatcgtgacaggcatcctgatcagccagatcatcggcctggagttcatcctgggcaactatgacctgtggcacatcctgctgggcctgtctggagtgcgggccatcctgcagagcctgctgctcttcttctgcccagagagcccccgctacctgtacatcaagctggatgaggaggtgaaggccaagcagagcctgaagaggctgcggggctatgatgatgtgaccaaggacatcaatgagatgaggaaggagcgggaggaggccagcagcgagcagaaggtgtccatcatccagctgttcaccaacagcagctaccggcagcccatcctggtggccctgatgctgcacgtggcccagcagttcagcggcatcaatggcatcttctactacagcaccagcatcttccagacagctggcatcagcaagcctgtgtatgccaccatcggcgtgggcgctgtgaacatggtgttcaccgctgtgtctgtgttcctggtggagaaggccggcagaagaagcctcttcctgattggcatgagcggcatgtttgtgtgtgccatcttcatgtctgtgggcctggtgctgctgaacaagttctcctggatgtcctatgtgtccatgattgccatcttcctgtttgtgtccttctttgaaattggccctggccccatcccctggttcatggtggccgagttcttcagccagggccccaggcctgctgccctggccatcgccgccttcagcaactggacctgcaacttcatcgtggccctgtgcttccagtacatcgctgacttctgtggcccctacgtgttcttcctgtttgctggggtgctgctggccttcaccctcttcaccttcttcaaggtgcctgagaccaagggcaagagctttgaggagattgctgctgagttccagaagaagagcggcagcgcccaccggcccaaggctgctgtggagatgaagttcctgggcgccacagaaacagtgtag

SEQ ID NO: 3427 - DNA, 1218 bp, synthetic construct
  misc_feature 1..1218: note = source = /note="Description of Artificial Sequence: Synthetic coding sequence"
  source 1..1218: mol_type = other DNA
atgcacctgaaccgcatcaaggccatgctggtggccaacatcctgagcctggtgggcgccctgctgatgggcttcagcaagctgggccccagccacatcctgatcatcgccggccgcagcatcagcggcctgtactgcggcctcatcagcggcctggtgcccatgtacatcggggagatcgcccccacagccctgcggggggccctgggcaccttccaccagctggccatcgtgacaggcatcctgatcagccagatcatcggcctggagttcatcctgggcaactatgacctgtggcacatcctgctgggcctgagcggcgtgcgggccatcctgcagagcctgctgctcttcttctgcccagagagcccccgctacctgtacatcaagctggatgaggaggtgaaggccaagcagagcctgaagaggctgcggggctatgatgatgtgaccaaggacatcaatgagatgaggaaggagcgggaggaggccagcagcgagcagaaggtgtccatcatccagctgttcaccaacagcagctaccggcagcccatcctggtggccctgatgctgcacgtggcccagcagttcagcggcatcaatggcatcttctactacagcaccagcatcttccagacagctggcatcagcaagcctgtgtatgccaccatcggcgtgggcgctgtgaacatggtgttcaccgctgtgtctgtgttcctggtggagaaggccggccgccgcagcctcttcctgattggcatgagcggcatgtttgtgtgtgccatcttcatgtctgtgggcctggtgctgctgaacaagttctcctggatgtcctatgtgtccatgattgccatcttcctgtttgtgtccttctttgagatcggccctggccccatcccctggttcatggtggccgagttcttcagccagggccccaggcctgctgccctggccatcgccgccttcagcaactggacctgcaacttcatcgtggccctgtgcttccagtacatcgctgacttctgtggcccctacgtgttcttcctgtttgctggggtgctgctggccttcaccctcttcaccttcttcaaggtgcctgagaccaagggcaagagctttgaggagattgctgctgagttccagaagaagagcggcagcgcccaccggcccaaggctgctgtggagatgaagttcctgggcgccacagagaccgtgtag

SEQ ID NO: 3428 - DNA, 1290 bp, synthetic construct
  misc_feature 1..1290: note = source = /note="Description of Artificial Sequence: Synthetic coding sequence"
  source 1..1290: mol_type = other DNA
atggccgcccagggctacggctactacagaactgtcatcttcagcgccatgtttggaggctacagcctgtactacttcaacaggaagaccttctcctttgtgatgcccagcctggtggaggagatccccctggacaaggatgacctgggcttcatcaccagcagccagagcgctgcctatgccatcagcaagtttgtgtctggagtgctgagtgaccagatgtctgcccgctggctgttcagcagcggcctgctgctggtgggcctggtgaacatcttctttgcctggagcagcacagtgcctgtgtttgctgccctgtggttcctgaatggcctggcccagggcctgggctggccaccctgtgggaaggtgctgaggaagtggtttgagcccagccagtttggcacctggtgggccatcctgagcacctccatgaacctggccggcggcctgggccccatcctggccaccatcctggcccagagctacagctggaggagcaccctggccctgagcggggccctgtgtgtggtggtgtccttcctgtgcctgctgctgatccacaatgaaccagcagatgtgggcctgaggaacctggaccccatgcccagcgagggcaagaagggcagcctgaaggaggagagcaccctgcaggagctgctgctgagcccctacctgtgggtgctgagcacaggctacctggtggtgtttggagtgaagacctgctgcacagactggggccagttcttcctgatccaggagaagggccagagcgccctggtgggcagcagctacatgtctgccctggaggtgggcggcctggtgggcagcattgctgctggctacctgagtgaccgggccatggccaaggccggcctgagcaactacggcaaccccaggcatggcctgctgctcttcatgatggccggcatgacagtgtccatgtacctgttccgggtgacagtgaccagtgacagccccaagctgtggatcctggtgctgggcgctgtgtttggcttcagcagctatggccccatcgccctgtttggagtcatcgccaatgaaagtgccccacccaacctgtgtggcaccagccacgccatcgtgggcctgatggccaacgtgggcggcttcctggccggcctgcccttcagcaccatcgccaagcactacagctggagcacagccttctgggtggccgaggtgatctgtgccgccagcacagctgccttcttcctgctgaggaacatccgcaccaagatgggccgggtgtccaagaaggccgagtag

SEQ ID NO: 3429 - DNA, 1356 bp, synthetic construct
  misc_feature 1..1356: note = source = /note="Description of Artificial Sequence: Synthetic coding sequence"
  source 1..1356: mol_type = other DNA
atggccgcccagggctacggctactacagaactgtcatcttcagcgccatgtttggaggctacagcctgtactacttcaacaggaagaccttctcctttgtgatgcccagcctggtggaggagatccccctggacaaggatgacctgggcttcatcaccagcagccagagcgctgcctatgccatcagcaagtttgtgtctggagtgctgagtgaccagatgtctgcccgctggctgttcagcagcggcctgctgctggtgggcctggtgaacatcttctttgcctggagcagcacagtgcctgtgtttgctgccctgtggttcctgaatggcctggcccagggcctgggctggccaccctgtgggaaggtgctgaggaagtggtttgagcccagccagtttggcacctggtgggccatcctgagcacctccatgaacctggccggcggcctgggccccatcctggccaccatcctggcccagagctacagctggaggagcaccctggccctgagcggggccctgtgtgtggtggtgtccttcctgtgcctgctgctgatccacaatgaaccagcagatgtgggcctgaggaacctggaccccatgcccagcgagggcaagaagggcagcctgaaggaggagagcaccctgcaggagctgctgctgagcccctacctgtgggtgctgagcacaggctacctggtggtgtttggagtgaagacctgctgcacagactggggccagttcttcctgatccaggagaagggccagagcgccctggtgggcagcagctacatgtctgccctggaggtgggcggcctggtgggcagcattgctgctggctacctgagtgaccgggccatggccaaggccggcctgagcaactacggcaaccccaggcatggcctgctgctcttcatgatggccggcatgacagtgtccatgtacctgttccgggtgacagtgaccagtgacagccccaaggatgtggccttctggaccctggccctgcaccccctggccgagctgaccggcttcacagaacatgagctgtggatcctggtgctgggcgctgtgtttggcttcagcagctatggccccatcgccctgtttggagtcatcgccaatgaaagtgccccacccaacctgtgtggcaccagccacgccatcgtgggcctgatggccaacgtgggcggcttcctggccggcctgcccttcagcaccatcgccaagcactacagctggagcacagccttctgggtggccgaggtgatctgtgccgccagcacagctgccttcttcctgctgaggaacatccgcaccaagatgggccgggtgtccaagaaggccgagtag

SEQ ID NO: 3430 - DNA, 1716 bp, synthetic construct
  misc_feature 1..1716: note = source = /note="Description of Artificial Sequence: Synthetic coding sequence"
  source 1..1716: mol_type = other DNA
atgacccgggccggggaccacaaccggcagaggggctgctgcggcagcctggccgactacctgaccagcgccaagttcctgctgtacctgggccacagcctgagcacctggggagacaggatgtggcactttgctgtgtctgtgttcctggtggagctgtatggcaacagcctgctgctgacagctgtgtatggcctggtggtggccggctctgtgctggtgctgggcgccatcattggagactgggtggacaagaatgcccggctgaaggtggcccagaccagcctggtggtgcagaatgtgtctgtcatcctgtgtggcatcatcctgatgatggtgttcctgcacaagcatgagctgctgaccatgtaccacggctgggtgctgaccagctgctacatcctgatcatcaccatcgccaacatcgccaacctggccagcacagccacagccatcaccatccagagggactggatcgtggtggtggccggagaagatagaagcaagctggccaacatgaatgccaccatcagaagaattgaccagctgaccaacatcctggcccccatggctgtgggccagatcatgaccttcggcagccctgtgattggctgcggcttcatcagcggctggaacctggtgtccatgtgtgtggagtatgtgctgctgtggaaggtgtaccagaagaccccagccctggccgtgaaggccggcctgaaggaggaggagacagagctgaagcagctgaacctgcacaaggacacagagcccaagcccctggagggcacccacctgatgggcgtgaaggacagcaacatccacgagctggagcacgagcaggagcccacctgtgccagccagatggccgagcccttccgcaccttcagagatggctgggtgtcctactacaaccagcccgtcttcctggccggcatgggcctggccttcctgtacatgacagtgctgggctttgactgcatcaccaccggctacgcctacacccagggcctgagcggcagcatcctgagcatcctgatgggcgccagcgccatcaccggcatcatgggcaccgtggccttcacctggctgcggaggaaatgtggcctggtgaggacaggcctcatcagcggcctggcccagctgagctgcctgatcctgtgtgtgatcagcgtcttcatgcctggcagccccctggacctgtctgtgagcccctttgaggacatccgcagccgcttcatccagggcgagagcatcacccccaccaagatccctgagatcaccacagagatctacatgagcaatggcagcaacagcgccaacatcgtgcctgagaccagccctgagagcgtgcccatcatctctgtgtccctgctgtttgctggggtgattgctgccagaattggcctgtggagctttgacctgactgtgacccagctgctgcaggagaatgtgattgaaagtgagcggggcatcatcaatggagtgcagaacagcatgaactacctgctggacctgctgcacttcatcatggtgatcctggcccccaaccctgaggccttcggcctgctggtgctgatctctgtgtcctttgtggccatgggccacatcatgtacttccgctttgcccagaacaccctgggcaacaagctgtttgcctgtggcccagatgccaaggaggtgaggaaagaaaaccaggccaacacctctgtggtgtag

SEQ ID NO: 3431 - DNA, 603 bp, synthetic construct
  misc_feature 1..603: note = source = /note="Description of Artificial Sequence: Synthetic coding sequence"
  source 1..603: mol_type = other DNA
atgacccgggccggggaccacaaccggcagaggggctgctgcggcagcctggccgactacctgaccagcgccaagttcctgctgtacctgggccacagcctgagcacctggggagacaggatgtggcactttgctgtgtctgtgttcctggtggagctgtatggcaacagcctgctgctgacagctgtgtatggcctggtggtggccggctctgtgctggtgctgggcgccatcattggagactgggtggacaagaatgcccggctgaaggtggcccagaccagcctggtggtgcagaatgtgtctgtcatcctgtgtggcatcatcctgatgatggtgttcctgcacaagcatgagctgctgaccatgtaccacggctgggtgctgaccagctgctacatcctgatcatcaccatcgccaacatcgccaacctggccagcacagccacagccatcaccatccagagggactggatcgtggtggtggccggagaagatagaagcaagctggccaacatgaatgccaccatcagaagaattgaccagctgaccaacatcctggcccccatggctgtgggccagatcatgaccttcggcagctag

SEQ ID NO: 3432 - DNA, 78 bp, synthetic construct
  misc_feature 1..78: note = source = /note="Description of Artificial Sequence: Synthetic coding sequence"
  source 1..78: mol_type = other DNA
atgacccgggccggggaccacaaccggcagaggggctgctgcggcagcctggccgactacctgaccagcgccaagtag

SEQ ID NO: 3433 - DNA, 78 bp, synthetic construct; identical to SEQ ID NO: 3432
  misc_feature 1..78: note = source = /note="Description of Artificial Sequence: Synthetic coding sequence"
  source 1..78: mol_type = other DNA

SEQ ID NO: 3434 - DNA, 168 bp, synthetic construct
  misc_feature 1..168: note = source = /note="Description of Artificial Sequence: Synthetic coding sequence"
  source 1..168: mol_type = other DNA
atgacccgggccggggaccacaaccggcagaggggctgctgcggcagcctggccgactacctgaccagcgccaagttcctgctgtacctgggccacagcctgagcacctggggagacaggatgtggcactttgctgtgtctgtgttcctggtggagctgtatggatag

SEQ ID NO: 3435 - DNA, 300 bp, synthetic construct
  misc_feature 1..300: note = source = /note="Description of Artificial Sequence: Synthetic coding sequence"
  source 1..300: mol_type = other DNA
atgagggccagcatccacaagaagctgaggaagagcagcggcatcgtgaccatcctgtacagcgcctttgtgctggtgtccaccagtgacatggccgaggagacagaagatgcctggccccgctgctacctgcagttcctggccctgctgctgaccagcaccagcgcccgggctgctgctgccatcgctgctgctgaggagcctgctggcagccccagcgtgatgacccgggccggggaccacaaccggcagaggggctgctgcggcagcctggccgactacctgaccagcgccaagtag

SEQ ID NO: 3436 - DNA, 504 bp, synthetic construct
  misc_feature 1..504: note = source = /note="Description of Artificial Sequence: Synthetic coding sequence"
  source 1..504: mol_type = other DNA
atgggcgtgaaggacagcaacatccacgagctggagcacgagcaggagcccacctgtgccagccagatggccgagcccttccgcaccttcagagatggctgggtgtcctactacaaccagcctgtgttcctggccggcatgggcctggccttcctgtacatgacagtgctgggctttgactgcatcaccaccggctacgcctacacccagggcctgagcggcagcatcctgagcatcctgatgggcgccagcgccatcaccggcatcatgggcaccgtggccttcacctggctgcggaggaaatgtggcctggtgaggacaggcctcatcagcggcctggcccagctgagctgcctgatcctgtgtgtgatctctgtgttcatgcctggcagccccctggacctgtctgtgagcccctttgaggacatccgcagccgcttcatccagggcgagagcatcacccccaccaagatccctgagatcaccacagagatccacgtgtag

SEQ ID NO: 3437 - DNA, 2496 bp, synthetic construct
  misc_feature 1..2496: note = source = /note="Description of Artificial Sequence: Synthetic coding sequence"
  source 1..2496: mol_type = other DNA
atggagcggccctggggcgctgctgatggcctgagccgctggccccacggcctgggcctgctgctgctgctgcagctgctgccccccagcaccctgagccaggaccggctggatgcccctcctcctcctgctgcccccctgccccgctggagcggccccatcggcgtgtcctggggcctgcgggctgctgctgctggaggagccttcccccggggcggccgctggaggagaagtgcccctggagaagatgaagaatgtggccgggtgcgggactttgtggccaagctggccaacaacacccaccagcacgtgtttgatgacctgcggggctctgtgtccctgtcctgggtgggggacagcactggagtcatcctggtgctgaccaccttccacgtgcccctggtgatcatgaccttcggccagagcaagctgtacagaagtgaggactatggcaagaacttcaaggacatcacagacctgatcaacaacaccttcatcagaacagaatttggcatggccatcggcccagaaaattctgggaaggtggtgctgacagctgaggtgtctgggggcagccggggcggccgcatcttccgcagcagtgactttgccaagaactttgtgcagacagacctgcccttccaccccctgacccagatgatgtacagcccccagaacagcgactacctgctggccctgagcacagaaaatggcctgtgggtgtccaagaactttggaggcaagtgggaggagatccacaaggctgtgtgcctggccaagtggggcagtgacaacaccatcttcttcaccacctacgccaacggcagctgcaaggctgacctgggcgccctggagctgtggaggaccagtgacctgggcaagagcttcaagaccatcggcgtgaagatctacagctttggcctgggcggccgcttcctgtttgcctctgtgatggctgacaaggacaccacccggcgcatccacgtgtccacagaccagggcgacacctggagcatggcccagctgcccagcgtgggccaggagcagttctacagcatcctggccgccaatgatgacatggtgttcatgcacgtggatgagcccggggacaccggcttcggcaccatcttcaccagtgatgaccggggcatcgtgtacagcaagagcctggacagacacctgtacaccaccaccggcggggagacagacttcaccaacgtgaccagcctgcggggcgtgtacatcacctctgtgctgtctgaggacaacagcatccagaccatgatcacctttgaccagggcggccgctggacccacctgaggaagccagagaacagtgaatgtgatgccacagccaagaacaagaatgaatgttccctgcacatccacgccagctacagcatcagccagaagctgaatgtgcccatggcccccctgtctgagcccaatgctgtgggcatcgtgattgcccacggctctgtgggagatgccatctctgtgatggtgcctgatgtgtacatcagtgatgatggcggctacagctggaccaagatgctggagggcccccactactacaccatcctggacagcggcggcatcatcgtggccatcgagcacagcagccggcccatcaacgtcatcaagttcagcacagatgagggccagtgctggcagacctacaccttcacccgggaccccatctacttcaccggcctggccagcgagcccggggcccgctccatgaacatcagcatctggggcttcacagagagcttcctgaccagccagtgggtgtcctacaccatcgacttcaaggacatcctggagaggaactgtgaggagaaggactacaccatctggctggcccacagcacagatcctgaggactatgaagatggctgcatcctgggctacaaggagcagttcctgcggctgaggaagagctctgtgtgccagaatggccgggactatgtggtgaccaagcagcccagcatctgcctgtgcagcctggaggacttcctgtgtgactttggctactacagaccagaaaatgacagcaaatgtgtggagcagcctgagctgaagggccatgacctggagttctgcctgtatggccgggaggagcacctgaccaccaacggctacaggaagatccctggggacaagtgccagggcggcgtgaaccctgtgcgggaggtgaaggacctgaagaagaagtgcaccagcaacttcctgagccctgagaagcagaacagcaagagcaacagcgtgcccatcatcctggccatcgtgggcctgatgctggtgacagtggtggccggcgtgctgattgtgaagaagtatgtgtgtggcggccgcttcctggtgcaccgctacagcgtgctgcagcagcacgccgaggccaacggggtggatggagtggatgccctggacacagccagccacaccaacaagagcggctaccatgatgacagtgatgaggacctgctggagtag

SEQ ID NO: 3438 - DNA, 2085 bp, synthetic construct
  misc_feature 1..2085: note = source = /note="Description of Artificial Sequence: Synthetic coding sequence"
  source 1..2085: mol_type = other DNA
atgaccttcggccagagcaagctgtacagaagtgaggactatggcaagaacttcaaggacatcacagacctgatcaacaacaccttcatcagaacagaatttggcatggccatcggcccagaaaattctgggaaggtggtgctgacagctgaggtgtctgggggcagccggggcggccgcatcttccgcagcagtgactttgccaagaactttgtgcagacagacctgcccttccaccccctgacccagatgatgtacagcccccagaacagcgactacctgctggccctgagcacagaaaatggcctgtgggtgtccaagaactttggaggcaagtgggaggagatccacaaggctgtgtgcctggccaagtggggcagtgacaacaccatcttcttcaccacctacgccaacggcagctgcacagacctgggcgccctggagctgtggaggaccagtgacctgggcaagagcttcaagaccatcggcgtgaagatctacagctttggcctgggcggccgcttcctgtttgcctctgtgatggctgacaaggacaccacccggcgcatccacgtgtccacagaccagggcgacacctggagcatggcccagctgcccagcgtgggccaggagcagttctacagcatcctggccgccaatgatgacatggtgttcatgcacgtggatgagcccggggacaccggcttcggcaccatcttcaccagtgatgaccggggcatcgtgtacagcaagagcctggacagacacctgtacaccaccactggaggagaaacagacttcaccaacgtgaccagcctgcggggcgtgtacatcacctctgtgctgtctgaggacaacagcatccagaccatgatcacctttgaccagggcggccgctggacccacctgaggaagccagaaaattctgaatgtgatgccacagccaagaacaagaatgaatgttccctgcacatccacgccagctacagcatcagccagaagctgaatgtgcccatggcccccctgtctgagcccaatgctgtgggcatcgtcatcgcccacggctctgtgggagatgccatctctgtgatggtgcctgatgtgtacatcagtgatgatggcggctacagctggaccaagatgctggagggcccccactactacaccatcctggacagcggcggcatcatcgtggccatcgagcacagcagccggcccatcaacgtcatcaagttcagcacagatgagggccagtgctggcagacctacaccttcacccgggaccccatctacttcaccggcctggccagcgagcccggggcccgctccatgaacatcagcatctggggcttcacagagagcttcctgaccagccagtgggtgtcctacaccatcgacttcaaggacatcctggagaggaactgtgaggagaaggactacaccatctggctggcccacagcacagatcctgaagattatgaagatggctgcatcctgggctacaaggagcagttcctgcggctgaggaagagctctgtgtgccagaatggccgggactatgtggtgaccaagcagcccagcatctgcctgtgcagcctggaggacttcctgtgtgactttggctactacagaccagaaaatgacagcaaatgtgtggagcagcctgagctgaagggccatgacctggagttctgcctgtatggccgggaggagcacctgaccaccaacggctacaggaagatccctggggacaagtgccagggcggcgtgaaccctgtgcgggaggtgaaggacctgaagaagaagtgcaccagcaacttcctgagccctgagaagcagaacagcaagagcaacagcgtgcccatcatcctggccatcgtgggcctgatgctggtgacagtggtggccggcgtgctgattgtgaagaagtatgtgtgtggcggccgcttcctggtgcaccgctacagcgtgctgcagcagcacgccgaggccaatggagtggatggagtggatgccctggacacagccagccacaccaacaagagcggctaccatgatgacagtgatgaggacctgctggagtag

SEQ ID NO: 3439 - DNA, 1446 bp, synthetic construct
  misc_feature 1..1446: note = source = /note="Description of Artificial Sequence: Synthetic coding sequence"
  source 1..1446: mol_type = other DNA
atgaaggtgctgtctgagggccagctgaagctgtgtgtggtgcagcctgtgcacctgacctcctggctgctgatcttcttcatcctgaagagcatcagctgcctgaagccagcccggctgcccatctaccagaggaagcccttcatcgccgcctggaatgcccccacagaccagtgcctgatcaagtacaacctgcggctgaacctgaagatgtttcctgtgattggcagccccctggccaaggcccggggccagaatgtgaccatcttctacgtgaaccggctgggctactacccctggtacaccagccagggcgtgcccatcaatggaggcctgccccagaacatcagcctgcaggtgcacctggagaaggctgaccaggacatcaactactacatcccagctgaggacttcagcggcctggccgtcatcgactgggagtactggaggccccagtgggccaggaactggaacagcaaggatgtgtaccggcagaagagcaggaagctgatcagtgacatgggcaagaatgtgtctgccacagacatcgagtacctggccaaggtgacctttgaggagagcgccaaggccttcatgaaggagaccatcaagctgggcatcaagagccggcccaagggcctgtggggctactacctgtacccagactgccacaactacaacgtgtatgcccccaactacagcggcagctgcccagaagatgaggtgctgaggaacaatgagctgtcctggctgtggaacagcagcgctgccctgtaccccagcattggagtgtggaagagcctgggggacagcgagaacatcctgcgcttcagcaagttccgggtgcatgagagcatgaggatcagcaccatgaccagccatgactatgccctgcctgtgtttgtgtacacccggctgggctacagagatgagcccctcttcttcctgagcaagcaggacctggtgtccaccatcggggagagcgctgccctgggcgccgccggcatcgtcatctggggagacatgaacctgacagccagcaaggccaactgcaccaaggtgaagcagtttgtgtccagtgacctgggcagctacatcgccaacgtgaccagggctgctgaggtgtgcagcctgcacctgtgcaggaacaacggccgctgcatcaggaagatgtggaatgcccccagctacctgcacctgaacccagccagctaccacatcgaggcctctgaagatggagagttcaccgtgaagggcaaggccagtgacacagacctggccgtgatggctgacaccttcagctgccactgctaccagggctatgaaggagctgactgccgggagatcaagacagcagatggctgcagcggcgtgagccccagccctggcagcctgatgaccctgtgcctgctgctgctggccagctaccgcagcatccagctgtag

SEQ ID NO: 3440 - DNA, 1536 bp, synthetic construct
  misc_feature 1..1536: note = source = /note="Description of Artificial Sequence: Synthetic coding sequence"
  source 1..1536: mol_type = other DNA
atgggcgtgctgaagttcaagcacatcttcttccgcagctttgtgaagagcagcggcgtgtcccagatcgtgttcaccttcctgctgatcccctgctgcctgaccctgaacttccgggcccctcctgtgatccccaacgtgcccttcctgtgggcctggaatgcccccagcgagttctgcctgggcaagtttgatgagcccctggacatgagcctcttctccttcatcggcagcccccgcatcaatgccaccggccagggcgtgaccatcttctacgtggaccggctgggctactacccctacatcgacagcatcaccggggtgacagtgaatggaggcatcccccagaagatcagcctgcaggaccacctggacaaggccaagaaggacatcaccttctacatgcctgtggacaacctgggcatggctgtgattgactgggaggagtggaggcccacctgggccaggaactggaagcccaaggatgtgtacaagaacagaagcattgagctggtgcagcagcagaatgtgcagctgagcctgacagaggccacagagaaggccaagcaggagtttgagaaggccggcaaggacttcctggtggagaccatcaagctgggcaagctgctgcggcccaaccacctgtggggctactacctgttcccagactgctacaaccaccactacaagaagccaggctacaacggcagctgcttcaacgtggagatcaagagaaatgatgacctgtcctggctgtggaatgaaagcacagccctgtaccccagcatctacctgaacacccagcagagccctgtggccgccaccctgtatgtgaggaacagagtgcgggaggccatccgggtgtccaagatcccagatgccaagagccccctgcctgtgtttgcctacacccgcatcgtgttcacagaccaggtgctgaagttcctgagccaggatgagctggtgtacacctttggagagaccgtggccctgggcgccagcggcatcgtcatctggggcaccctgagcatcatgaggtccatgaagagctgcctgctgctggacaactacatggagaccatcctgaacccctacatcatcaacgtgaccctggccgccaagatgtgcagccaggtgctgtgccaggagcagggcgtgtgcatcaggaagaactggaacagcagtgactacctgcacctgaacccagacaactttgccatccagctggagaagggcggcaagttcaccgtgcggggcaagcccaccctggaggacctggagcagttcagcgagaagttctactgcagctgctacagcaccctgagctgcaaggagaaggcagatgtgaaggacacagatgctgtggatgtgtgcatcgcagatggagtgtgcattgatgccttcctgaagccacccatggagacagaggagccccagatcttctacaatgccagccccagcaccctgagcgccaccatgttcatctggaggctggaggtgtgggaccagggcatcagccgcatcggcttcttctag

SEQ ID NO: 3441 - DNA, 1530 bp, synthetic construct
  misc_feature 1..1530: note = source = /note="Description of Artificial Sequence: Synthetic coding sequence"
  source 1..1530: mol_type = other DNA
atgggcgtgctgaagttcaagcacatcttcttccgcagctttgtgaagagcagcggcgtgtcccagatcgtgttcaccttcctgctgatcccctgctgcctgaccctgaacttccgggcccctcctgtgatccccaacgtgcccttcctgtgggcctggaatgcccccagcgagttctgcctgggcaagtttgatgagcccctggacatgagcctcttctccttcatcggcagcccccgcatcaatgccaccggccagggcgtgaccatcttctacgtggaccggctgggctactacccctacatcgacagcatcaccggggtgacagtgaatggaggcatcccccagaagatcagcctgcaggaccacctggacaaggccaagaaggacatcaccttctacatgcctgtggacaacctgggcatggctgtgattgactgggaggagtggaggcccacctgggccaggaactggaagcccaaggatgtgtacaagaacagaagcattgagctggtgcagcagcagaatgtgcagctgagcctgacagaggccacagagaaggccaagcaggagtttgagaaggccggcaaggacttcctggtggagaccatcaagctgggcaagctgctgcggcccaaccacctgtggggctactacctgttcccagactgctacaaccaccactacaagaagccaggctacaacggcagctgcttcaacgtggagatcaagagaaatgatgacctgtcctggctgtggaatgaaagcacagccctgtaccccagcatctacctgaacacccagcagagccctgtggccgccaccctgtatgtgaggaacagagtgcgggaggccatccgggtgtccaagatcccagatgccaagagccccctgcctgtgtttgcctacacccgcatcgtgttcacagaccaggtgctgaagttcctgagccaggatgagctggtgtacacctttggagagaccgtggccctgggcgccagcggcatcgtcatctggggcaccctgagcatcatgaggtccatgaagagctgcctgctgctggacaactacatggagaccatcctgaacccctacatcatcaacgtgaccctggccgccaagatgtgcagccaggtgctgtgccaggagcagggcgtgtgcatcaggaagaactggaacagcagtgactacctgcacctgaacccagacaactttgccatccagctggagaagggcggcaagttcaccgtgcggggcaagcccaccctggaggacctggagcagttcagcgagaagttctactgcagctgctacagcaccctgagctgcaaggagaaggcagatgtgaaggacacagatgctgtggatgtgtgcatcgcagatggagtgtgcattgatgccttcctgaagccacccatggagacagaggagccccagatcttctacaatgccagccccagcaccctgagcgccaccatgtttattgtgtccatcctcttcctgatcatcagctctgtggccagcctgtag

SEQ ID NO: 3442 - DNA, 243 bp, synthetic construct
  misc_feature 1..243: note = source = /note="Description of Artificial Sequence: Synthetic coding sequence"
  source 1..243: mol_type = other DNA
atgggcgtgctgaagttcaagcacatcttcttccgcagctttgtgaagagcagcggcgtgtcccagatcgtgttcaccttcctgctgatcccctgctgcctgaccctgaacttccgggcccctcctgtgatccccaacgtgcccttcctgtgggcctggaatgcccccagcgagttctgcctgggcaagtttgatgagcccctggacatgagcctcttctccttcatcggcagccccaggtag

SEQ ID NO: 3443 - DNA, 1530 bp, synthetic construct; identical to SEQ ID NO: 3441
  misc_feature 1..1530: note = source = /note="Description of Artificial Sequence: Synthetic coding sequence"
  source 1..1530: mol_type = other DNA

SEQ ID NO: 3444 - DNA, 1530 bp, synthetic construct; identical to SEQ ID NO: 3441
  misc_feature 1..1530: note = source = /note="Description of Artificial Sequence: Synthetic coding sequence"
  source 1..1530: mol_type = other DNA

SEQ ID NO: 3445 - DNA, 1764 bp, synthetic construct
  misc_feature 1..1764: note = source = /note="Description of Artificial Sequence: Synthetic coding sequence"
  source 1..1764: mol_type = other DNA
atgccccgctacggggccagcctgcggcagagctgccccaggagcggccgggagcagggccaggacggcacagctggggcccctggcctgctgtggatgggcctggtgctggccctggccctggccctggccctggccctggccctgagtgacagccgggtgctgtgggccccagctgaggcccaccccctgagcccccagggccacccagcccggctgcaccgcatcgtgccccggctgagagatgtgtttggctggggcaacctgacctgccccatctgcaagggcctcttcaccgccatcaacctgggcctgaagaaggagcccaacgtggcccgggtgggctctgtggccatcaagctgtgcaacctgctgaagatcgcccctcctgctgtgtgccagagcatcgtgcacctgtttgaagatgacatggtggaggtgtggaggagatctgtgctgagccccagcgaggcctgtggcctgctgctgggcagcacctgtggccactgggacatcttcagctcctggaacatcagcctgcccaccgtgcccaagcccccacccaagccacccagccccccagcccctggggcccctgtgagccgcatcctcttcctgacagacctgcactgggaccatgactacctggagggcacagatcctgactgtgccgaccccctgtgctgccggcggggcagcggcctgcccccagccagcaggcctggagctggctactggggcgagtacagcaaatgtgacctgcccctgcggaccctggagagcctgctgagcggcctgggccctgctggcccctttgacatggtgtactggacaggagacatcccagcccatgatgtgtggcaccagacccggcaggaccagctgcgggccctgaccaccgtgacagccctggtgaggaagttcctgggccctgtgcctgtgtacccagctgtgggcaaccacgagagcacccctgtgaacagcttccccccacccttcatcgagggcaaccacagcagccgctggctgtatgaggccatggccaaggcctgggagccctggctgcctgctgaggccctgcggaccctgcgctacctgagctctgtggagacccaggagggcaagaggaaggtgcacatcatcggccacatccccccaggccactgcctgaagtcctggagctggaactactaccgcatcgtggcccgctatgagaacaccctggccgcccagttcttcggccacacccacgtggatgaatttgaggtgttctatgatgaggagaccctgagccggcccctggccgtggccttcctggcccccagcgccaccacctacatcggcctgaaccctggctacagagtgtaccagattgatggcaactacagcggcagcagccacgtggtgctggaccacgagacctacatcctgaacctgacccaggccaacatccctggggccatcccccactggcagctgctgtaccgggcccgggagacctacggcctgcccaacaccctgcccacagcctggcacaacctggtgtacaggatgagaggagacatgcagctgttccagaccttctggttcctgtaccacaagggccaccccccatctgagccctgtggcaccccctgccgcctggccaccctgtgtgcccagctgagcgcccgggctgacagccctgccctgtgccgccacctgatgccagatggcagcctgcctgaggcccagagcctgtggccccggcccctcttctgctag

SEQ ID NO: 3446 - DNA, 1896 bp, synthetic construct
  misc_feature 1..1896: note = source = /note="Description of Artificial Sequence: Synthetic coding sequence"
  source 1..1896: mol_type = other DNA
atgccccgctacggggccagcctgcggcagagctgccccaggagcggccgggagcagggccaggacggcacagctggggcccctggcctgctgtggatgggcctggtgctggccctggccctggccctggccctggccctggccctgagtgacagccgggtgctgtgggccccagctgaggcccaccccctgagcccccagggccacccagcccggctgcaccgcatcgtgccccggctgagagatgtgtttggctggggcaacctgacctgccccatctgcaagggcctcttcaccgccatcaacctgggcctgaagaaggagcccaacgtggcccgggtgggctctgtggccatcaagctgtgcaacctgctgaagatcgcccctcctgctgtgtgccagagcatcgtgcacctgtttgaagatgacatggtggaggtgtggaggagatctgtgctgagccccagcgaggcctgtggcctgctgctgggcagcacctgtggccactgggacatcttcagctcctggaacatcagcctgcccaccgtgcccaagcccccacccaagccacccagccccccagcccctggggcccctgtgagccgcatcctcttcctgacagacctgcactgggaccatgactacctggagggcacagatcctgactgtgccgaccccctgtgctgccggcggggcagcggcctgcccccagccagcaggcctggagctggctactggggcgagtacagcaaatgtgacctgcccctgcggaccctggagagcctgctgagcggcctgggccctgctggcccctttgacatggtgtactggacaggagacatcccagcccatgatgtgtggcaccagacccggcaggaccagctgcgggccctgaccaccgtgacagccctggtgaggaagttcctgggccctgtgcctgtgtacccagctgtgggcaaccacgagagcacccctgtgaacagcttccccccacccttcatcgagggcaaccacagcagccgctggctgtatgaggccatggccaaggcctgggagccctggctgcctgctgaggccctgcggaccctgagaattggaggcttctacgccctgagcccctacccaggcctgcggctcatcagcctgaacatgaacttctgcagccgggagaacttctggctgctgatcaacagcacagatcctgctggccagctgcagtggctggtgggggagctgcaggccgctgaggacagaggagacaaggtgcacatcatcggccacatccccccaggccactgcctgaagtcctggagctggaactactaccgcatcgtggcccgctatgagaacaccctggccgcccagttcttcggccacacccacgtggatgaatttgaggtgttctatgatgaggagaccctgagccggcccctggccgtggccttcctggcccccagcgccaccacctacatcggcctgaaccctggctacagagtgtaccagattgatggcaactacagcggcagcagccacgtggtgctggaccacgagacctacatcctgaacctgacccaggccaacatccctggggccatcccccactggcagctgctgtaccgggcccgggagacctacggcctgcccaacaccctgcccacagcctggcacaacctggtgtacaggatgagaggagacatgcagctgttccagaccttctggttcctgtaccacaagggccaccccccatctgagccctgtggcaccccctgccgcctggccaccctgtgtgcccagctgagcgcccgggctgacagccctgccctgtgccgccacctgatgccagatggcagcctgcctgaggcccagagcctgtggccccggcccctcttctgctag

SEQ ID NO: 3447 - DNA, 1728 bp, synthetic construct
  misc_feature 1..1728: note = source = /note="Description of Artificial Sequence: Synthetic coding sequence"
  source 1..1728: mol_type = other DNA
atgccccgctacggggccagcctgcggcagagctgccccaggagcggccgggagcagggccaggacggcacagctggggcccctggcctgctgtggatgggcctggtgctggccctggccctggccctggccctggccctggccctgagtgacagccgggtgctgtgggccccagctgaggcccaccccctgagcccccagggccacccagcccggctgcaccgcatcgtgccccggctgagagatgtgtttggctggggcaacctgacctgccccatctgcaagggcctcttcaccgccatcaacctgggcctgaagaaggagcccaacgtggcccgggtgggctctgtggccatcaagctgtgcaacctgctgaagatcgcccctcctgctgtgtgccagagcatcgtgcacctgtttgaagatgacatggtggaggtgtggaggagatctgtgctgagccccagcgaggcctgtggcctgctgctgggcagcacctgtggccactgggacatcttcagctcctggaacatcagcctgcccaccgtgcccaagcccccacccaagccacccagccccccagcccctggggcccctgtgagccgcatcctcttcctgacagacctgcactgggaccatgactacctggagggcacagatcctgactgtgccgaccccctgtgctgccggcggggcagcggcctgcccccagccagcaggcctggagctggctactggggcgagtacagcaaatgtgacctgcccctgcggaccctggagagcctgctgagcggcctgggccctgctggcccctttgacatggtgtactggacaggagacatcccagcccatgatgtgtggcaccagacccggcaggaccagctgcgggccctgaccaccgtgacagccctggtgaggaagttcctgggccctgtgcctgtgtacccagctgtgggcaaccacgagagcacccctgtgaacagcttccccccacccttcatcgagggcaaccacagcagccgctggctgtatgaggccatggccaaggcctgggagccctggctgcctgctgaggccctgcggaccctgaggaaggtgcacatcatcggccacatccccccaggccactgcctgaagtcctggagctggaactactaccgcatcgtggcccgctatgagaacaccctggccgcccagttcttcggccacacccacgtggatgaatttgaggtgttctatgatgaggagaccctgagccggcccctggccgtggccttcctggcccccagcgccaccacctacatcggcctgaaccctggctacagagtgtaccagattgatggcaactacagcggcagcagccacgtggtgctggaccacgagacctacatcctgaacctgacccaggccaacatccctggggccatcccccactggcagctgctgtaccgggcccgggagacctacggcctgcccaacaccctgcccacagcctggcacaacctggtgtacaggatgagaggagacatgcagctgttccagaccttctggttcctgtaccacaagggccaccccccatctgagccctgtggcaccccctgccgcctggccaccctgtgtgcccagctgagcgcccgggctgacagccctgccctgtgccgccacctgatgccagatggcagcctgcctgaggcccagagcctgtggccccggcccctcttctgctag

SEQ ID NO: 3448 - DNA, 1893 bp, synthetic construct
  misc_feature 1..1893: note = source = /note="Description of Artificial Sequence: Synthetic coding sequence"
  source 1..1893: mol_type = other DNA
atgccccgctacggggccagcctgcggcagagctgccccaggagcggccgggagcagggccaggacggcacagctggggcccctggcctgctgtggatgggcctggtgctggccctggccctggccctggccctggccctggccctgagtgacagccgggtgctgtgggccccagctgaggcccaccccctgagcccccagggccacccagcccggctgcaccgcatcgtgccccggctgagagatgtgtttggctggggcaacctgacctgccccatctgcaagggcctcttcaccgccatcaacctgggcctgaaggagcccaacgtggcccgggtgggctctgtggccatcaagctgtgcaacctgctgaagatcgcccccccagctgtgtgccagagcatcgtgcacctgtttgaagatgacatggtggaggtgtggaggagatctgtgctgagccccagcgaggcctgtggcctgctgctgggcagcacctgtggccactgggacatcttcagctcctggaacatcagcctgcccaccgtgcccaagcccccacccaagccacccagccccccagcccctggggcccctgtgagccgcatcctcttcctgacagacctgcactgggaccatgactacctggagggcacagatcctgactgtgccgaccccctgtgctgcagaagaggcagcggcctgcccccagccagcaggcctggggccggctactggggcgagtacagcaaatgtgacctgcccctgcggaccctggagagcctgctgagcggcctgggccctgctggcccctttgacatggtgtactggacaggagacatcccagcccatgatgtgtggcaccagacccggcaggaccagctgcgggccctgaccaccgtgacagccctggtgaggaagttcctgggccctgtgcctgtgtacccagctgtgggcaaccacgagagcacccctgtgaacagcttccccccacccttcatcgagggcaaccacagcagccgctggctgtatgaggccatggccaaggcctgggagccctggctgcctgctgaggccctgcggaccctgcgcatcggcggcttctacgccctgagcccctacccaggcctgcggctcatcagcctgaacatgaacttctgcagccgggagaacttctggctgctgatcaacagcacagatcctgctggccagctgcagtggctggtgggggagctgcaggccgcagaagatagaggagacaaggtgcacatcatcggccacatccccccaggccactgcctgaagtcctggagctggaactactacagaattgtggcccgctatgagaacaccctggccgcccagttcttcggccacacccacgtggatgaatttgaggtgttctatgatgaggagaccctgagccggcccctggccgtggccttcctggcccccagcgccaccacctacatcggcctgaaccctggctacagagtgtaccagattgatggcaactacagcggcagcagccacgtggtgctggaccacgagacctacatcctgaacctgacccaggccaacatccctggggccatcccccactggcagctgctgtaccgggcccgggagacctacggcctgcccaacaccctgcccacagcctggcacaacctggtgtacaggatgagaggagacatgcagctgttccagaccttctggttcctgtaccacaagggccacccccccagcgagccctgtggcaccccctgccgcctggccaccctgtgtgcccagctgagcgcccgggctgacagccctgccctgtgccgccacctgatgccagatggcagcctgcctgaggcccagagcctgtggccccggcccctcttctgctag

SEQ ID NO: 3449 - DNA, 1101 bp, synthetic construct
  misc_feature 1..1101: note = source = /note="Description of Artificial Sequence: Synthetic coding sequence"
  source 1..1101: mol_type = other DNA
atgccccgctacggggccagcctgcggcagagctgccccaggagcggccgggagcagggccaggacggcacagctggggcccctggcctgctgtggatgggcctggtgctggccctggccctggccctggccctggccctggccctgagtgacagccgggtgctgtgggccccagctgaggcccaccccctgagcccccagggccacccagcccggctgcaccgcatcgtgccccggctgagagatgtgtttggctggggcaacctgacctgccccatctgcaagggcctcttcaccgccatcaacctgggcctgaagaaggagcccaacgtggcccgggtgggctctgtggccatcaagctgtgcaacctgctgaagatcgcccctcctgctgtgtgccagagcatcgtgcacctgtttgaagatgacatggtggaggtgtggaggagatctgtgctgagccccagcgaggcctgtggcctgctgctgggcagcacctgtggccactgggacatcttcagctcctggaacatcagcctgcccaccgtgcccaagcccccacccaagccacccagccccccagcccctggggcccctgtgagccgcatcctcttcctgacagacctgcactgggaccatgactacctggagggcacagatcctgactgtgccgaccccctgtgctgccggcggggcagcggcctgcccccagccagcaggcctggagctggctactggggcgagtacagcaaatgtgacctgcccctgcggaccctggagagcctgctgagcggcctgggccctgctggcccctttgacatggtgtactggacaggagacatcccagcccatgatgtgtggcaccagacccggcaggaccagctgcgggccctgaccaccgtgacagccctggtgaggaagttcctgggccctgtgcctgtgtacccagctgtgggcaaccacgagagcacccctgtgaacagcttccccccacccttcatcgagggcaaccacagcagccgctggctgtatgaggccatggccaaggcctgggagccctggctgcctgctgaggccctgcggaccctgcgctgcatctag

SEQ ID NO: 3450 - DNA, 1209 bp, synthetic construct
  misc_feature 1..1209: note = source = /note="Description of Artificial Sequence: Synthetic coding sequence"
  source 1..1209: mol_type = other DNA
atgccccgctacggggccagcctgcggcagagctgccccaggagcggccgggagcagggccaggacggcacagctggggcccctggcctgctgtggatgggcctggtgctggccctggccctggccctggccctggccctggccctgagtgacagccgggtgctgtgggccccagctgaggcccaccccctgagcccccagggccacccagcccggctgcaccgcatcgtgccccggctgagagatgtgtttggctggggcaacctgacctgccccatctgcaagggcctcttcaccgccatcaacctgggcctgaagaaggagcccaacgtggcccgggtgggctctgtggccatcaagctgtgcaacctgctgaagatcgcccctcctgctgtgtgccagagcatcgtgcacctgtttgaagatgacatggtggaggtgtggaggagatctgtgctgagccccagcgaggcctgtggcctgctgctgggcagcacctgtggccactgggacatcttcagctcctggaacatcagcctgcccaccgtgcccaagcccccacccaagccacccagccccccagcccctggggcccctgtgagccgcatcctcttcctgacagacctgcactgggaccatgactacctggagggcacagatcctgactgtgccgaccccctgtgctgccggcggggcagcggcctgcccccagccagcaggcctggagctggctactggggcgagtacagcaaatgtgacctgcccctgcggaccctggagagcctgctgagcggcctgggccctgctggcccctttgacatggtgtactggacaggagacatcccagcccatgatgtgtggcaccagacccggcaggaccagctgcgggccctgaccaccgtgacagccctggtgaggaagttcctgggccctgtgcctgtgtacccagctgtgggcaaccacgagagcacccctgtgaacagcttccccccacccttcatcgagggcaaccacagcagccgctggctgtatgaggccatggccaaggcctgggagccctggctgcctgctgaggccctgcggaccctgcgctacctgagctctgtggagacccaggagggcaagaggaagaactggggcgtgctgtgcagcttccccatccccaggagccccccccacctgagccagtatgagttcctgttcccctag

SEQ ID NO: 3451 - DNA, 954 bp, synthetic construct
  misc_feature 1..954: note = source = /note="Description of Artificial Sequence: Synthetic coding sequence"
  source 1..954: mol_type = other DNA
atgtacaacatgatggagacagagctgaagcccccaggcccccagcagaccagcggcggcggcggcggcaacagcacagctgctgctgctgggggcaaccagaagaacagcccagacagagtgaagaggcccatgaatgccttcatggtgtggagccggggccagaggaggaagatggcccaggagaaccccaagatgcacaacagcgagatcagcaagaggctgggcgctgagtggaagctgctgtctgaaacagagaagaggcccttcattgatgaggccaagaggctgcgggccctgcacatgaaggagcacccagactacaagtaccggcccaggaggaagaccaagaccctgatgaagaaggacaagtacaccctgcccggcggcctgctggcccctgggggcaacagcatggccagcggcgtgggcgtgggcgccggcctgggcgccggcgtgaaccagaggatggacagctatgcccacatgaatggctggagcaatggcagctacagcatgatgcaggaccagctgggctacccccagcaccctggcctgaatgcccatggagctgcccagatgcagcccatgcacagatatgatgtgtctgccctgcagtacaacagcatgaccagcagccagacctacatgaatggcagccccacctacagcatgagctacagccagcagggcaccccaggcatggccctgggctccatgggctctgtggtgaagtctgaggccagcagcagcccccctgtggtgaccagcagcagccacagccgggccccctgccaggccggggacctgcgggacatgatctccatgtacctgcctggagctgaggtgcctgagcctgctgcccccagccggctgcacatgagccagcactaccagagcggccctgtgcccggcacagccatcaatggcaccctgcccctgagccacatgtag

SEQ ID NO: 3452 - DNA, 954 bp, synthetic construct; identical to SEQ ID NO: 3451
  misc_feature 1..954: note = source = /note="Description of Artificial Sequence: Synthetic coding sequence"
  source 1..954: mol_type = other DNA

SEQ ID NO: 3453 - DNA, 1182 bp, synthetic construct
  misc_feature 1..1182: note = source = /note="Description of Artificial Sequence: Synthetic coding sequence"
  source 1..1182: mol_type = other DNA
atgcaccaggccggctacccaggctgccgcggggccatggccgagagccacctgctgcagtggctgctgctgctgctgcccaccctgtgtggccctggaacagctgcctggaccaccagcagcctggcctgtgcccagggccctgagttctggtgccagagcctggagcaggccctgcagtgccgggccctgggccactgcctgcaggaggtgtggggccacgtgggcgcagatgacctgtgccaggagtgtgaagatattgtgcacatcctgaacaagatggccaaggaggccatcttccaggacaccatgaggaagttcctggagcaggagtgcaatgtgctgcccctgaagctgctgatgccccagtgcaaccaggtgctggatgactacttccccctggtgattgactacttccagaaccagacagacagcaatggcatctgcatgcacctgggcctgtgcaagagccggcagcctgagcctgagcaggagcccggcatgtctgaccccctgcccaagcccctgcgggaccccctgcctgaccccctgctggacaagctggtgctgcctgtgctgcccggggccctgcaggcccggcccggcccccacacccaggacctgtctgagcagcagttccccatccccctgccctactgctggctgtgccgggccctgatcaagaggatccaggccatgatccccaagggggccctggccgtggccgtggcccaggtgtgccgggtggtgcccctggtggccggcggcatctgccagtgcctggccgagcgctacagcgtcatcctgctggacaccctgctgggccgcatgctgccccagctggtgtgccgcctggtgctgcgctgcagcatggatgacagcgctggccccaggagccccactggagagtggctgccccgggacagcgagtgccacctgtgcatgtctgtgaccacccaggccggcaacagcagcgagcaggccatcccccaggccatgctgcaggcctgtgtgggctcctggctggaccgggagaagtgcaagcagtttgtggagcagcacaccccccagctgctgaccctggtgccccggggctgggatgcccacaccacctgccaggccctgggcgtgtgtggcaccatgagcagccccctgcagtgcatccacagcccagacctgtag

SEQ ID NO: 3454 - DNA, 1182 bp, synthetic construct; identical to SEQ ID NO: 3453
  misc_feature 1..1182: note = source = /note="Description of Artificial Sequence: Synthetic coding sequence"
  source 1..1182: mol_type = other DNA

SEQ ID NO: 3455 - DNA, 1050 bp, synthetic construct
  misc_feature 1..1050: note = source = /note="Description of Artificial Sequence: Synthetic coding sequence"
  source 1..1050: mol_type = other DNA
atggccgagagccacctgctgcagtggctgctgctgctgctgcccaccctgtgtggccctggaacagctgcctggaccaccagcagcctggcctgtgcccagggccctgagttctggtgccagagcctggagcaggccctgcagtgccgggccctgggccactgcctgcaggacaccatgaggaagttcctggagcaggagtgcaatgtgctgcccctgaagctgctgatgccccagtgcaaccaggtgctggatgactacttccccctggtgattgactacttccagaaccagacagacagcaatggcatctgcatgcacctgggcctgtgcaagagccggcagcctgagcctgagcaggagcccggcatgtctgaccccctgcccaagcccctgcgggaccccctgcctgaccccctgctggacaagctggtgctgcctgtgctgcccggggccctgcaggcccggcccggcccccacacccaggacctgtctgagcagcagttccccatccccctgccctactgctggctgtgccgggccctgatcaagaggatccaggccatgatccccaagggggccctggccgtggccgtggcccaggtgtgccgggtggtgcccctggtggccggcggcatctgccagtgcctggccgagcgctacagcgtcatcctgctggacaccctgctgggccgcatgctgccccagctggtgtgccgcctggtgctgcgctgcagcatggatgacagcgctggccccaggagccccactggagagtggctgccccgggacagcgagtgccacctgtgcatgtctgtgaccacccaggccggcaacagcagcgagcaggccatcccccaggccatgctgcaggcctgtgtgggctcctggctggaccgggagaagtgcaagcagtttgtggagcagcacaccccccagctgctgaccctggtgccccggggctgggatgcccacaccacctgccaggccctgggcgtgtgtggcaccatgagcagccccctgcagtgcatccacagcccagacctgtag

SEQ ID NO: 3456 - DNA, 1152 bp, synthetic construct
  misc_feature 1..1152: note = source = /note="Description of Artificial Sequence: Synthetic coding sequence"
  source 1..1152: mol_type = other DNA
ggggccatggccgagagccacctgctgcagtggctgctgctgctgctgcccaccctgtgtggccctggaacagctgcctggaccaccagcagcctggcctgtgcccagggccctgagttctggtgccagagcctggagcaggccctgcagtgccgggccctgggccactgcctgcaggaggtgtggggccacgtgggcgcagatgacctgtgccaggagtgtgaagatattgtgcacatcctgaacaagatggccaaggaggccatcttccaggacaccatgaggaagttcctggagcaggagtgcaatgtgctgcccctgaagctgctgatgccccagtgcaaccaggtgctggatgactacttccccctggtgattgactacttccagaaccagacagacagcaatggcatctgcatgcacctgggcctgtgcaagagccggcagcctgagcctgagcaggagcccggcatgtctgaccccctgcccaagcccctgcgggaccccctgcctgaccccctgctggacaagctggtgctgcctgtgctgcccggggccctgcaggcccggcccggcccccacacccaggacctgtctgagcagcagttccccatccccctgccctactgctggctgtgccgggccctgatcaagaggatccaggccatgatccccaagggggccctggccgtggccgtggcccaggtgtgccgggtggtgcccctggtggccggcggcatctgccagtgcctggccgagcgctacagcgtcatcctgctggacaccctgctgggccgcatgctgccccagctggtgtgccgcctggtgctgcgctgcagcatggatgacagcgctggccccaggagccccactggagagtggctgccccgggacagcgagtgccacctgtgcatgtctgtgaccacccaggccggcaacagcagcgagcaggccatcccccaggccatgctgcaggcctgtgtgggctcctggctggaccgggagaagtgcaagcagtttgtggagcagcacaccccccagctgctgaccctggtgccccggggctgggatgcccacaccacctgccaggccctgggcgtgtgtggcaccatgagcagccccctgcagtgcatccacagcccagacctgtag

SEQ ID NO: 3457 - DNA, 1728 bp, synthetic construct
  misc_feature 1..1728: note = source = /note="Description of Artificial Sequence: Synthetic coding sequence"
  source 1..1728: mol_type = other DNA
atgctgggcgtgctggtgctgggcgccctggccctggccggcctgggcttccctgccccagctgagccccagcccggcggcagccagtgtgtggagcatgactgctttgccctgtacccaggccctgccaccttcctgaatgccagccagatctgtgatggcctgcggggccacctgatgacagtgcgcagctctgtggccgcagatgtgatcagcctgctgctgaatggagatggcggcgtgggcagaagaaggctgtggattggcctgcagctgcccccaggctgtggggaccccaagaggctgggccccctgcggggcttccagtgggtgactggagacaacaacaccagctacagccgctgggcccggctggacctgaatggagcccccctgtgtggccccctgtgtgtggccgtgtctgctgctgaggccaccgtgcccagcgagcccatctgggaggagcagcagtgtgaggtgaaggcagatggcttcctgtgtgagttccacttccctgccacctgccggcccctggccgtggagcccggggctgctgctgctgctgtgtccatcacctacggcaccccatttgctgcccggggagctgacttccaggccctgcctgtgggcagcagcgctgctgtggcccccctgggcctgcagctgatgtgcacagcccctcctggagctgtgcagggccactgggcccgggaggcccctggggcctgggactgcagcgtggagaatggaggctgtgagcacgcctgcaatgccatccctggggccccccgctgccagtgcccagctggagctgccctgcaggctgatggccgcagctgcacagccagcgccacccagagctgcaatgacctgtgtgagcacttctgtgtgcccaacccagaccagcccggcagctacagctgcatgtgtgagaccggctaccgcctggccgctgaccagcaccgctgtgaagatgtggatgactgcatcctggagcccagcccctgcccccagagatgtgtgaacacccagggcggctttgagtgccactgctaccccaactatgacctggtggatggagaatgtgtggagcctgtggacccctgcttccgggccaactgtgagtaccagtgccagcccctgaaccagaccagctacctgtgtgtgtgtgccgagggctttgcccccatcccccatgagccccaccgctgccagatgttctgcaaccagacagcctgcccagctgactgtgaccccaacacccaggccagctgtgagtgcccagagggctacatcctggatgatggcttcatctgcacagacattgatgaatgtgaaaatggaggcttctgcagcggcgtgtgccacaacctgcccggcacctttgagtgcatctgtggccctgacagcgccctggcccggcacatcggcacagactgtgacagcggcaaggtggatggaggagacagcggcagcggggagcccccacccagccccaccccaggcagcaccctgaccccacctgctgtgggcctggtgcacagcggcctgctgattggcatcagcatcgccagcctgtgcctggtggtggccctgctggccctgctgtgccacctgaggaagaagcagggcgccgcccgggccaagatggagtacaagtgtgccgcccccagcaaggaggtggtgctgcagcacgtgaggacagagaggaccccccagaggctgtag

SEQ ID NO: 3458 - DNA, 1674 bp, synthetic construct
  misc_feature 1..1674: note = source = /note="Description of Artificial Sequence: Synthetic coding sequence"
  source 1..1674: mol_type = other DNA
atgtctgaggccgccagccagggcctgcgggccgccgcccggtctgtgtgggccggcacagaccggcggggctgccgccaccggcggcctgtgcccctgtgcagcggcacagccctgagccagtgcccccgcttcccccggcggctgcatgctgcccggctgggcaacatgctgggcgtgctggtgctgggcgccctggccctggccggcctgggcttccctgcccctggctgtggggaccccaagaggctgggccccctgcggggcttccagtgggtgactggagacaacaacaccagctacagccgctgggcccggctggacctgaatggagcccccctgtgtggccccctgtgtgtggccgtgtctgctgctgaggccaccgtgcccagcgagcccatctgggaggagcagcagtgtgaggtgaaggcagatggcttcctgtgtgagttccacttccctgccacctgccggcccctggccgtggagcccggggctgctgctgctgctgtgtccatcacctacggcaccccatttgctgcccggggagctgacttccaggccctgcctgtgggcagcagcgctgctgtggcccccctgggcctgcagctgatgtgcacagcccctcctggagctgtgcagggccactgggcccgggaggcccctggggcctgggactgcagcgtggagaatggaggctgtgagcacgcctgcaatgccatccctggggccccccgctgccagtgcccagctggagctgccctgcaggctgatggccgcagctgcacagccagcgccacccagagctgcaatgacctgtgtgagcacttctgtgtgcccaacccagaccagcccggcagctacagctgcatgtgtgagaccggctaccgcctggccgctgaccagcaccgctgtgaagatgtggatgactgcatcctggagcccagcccctgcccccagagatgtgtgaacacccagggcggctttgagtgccactgctaccccaactatgacctggtggatggagaatgtgtggagcctgtggacccctgcttccgggccaactgtgagtaccagtgccagcccctgaaccagaccagctacctgtgtgtgtgtgccgagggctttgcccccatcccccatgagccccaccgctgccagatgttctgcaaccagacagcctgcccagctgactgtgaccccaacacccaggccagctgtgagtgcccagagggctacatcctggatgatggcttcatctgcacagacattgatgaatgtgaaaatggaggcttctgcagcggcgtgtgccacaacctgcccggcacctttgagtgcatctgtggccctgacagcgccctggcccggcacatcggcacagactgtgacagcggcaaggtggatggaggagacagcggcagcggggagcccccacccagccccaccccaggcagcaccctgaccccacctgctgtgggcctggtgcacagcggcctgctgattggcatcagcatcgccagcctgtgcctggtggtggccctgctggccctgctgtgccacctgaggaagaagcagggcgccgcccgggccaagatggagtacaagtgtgccgcccccagcaaggaggtggtgctgcagcacgtgaggacagagaggaccccccagaggctgtag

SEQ ID NO: 3459 - DNA, 1062 bp, synthetic construct
  misc_feature 1..1062: note = source = /note="Description of Artificial Sequence: Synthetic coding sequence"
  source 1..1062: mol_type = other DNA
atggagctgacagagctgctgctggtggtgatgctgctgctgacagcccggctgaccctgagcagccctgcccccccagcctgtgacctgcgggtgctgagcaagctgctgcgggacagccacgtgctgcacagccggctgagccagtgcccagaggtgcaccccctgcccacccctgtgctgctgcctgctgtggacttcagcctgggggagtggaagacccagatggaggagaccaaggcccaggacatcctgggcgctgtgaccctgctgctggagggcgtgatggccgcccggggccagctgggccccacctgcctgagcagcctgctgggccagctgagcggccaggtgcggctgctgctgggcgccctgcagagcctgctgggcacccagctgcccccccagggccgcaccacagcccacaaggaccccaatgccatcttcctgtccttccagcacctgctgcggggcaaggtgcgcttcctgatgctggtgggcggcagcaccctgtgtgtgcggcgggccccacccaccacagctgtgcccagcaggaccagcctggtgctgaccctgaatgagctgcccaacagaaccagcggcctgctggagaccaacttcaccgccagcgcccggaccaccggcagcggcctgctgaagtggcagcagggcttccgggccaagatccctggcctgctgaaccagaccagccgcagcctggaccagatccctggctacctgaaccgcatccacgagctgctgaatggcacccggggcctcttccctggccccagcaggaggaccctgggcgccccagacatcagcagcggcaccagtgacaccggcagcctgccccccaacctgcagcccggctacagccccagccccacccaccccccaacaggccagtacaccctcttccccctgccccccaccctgcccacccctgtggtgcagctgcaccccctgctgcctgaccccagcgcccccacccccacccccaccagccccctgctgaacaccagctacacccacagccagaacctgagccaggagggctag

SEQ ID NO: 3460 - DNA, 945 bp, synthetic construct
  misc_feature 1..945: note = source = /note="Description of Artificial Sequence: Synthetic coding sequence"
  source 1..945: mol_type = other DNA
atggagctgacagagctgctgctggtggtgatgctgctgctgacagcccggctgaccctgagcagccctgcccccccagcctgtgacctgcgggtgctgagcaagctgctgcgggacagccacgtgctgcacagccggctgagccagtgcccagaggtgcaccccctgcccacccctgtgctgctgcctgctgtggacttcagcctgggggagtggaagacccagatggaggagaccaaggcccaggacatcctgggcgctgtgaccctgctgctggagggcgtgatggccgcccggggccagctgggccccacctgcctgagcagcctgctgggccagctgagcggccaggtgcggctgctgctgggcgccctgcagagcctgctgggcacccagctgcccccccagggccgcaccacagcccacaaggaccccaatgccatcttcctgtccttccagcacctgctgcggggcaagaccagcggcctgctggagaccaacttcaccgccagcgcccggaccactggaagtggcctgctgaagtggcagcagggcttccgggccaagatccctggcctgctgaaccagaccagccgcagcctggaccagatccctggctacctgaaccgcatccacgagctgctgaatggcacccggggcctcttccctggccccagcaggaggaccctgggcgccccagacatcagcagcggcaccagtgacaccggcagcctgccccccaacctgcagcccggctacagccccagccccacccacccccccaccggccagtacaccctcttccccctgccccccaccctgcccacccctgtggtgcagctgcaccccctgctgcctgaccccagcgcccccacccccacccccaccagccccctgctgaacaccagctacacccacagccagaacctgagccaggagggctag

SEQ ID NO: 3461 - DNA, 861 bp, synthetic construct
  misc_feature 1..861: note = source = /note="Description of Artificial Sequence: Synthetic coding sequence"
  source 1..861: mol_type = other DNA
atggagctgacagagctgctgctggtggtgatgctgctgctgacagcccggctgaccctgagcagccctgcccccccagcctgtgacctgcgggtgctgagcaagctgctgcgggacagccacgtgctgcacagccggctgagccagtgcccagaggtgcaccccctgcccacccctgtgctgctgcctgctgtggacttcagcctgggggagtggaagacccagatggaggagaccaaggcccaggacatcctgggcgctgtgaccctgctgctggagggcgtgatggccgcccggggccagctgggccccacctgcctgagcagcctgctgggccagctgagcggccaggtgcggctgctgctgggcgccctgcagagcctgctgggcacccagctgcccccccagggccgcaccacagcccacaaggaccccaatgccatcttcctgtccttccagcacctgctgcggggcaaggacttctggatcgtgggggacaagctgcactgcctgagccagaactactggctgtgggccagcgaggtggccgccggcatccagagccaggacagctggagcgctgagcccaacctgcaggtgcccggccccaacccccgcatccctgagcaggacaccaggaccctggagtggaacagctggaccctgtcctggaccctgacccaggaccccaggagccctggccacttcctgaggaacatccgccaccggctgcctgccacccagcccccagcctggatcttctccttccccaaccccagcagctactggacagtgtatgccctgcccagcagcacccacctggcccacccctgtggccctgcccctcctccagccagctag

SEQ ID NO: 3462 - DNA, 1050 bp, synthetic construct
  misc_feature 1..1050: note = source = /note="Description of Artificial Sequence: Synthetic coding sequence"
  source 1..1050: mol_type = other DNA
atggagctgacagagctgctgctggtggtgatgctgctgctgacagcccggctgaccctgagcagccctgcccccccagcctgtgacctgcgggtgctgagcaagctgctgcgggacagccacgtgctgcacagccggctgagccagtgcccagaggtgcaccccctgcccacccctgtgctgctgcctgctgtggacttcagcctgggggagtggaagacccagatggaggagaccaaggcccaggacatcctgggcgctgtgaccctgctgctggagggcgtgatggccgcccggggccagctgggccccacctgcctgagcagcctgctgggccagctgagcggccaggtgcggctgctgctgggcgccctgcagagcctgctgggcacccagggccgcaccacagcccacaaggaccccaatgccatcttcctgtccttccagcacctgctgcggggcaaggtgcgcttcctgatgctggtgggcggcagcaccctgtgtgtgcggcgggccccacccaccacagctgtgcccagcaggaccagcctggtgctgaccctgaatgagctgcccaacagaaccagcggcctgctggagaccaacttcaccgccagcgcccggaccaccggcagcggcctgctgaagtggcagcagggcttccgggccaagatccctggcctgctgaaccagaccagccgcagcctggaccagatccctggctacctgaaccgcatccacgagctgctgaatggcacccggggcctcttccctggccccagcaggaggaccctgggcgccccagacatcagcagcggcaccagtgacaccggcagcctgccccccaacctgcagcccggctacagccccagccccacccaccccccaacaggccagtacaccctcttccccctgccccccaccctgcccacccctgtggtgcagctgcaccccctgctgcctgaccccagcgcccccacccccacccccaccagccccctgctgaacaccagctacacccacagccagaacctgagccaggagggctag

SEQ ID NO: 3463 - DNA, 963 bp, synthetic construct
  misc_feature 1..963: note = source = /note="Description of Artificial Sequence: Synthetic coding sequence"
  source 1..963: mol_type = other DNA
atgcccatgtaccaggtgaagccctaccacggcggcggggcccccctgcgggtggagctgcccacctgcatgtaccgcctgcccaacgtgcacggccgctcctatggccctgcccctggagctggccacgtgcaggaggagagcaacctgagcctgcaggccctggagagccggcaggatgacatcctgaagaggctgtatgagctgaaggctgctgtggatggcctgagcaagatgatccagaccccagatgctgacctggatgtgaccaacatcatccaggctgatgagcccaccaccctgaccaccaatgccctggacctgaacagcgtgctgggcaaggactatggagccctgaaggacatcgtcatcaatgccaacccagccagcccccccctgagcctgctggtgctgcaccggctgctgtgtgagcacttccgggtgctgagcacagtgcacacccacagctctgtgaagtctgtgcctgagaacctgctgaagtgctttggagagcagaacaagaagcagccccggcaggactaccagctgggcttcaccctcatctggaagaatgtgcccaagacccagatgaagttcagcatccagaccatgtgccccattgaaggagagggcaacatcgcccgcttcctgttcagcctgtttggccagaagcacaatgctgtgaatgccaccctgattgacagctgggtggacatcgccatcttccagctgaaggagggcagcagcaaggagaaggctgctgtgttccgctccatgaacagcgccctgggcaagagcccctggctggccggaaatgagctgactgtggctgatgtggtgctgtggagcgtgctgcagcagatcggcggctgcagcgtgacagtgcctgccaacgtgcagcgctggatgaggagctgtgagaacctggcccccttcaacacagccctgaagctgctgaagtag

SEQ ID NO: 3464 - DNA, 1068 bp, synthetic construct
  misc_feature 1..1068: note = source = /note="Description of Artificial Sequence: Synthetic coding sequence"
  source 1..1068: mol_type = other DNA
atggagcggctgtggggcctcttccagagggcccagcagctgagccccaggagcagccagacagtgtaccagagggtggagggccccaggaagggccacctggaggaggaggaggaggatggagaggagggcgctgagaccctggcccacttctgccccatggagctgcggggccctgagcccctgggcagccggccccggcagcccaacctgatcccctgggccgctgctggaagaagagctgccccctacctggtgctgacagccctgctgatcttcaccggggccttcctgctgggctacgtggccttccggggcagctgccaggcctgtggggacagcgtgctggtggtgtctgaagatgtgaactatgagccagacctggacttccaccagggccgcctgtactggagcgacctgcaggccatgttcctgcagttcctgggggagggccgcctggaggacaccatccggcagaccagcctgcgggagcgggtggccggcagcgctggcatggccgccctgacccaggacatccgggccgccctgagccggcagaagctggaccacgtgtggacagacacccactacgtgggcctgcagttcccagaccctgcccaccccaacaccctgcactgggtggatgaagctgggaaggtgggggagcagctgcccctggaggaccctgatgtgtactgcccctacagcgccatcggaaatgtgactggagagctggtgtatgcccactacggccggcctgaggacctgcaggacctgcgggcccggggcgtggaccctgtgggccgcctgctgctggtgcgggtgggcgtcatcagctttgcccagaaggaggcccagaggccctgtggcccccccaggatggccggggagcccccccggctgcccctgagccctggcccccgggccaccacagctgccagcggccagcagagccaggacctgcacccccaccagcagcacctgcggctgcaccggcggcccctgcgggcccggagcctgcgctgccaccggggccctgagggctgcatgggccccaggagcagctag

SEQ ID NO: 3465 - DNA, 2406 bp, synthetic construct
  misc_feature 1..2406: note = source = /note="Description of Artificial Sequence: Synthetic coding sequence"
  source 1..2406: mol_type = other DNA
atggagcggctgtggggcctcttccagagggcccagcagctgagccccaggagcagccagacagtgtaccagagggtggagggccccaggaagggccacctggaggaggaggaggaggatggagaggagggcgctgagaccctggcccacttctgccccatggagctgcggggccctgagcccctgggcagccggccccggcagcccaacctgatcccctgggccgctgctggaagaagagctgccccctacctggtgctgacagccctgctgatcttcaccggggccttcctgctgggctacgtggccttccggggcagctgccaggcctgtggggacagcgtgctggtggtgtctgaagatgtgaactatgagccagacctggacttccaccagggccgcctgtactggagcgacctgcaggccatgttcctgcagttcctgggggagggccgcctggaggacaccatccggcagaccagcctgcgggagcgggtggccggcagcgctggcatggccgccctgacccaggacatccgggccgccctgagccggcagaagctggaccacgtgtggacagacacccactacgtgggcctgcagttcccagaccctgcccaccccaacaccctgcactgggtggatgaagctgggaaggtgggggagcagctgcccctggaggaccctgatgtgtactgcccctacagcgccatcggaaatgtgactggagagctggtgtatgcccactacggccggcctgaggacctgcaggacctgcgggcccggggcgtggaccctgtgggccgcctgctgctggtgcgggtgggcgtcatcagctttgcccagaaggtgaccaatgcccaggactttggagcccagggcgtgctgatctacccagagcctgctgacttcagccaggacccccccaagcccagcctgagcagccagcaggccgtgtatggccacgtgcacctgggcactggagacccctacaccccaggcttccccagcttcaaccagacccagttcccccctgtggccagcagcggcctgcccagcatcccagcccagcccatctctgctgacatcgccagccggctgctgaggaagctgaagggccctgtggccccccaggagtggcagggcagcctgctgggcagcccctaccacctgggccctggcccccggctgcggctggtggtgaacaaccacaggaccagcacccccatcaacaacatcttcggctgcatcgagggccgctctgagccagaccactacgtggtgattggagcccagagagatgcctggggccctggggccgccaagtctgctgtgggcacagccatcctgctggagctggtgaggaccttcagctccatggtgtccaatggcttccggccccggcgcagcctgctcttcatctcctgggatggaggagactttggatctgtgggcagcacagagtggctggagggctacctgtctgtgctgcacctgaaggctgtggtgtatgtgtccctggacaatgctgtgctgggagatgacaagttccacgccaagaccagccccctgctgaccagcctgattgaatctgtgctgaagcaggtggacagccccaaccacagcggccagaccctgtatgagcaggtggtgttcaccaaccccagctgggatgctgaggtgatccggcccctgcccatggacagcagcgcctacagcttcaccgcctttgtgggcgtgcctgctgtggagttctccttcatggaggatgaccaggcctaccccttcctgcacaccaaggaggacacctatgagaacctgcacaaggtgctgcagggccgcctgcctgctgtggcccaggccgtggcccagctggccggccagctgctgatccggctgagccatgaccggctgctgcccctggactttggccgctatggagatgtggtgctgcggcacatcggcaacctgaatgagttcagcggggacctgaaggcccggggcctgaccctgcagtgggtgtacagcgcccggggggactacatccgggctgctgagaagctgcggcaggagatctacagcagcgaggagagagatgagcggctgaccaggatgtacaacgtgcgcatcatgagggtggagttctacttcctgagccagtatgtgtccccagctgacagccccttccgccacatcttcatgggccgcggggaccacaccctgggcgccctgctggaccacctgcggctgctgcggagcaacagcagcggcacccctggggccaccagcagcacaggcttccaggagagccgcttccggcggcagctggccctgctgacctggaccctgcagggcgccgccaatgccctgtctggagatgtgtggaacatcgacaacaacttctag

SEQ ID NO: 3466 - DNA, 1029 bp, synthetic construct
  misc_feature 1..1029: note = source = /note="Description of Artificial Sequence: Synthetic coding sequence"
  source 1..1029: mol_type = other DNA
atggtgtccaatggcttccggcccaggaggagcctgctcttcatctcctgggatggaggagactttggatctgtgggcagcacagagtggctggagggctacctgtctgtgctgcacctgaaggctgtggtgtatgtgtccctggacaatgctgtgctgggagatgacaagttccacgccaagaccagccccctgctgaccagcctcatcgagagcgtgctgaagcaggtggacagccccaaccacagcggccagaccctgtatgagcaggtggtgttcaccaaccccagctgggatgctgaggtgatccggcccctgcccatggacagcagcgcctacagcttcaccgcctttgtgggcgtgcctgctgtggagttctccttcatggaggatgaccaggcctaccccttcctgcacaccaaggaggacacctatgagaacctgcacaaggtgctgcagggccgcctgcctgctgtggcccaggccgtggcccagctggccggccagctgctgatccggctgagccatgaccggctgctgcccctggactttggccgctatggagatgtggtgctgcggcacatcggcaacctgaatgagttcagcggggacctgaaggcccggggcctgaccctgcagtgggtgtacagcgcccggggggactacatccgggctgctgagaagctgcggcaggagatctacagcagcgaggagagagatgagcggctgaccaggatgtacaacgtgcgcatcatgagggtggagttctacttcctgagccagtatgtgtccccagctgacagccccttccgccacatcttcatgggccgcggggaccacaccctgggcgccctgctggaccacctgcggctgctgcggagcaacagcagcggcacccctggggccaccagcagcacaggcttccaggagagccgcttccggcggcagctggccctgctgacctggaccctgcagggcgccgccaatgccctgtctggagatgtgtggaacatcgacaacaacttctag

SEQ ID NO: 3467 - DNA, 1596 bp, synthetic construct
  misc_feature 1..1596: note = source = /note="Description of Artificial Sequence: Synthetic coding sequence"
  source 1..1596: mol_type = other DNA
atggccgccaccctggacctgaagagcaaggaggagaaggatgctgagctggacaagagaattgaggccctgcggaggaagaatgaggccctgatccgccgctaccaggagattgaggaggacaggaagaaggccgagctggagggcgtggccgtgacagcccccaggaagggccgctctgtggagaaggaaaatgtggccgtggagagcgagaagaacctgggccccagccgccgcagccctggcaccccccggcccccaggggccagcaaaggaggccgcaccccaccccagcagggcggccgggccggcatgggccgggccagccgctcctgggagggcagccctggagagcagccccggggcggcggggccggcggccggggccggcggggccggggccggggcagcccccacctgtctggagctggggacaccagcatcagtgacaggaagagcaaggagtgggaggagcggcggcggcagaacatcgagaagatgaatgaggagatggagaagattgctgaatatgaaagaaaccagcgggagggcgtgctggagcccaaccctgtgaggaacttcctggatgacccccggcggcgcagcggccccctggaggagagcgagcgggaccggcgggaggagagcagaagacatggaagaaactggggcggccctgactttgagcgggtgcgctgtggcctggagcacgagcggcagggccggcgggccggcctgggcagcgctggggacatgaccctgtccatgacaggccgggagaggtctgagtacctgcgctggaagcaggagcgggagaagattgaccaggagcggctgcagaggcacaggaagcccaccggccagtggaggcgggagtgggatgctgagaagacagatggcatgttcaaggatggccctgtgcctgcccacgagcccagccacagatatgatgaccaggcctgggcccggccccccaagccacccaccttcggggagttcctgagccagcacaaggccgaggccagcagcagaagaagaaggaagagcagccggccccaggccaaggccgccccccgggcctacagcgaccatgatgaccgctgggagaccaaggagggcgccgccagccctgcccctgagaccccccagcccaccagccctgagaccagccccaaggagacccccatgcagcccccagagatcccagccccagcccaccggcccccagaagatgaaggagaagaaaatgaaggagaggaggatgaggagtgggaggacatcagtgaagatgaggaggaggaggagattgaggtggaggagggagatgaggaggagcccgcccaggaccaccaggcccctgaggccgcccccaccggcatcccctgcagcgagcaggcccatggagtgcccttcagccctgaggagcccctgctggagccccaggcccctggcacccccagcagccccttcagcccccccagcggccaccagcctgtgtctgactggggcgaggaggtggagctgaacagccccaggaccacccacctggccggggccctgagccctggagaggcctggccctttgagagcgtgtag

SEQ ID NO: 3468 - DNA, 1329 bp, synthetic construct
  misc_feature 1..1329: note = source = /note="Description of Artificial Sequence: Synthetic coding sequence"
  source 1..1329: mol_type = other DNA
atgcactactgtgtgctgagcgccttcctgatcctgcacctggtgacagtggccctgagcctgagcacctgcagcaccctggacatggaccagttcatgaggaagagaattgaggccatccggggccagatcctgagcaagctgaagctgaccagccccccagaggactacccagagcctgaggaggtgcccccagaggtgatcagcatctacaacagcacccgggacctgctgcaggagaaggccagccggcgggctgctgcctgtgagcgggagaggagtgatgaggagtactatgccaaggaggtgtacaagattgacatgccacccttcttccccagcgagaccgtgtgccctgtggtgaccaccccatctggctctgtgggcagcctgtgcagccggcagagccaggtgctgtgtggctacctggatgccatcccccccaccttctaccggccctacttcagaattgtgcgctttgatgtgtctgccatggagaagaatgccagcaacctggtgaaggccgagttccgggtcttccggctgcagaaccccaaggcccgggtgcctgagcagagaattgagctgtaccagatcctgaagagcaaggacctgaccagccccacccagcgctacatcgacagcaaggtggtgaagaccagggctgagggggagtggctgagctttgatgtgacagatgctgtgcatgagtggctgcaccacaaggacaggaacctgggcttcaagatcagcctgcactgcccctgctgcacctttgtgcccagcaacaactacatcatccccaacaagtctgaggagctggaggccaggtttgctggcattgatggcaccagcacctacaccagcggggaccagaagaccatcaagagcaccaggaagaagaacagcggcaagaccccccacctgctgctgatgctgctgcccagctaccgcctggagagccagcagaccaacagaaggaagaagagggccctggatgctgcctactgcttcagaaatgtgcaggacaactgctgcctgcggcccctgtacatcgacttcaagagggacctgggctggaagtggatccacgagcccaagggctacaatgccaacttctgtgccggggcctgcccctacctgtggagcagtgacacccagcacagccgggtgctgagcctgtacaacaccatcaaccctgaggccagcgccagcccctgctgcgtgtcccaggacctggagcccctgaccatcctgtactacatcggcaagacccccaagattgagcagctgagcaacatgattgtgaagagctgcaagtgcagctag

SEQ ID NO: 3469 - DNA, 1245 bp, synthetic construct
  misc_feature 1..1245: note = source = /note="Description of Artificial Sequence: Synthetic coding sequence"
  source 1..1245: mol_type = other DNA
atgcactactgtgtgctgagcgccttcctgatcctgcacctggtgacagtggccctgagcctgagcacctgcagcaccctggacatggaccagttcatgaggaagagaattgaggccatccggggccagatcctgagcaagctgaagctgaccagccccccagaggactacccagagcctgaggaggtgcccccagaggtgatcagcatctacaacagcacccgggacctgctgcaggagaaggccagccggcgggctgctgcctgtgagcgggagaggagtgatgaggagtactatgccaaggaggtgtacaagattgacatgccacccttcttccccagtgaaaatgccatcccccccaccttctaccggccctacttcagaattgtgcgctttgatgtgtctgccatggagaagaatgccagcaacctggtgaaggccgagttccgggtcttccggctgcagaaccccaaggcccgggtgcctgagcagagaattgagctgtaccagatcctgaagagcaaggacctgaccagccccacccagcgctacatcgacagcaaggtggtgaagaccagggctgagggggagtggctgagctttgatgtgacagatgctgtgcatgagtggctgcaccacaaggacaggaacctgggcttcaagatcagcctgcactgcccctgctgcacctttgtgcccagcaacaactacatcatccccaacaagtctgaggagctggaggccaggtttgctggcattgatggcaccagcacctacaccagcggggaccagaagaccatcaagagcaccaggaagaagaacagcggcaagaccccccacctgctgctgatgctgctgcccagctaccgcctggagagccagcagaccaacagaaggaagaagagggccctggatgctgcctactgcttcagaaatgtgcaggacaactgctgcctgcggcccctgtacatcgacttcaagagggacctgggctggaagtggatccacgagcccaagggctacaatgccaacttctgtgccggggcctgcccctacctgtggagcagtgacacccagcacagccgggtgctgagcctgtacaacaccatcaaccctgaggccagcgccagcccctgctgcgtgtcccaggacctggagcccctgaccatcctgtactacatcggcaagacccccaagattgagcagctgagcaacatgattgtgaagagctgcaagtgcagctag

SEQ ID NO: 3470 - DNA, 1239 bp, synthetic construct
  misc_feature 1..1239: note = source = /note="Description of Artificial Sequence: Synthetic coding sequence"
  source 1..1239: mol_type = other DNA
atgaagatgcacctgcagagggccctggtggtgctggccctgctgaactttgccaccgtgtccctgagcctgagcacctgcaccaccctggactttggccacatcaagaagaagagggtggaggccatccggggccagatcctgagcaagctgcggctgaccagccccccagagcccaccgtgatgacccacgtgccctaccaggtgctggccctgtacaacagcacccgggagctgctggaggagatgcacggggagcgggaggagggctgcacccaggagaacacagagagcgagtactatgccaaggagatccacaagtttgacatgatccagggcctggccgagcacaatgagctggccgtgtgccccaagggcatcaccagcaaggtgttccgcttcaacgtgtcctctgtggagaagaacagaaccaacctcttccgggcagagttccgggtgctgcgggtgcccaaccccagcagcaagagaaatgagcagagaattgagctgttccagatcctgcggccagatgagcacatcgccaagcagcgctacatcggcggcaagaacctgcccacccggggcacagctgagtggctgagctttgatgtgacagacacagtgcgggagtggctgctgcggcgggagagcaacctgggcctggagatcagcatccactgcccctgccacaccttccagcccaatggagacatcctggagaacatccacgaggtgatggagatcaagttcaagggcgtggacaatgaagatgaccacggccgcggggacctgggccgcctgaagaagcagaaggaccaccacaacccccacctgatcctgatgatgatccccccccaccggctggacaaccctggccagggcggccagaggaagaagagggccctggacaccaactactgcttcaggaacctggaggagaactgctgcgtgcggcccctgtacatcgacttccggcaggacctgggctggaagtgggtgcatgagcccaagggctactatgccaacttctgcagcggcccctgcccctacctgcggtctgctgacaccacccacagcacagtgctgggcctgtacaacaccctgaaccctgaggccagcgccagcccctgctgcgtgccccaggacctggagcccctgaccatcctgtactacgtgggccgcacccccaaggtggagcagctgagcaacatggtggtgaagagctgcaagtgcagctag

SEQ ID NO: 3471 - DNA, 930 bp, synthetic construct
  misc_feature 1..930: note = source = /note="Description of Artificial Sequence: Synthetic coding sequence"
  source 1..930: mol_type = other DNA
atgaagatgcacctgcagagggccctggtggtgctggccctgctgaactttgccaccgtgtccctgagcctgagcacctgcaccaccctggactttggccacatcaagaagaagagggtggaggccatccggggccagatcctgagcaagctgcggctgaccagccccccagagcccaccgtgatgacccacgtgccctaccaggtgctggccctgtacaacagcacccgggagctgctggaggagatgcacggggagcgggaggagggctgcacccaggagaacacagagagcgagtactatgccaaggagatccacaagtttgacatgatccagggcctggccgagcacaatgagctggccgtgtgccccaagggcatcaccagcaaggtgttccgcttcaacgtgtcctctgtggagaagaacagaaccaacctcttccgggcagagttccgggtgctgcgggtgcccaaccccagcagcaagagaaatgagcagagaattgagctgttccagatcctgcggccagatgagcacatcgccaagcagcgctacatcggcggcaagaacctgcccacccggggcacagctgagtggctgagctttgatgtgacagacacagtgcgggagtggctgctgcggcgggagagcaacctgggcctggagatcagcatccactgcccctgccacaccttccagcccaatggagacatcctggagaacatccacgaggtgatggagatcaagttcaagggcgtggacaatgaagatgaccacggccgcggggacctgggccgcctgaagaagcagaaggaccaccacaacccccacctgatcctgatgatgatccccccccaccggctggacaaccctggccagggcggccagaggaagaagagggccctggacaccaactactgcttcagatag

SEQ ID NO: 3472 - DNA, 444 bp, synthetic construct
  misc_feature 1..444: note = source = /note="Description of Artificial Sequence: Synthetic coding sequence"
  source 1..444: mol_type = other DNA
atggccagccaccggctgctgctgctgtgcctggccggcctggtgtttgtgtctgaggccggccccactggaactggagagagcaaatgtcccctgatggtgaaggtgctggatgctgtgcggggcagccctgccatcaacgtggccgtgcacgtgttcaggaaggctgctgatgacacctgggagccctttgccagcggcaagaccagcgagagcggggagctgcacggcctgaccacagaggaggagtttgtggagggcatctacaaggtggagattgacaccaagagctactggaaggccctgggcatcagccccttccacgagcacgccgaggtggtgttcaccgccaatgacagcggcccccggcgctacaccatcgccgccctgctgagcccctacagctacagcaccacagctgtggtgaccaaccccaaggagtag

SEQ ID NO: 3473 - DNA, 555 bp, synthetic construct
  misc_feature 1..555: note = source = /note="Description of Artificial Sequence: Synthetic coding sequence"
  source 1..555: mol_type = other DNA
atggccagccaccggctgctgctgctgtgcctggccggcctggtgtttgtgtctgaggccggccccactggaactggagagagcaaatgtcccctgatggtgaaggtgctggatgctgtgcggggcagccctgccatcaacgtggccgtgcacgtgttcaggaaggctgctgatgacacctgggagccctttgccagcggcaagaccagcgagagcggggagctgcacggcctgaccacagaggaggagtttgtggagggcatctacaaggtggagattgacaccaagagctactggaaggccctgggcatcagccccttccacgagcacgccgaggtgtccatccagacctttgaggccttccaggagatcctgtacaagaagaagttcaccaccctgtggcactggaccagcggcggccagagcttcttccgggccctggtggaggtggtgttcaccgccaatgattctggcccccggcgctacaccatcgccgccctgctgagcccctacagctacagcaccacagctgtggtgaccaaccccaaggagtag

SEQ ID NO: 3474 - DNA, 420 bp, synthetic construct
  misc_feature 1..420: note = source = /note="Description of Artificial Sequence: Synthetic coding sequence"
  source 1..420: mol_type = other DNA
atggccagccaccggctgctgctgctgtgcctggccggcctggtgtttgtgtctgaggccggccccactggaactggagagagcaaatgtcccctgatggtgaaggtgctggatgctgtgcggggcagccctgccatcaacgtggccgtgcacgtgttcaggaaggctgctgatgacacctgggagccctttgccagcggcaagaccagcgagagcggggagctgcacggcctgaccacagaggaggagtttgtggagggcatctacaaggtggagattgacaccaagagctactggaaggccctgggcatcagccccttccacgagcacgccgaggtggtgttcaccgccaatgacagcggcccccggcgctactacagctacagcaccacagctgtggtgaccaaccccaaggagtag

SEQ ID NO: 3475 - DNA, 996 bp, synthetic construct
  misc_feature 1..996: note = source = /note="Description of Artificial Sequence: Synthetic coding sequence"
  source 1..996: mol_type = other DNA
atgaatggcaccaggaactggtgcaccctggtggatgtgcaccctgaggaccaggccgctgtgtacctgaagggccgcagcggggacaagatgattcatgagaagaacatcaaccagctgaagtctgaggtgcagtacatccaggaggccaggaactgcctgcagaagctgcgggaggacatcagcagcaagctggacaggaacctgggggacagcctgcaccggcaggagatccaggtggtgctggagaagcccaacggcttcagccagagccccacagccctgtacagcagccccccagaggtggacacctgcatcaatgaagatgtggagagcctgaggaagacagtgcaggacctgctggccaagctgcaggaggccaagaggcagcaccagagcgactgtgtggcctttgaggtgaccctgagccgctaccagcgggaggccgagcagagcaatgtggccctgcagcgggaggaggacagagtggagcagaaggaggccgaggtgggggagctgcagaggcggctgctgggcatggagacagagcaccaggccctgctggccaaggtgcgggagggggaggtggccctggaggagctgcggagcaacaatgctgactgccaggccgagcgggagaaggccgccaccctggagaaggaggtggccggcctgcgggagaagatccaccacctggatgacatgctgaagagccagcagaggaaggtgcggcagatgattgagcagctgcagaacagcaaggctgtgatccagagcaaggatgccaccatccaggagctgaaggagaagatcgcctacctggaggccgagaacctggagatgcatgacaggatggagcacctgattgagaagcagatcagccacggcaacttcagcacccaggcccgggccaagacagaaaatcctggcagcatccgcatcagcaagccacccagccccaagcccatgcctgtgatccgggtggtggagacctag

SEQ ID NO: 3476 - DNA, 1098 bp, synthetic construct
  misc_feature 1..1098: note = source = /note="Description of Artificial Sequence: Synthetic coding sequence"
  source 1..1098: mol_type = other DNA
atgaatggcaccaggaactggtgcaccctggtggatgtgcaccctgaggaccaggccgctgctggcaggaagacctacgccatggtgagcagccacagcgctggccacagcctggccagcgagctggtggagagccatgatggccacgaggagatcatcaaggtgtacctgaagggccgcagcggggacaagatgattcatgagaagaacatcaaccagctgaagtctgaggtgcagtacatccaggaggccaggaactgcctgcagaagctgcgggaggacatcagcagcaagctggacaggaacctgggggacagcctgcaccggcaggagatccaggtggtgctggagaagcccaacggcttcagccagagccccacagccctgtacagcagccccccagaggtggacacctgcatcaatgaagatgtggagagcctgaggaagacagtgcaggacctgctggccaagctgcaggaggccaagaggcagcaccagagcgactgtgtggcctttgaggtgaccctgagccgctaccagcgggaggccgagcagagcaatgtggccctgcagcgggaggaggacagagtggagcagaaggaggccgaggtgggggagctgcagaggcggctgctgggcatggagacagagcaccaggccctgctggccaaggtgcgggagggggaggtggccctggaggagctgcggagcaacaatgctgactgccaggccgagcgggagaaggccgccaccctggagaaggaggtggccggcctgcgggagaagatccaccacctggatgacatgctgaagagccagcagaggaaggtgcggcagatgattgagcagctgcagaacagcaaggctgtgatccagagcaaggatgccaccatccaggagctgaaggagaagatcgcctacctggaggccgagaacctggagatgcatgacaggatggagcacctgattgagaagcagatcagccacggcaacttcagcacccaggcccgggccaagacagaaaatcctggcagcatccgcatcagcaagccacccagccccaagcccatgcctgtgatccgggtggtggagacctag

SEQ ID NO: 3477 - DNA, 1173 bp, synthetic construct
  misc_feature 1..1173: note = source = /note="Description of Artificial Sequence: Synthetic coding sequence"
  source 1..1173: mol_type = other DNA
atgaatggcaccaggaactggtgcaccctggtggatgtgcaccctgaggaccaggccgccggctctgtggacatcctgcggctgaccctgcagggcgagctgactggagatgagctggagcacatcgcccagaaggccggcaggaagacctacgccatggtgagcagccacagcgctggccacagcctggccagcgagctggtggagagccatgatggccacgaggagatcatcaaggtgtacctgaagggccgcagcggggacaagatgatccacgagaagaacatcaaccagctgaagtctgaggtgcagtacatccaggaggccaggaactgcctgcagaagctgcgggaggacatcagcagcaagctggacaggaacctgggggacagcctgcaccggcaggagatccaggtggtgctggagaagcccaacggcttcagccagagccccacagccctgtacagcagccccccagaggtggacacctgcatcaatgaagatgtggagagcctgaggaagacagtgcaggacctgctggccaagctgcaggaggccaagaggcagcaccagagcgactgtgtggcctttgaggtgaccctgagccgctaccagcgggaggccgagcagagcaatgtggccctgcagcgggaggaggacagagtggagcagaaggaggccgaggtgggggagctgcagaggcggctgctgggcatggagacagagcaccaggccctgctggccaaggtgcgggagggggaggtggccctggaggagctgcggagcaacaatgctgactgccaggccgagcgggagaaggccgccaccctggagaaggaggtggccggcctgcgggagaagatccaccacctggatgacatgctgaagagccagcagaggaaggtgcggcagatgattgagcagctgcagaacagcaaggccgtcatccagagcaaggatgccaccatccaggagctgaaggagaagatcgcctacctggaggccgagaacctggagatgcatgacaggatggagcacctgattgagaagcagatcagccacggcaacttcagcacccaggcccgggccaagacagagaaccctggcagcatccgcatcagcaagccacccagccccaagcccatgcctgtgatccgggtggtggagacctag

SEQ ID NO: 3478 - DNA, 600 bp, synthetic construct
  misc_feature 1..600: note = source = /note="Description of Artificial Sequence: Synthetic coding sequence"
  source 1..600: mol_type = other DNA
atgaatggcaccaggaactggtgcaccctggtggatgtgcaccctgaggaccaggccgctgctggcaggaagacctacgccatggtgagcagccacagcgctggccacagcctggccagcgagctggtggagagccatgatggccacgaggagatcatcaaggtgtacctgaagggccgcagcggggacaagatgattcatgagaagaacatcaaccagctgaagtctgaggtgcagtacatccaggaggccaggaactgcctgcagaagctgcgggaggacatcagcagcaagctggacaggaacctgggggacagcctgcaccggcaggagatccaggtggtgctggagaagcccaacggcttcagccagagccccacagccctgtacagcagccccccagaggtggacacctgcatcaatgaagatgtggagagcctgaggaagacagtgcaggacctgctggccaagctgcaggaggccaagaggcagcaccagagcgactgtgtggcctttgaggtgaccctgagccgctaccagcgggaggccgagcagagcaatgtggccctgcagcgggaggaggaccgctgcccagagtag

SEQ ID NO: 3479 - DNA, 1230 bp, synthetic construct
  misc_feature 1..1230: note = source = /note="Description of Artificial Sequence: Synthetic coding sequence"
  source 1..1230: mol_type = other DNA
atgagcagccctggcatgaccagcctgcagctggagaaggaggagtgcatgcagtgtgtgccctgcagccccaggaccagggtggccctgctggagctgtaccgggccatgtgccagggctctgtggacatcctgcggctgaccctgcagggcgagctgactggagatgagctggagcacatcgcccagaaggccggcaggaagacctacgccatggtgagcagccacagcgctggccacagcctggccagcgagctggtggagagccatgatggccacgaggagatcatcaaggtgtacctgaagggccgcagcggggacaagatgattcatgagaagaacatcaaccagctgaagtctgaggtgcagtacatccaggaggccaggaactgcctgcagaagctgcgggaggacatcagcagcaagctggacaggaacctgggggacagcctgcaccggcaggagatccaggtggtgctggagaagcccaacggcttcagccagagccccacagccctgtacagcagccccccagaggtggacacctgcatcaatgaagatgtggagagcctgaggaagacagtgcaggacctgctggccaagctgcaggaggccaagaggcagcaccagagcgactgtgtggcctttgaggtgaccctgagccgctaccagcgggaggccgagcagagcaatgtggccctgcagcgggaggaggacagagtggagcagaaggaggccgaggtgggggagctgcagaggcggctgctgggcatggagacagagcaccaggccctgctggccaaggtgcgggagggggaggtggccctggaggagctgcggagcaacaatgctgactgccaggccgagcgggagaaggccgccaccctggagaaggaggtggccggcctgcgggagaagatccaccacctggatgacatgctgaagagccagcagaggaaggtgcggcagatgattgagcagctgcagaacagcaaggctgtgatccagagcaaggatgccaccatccaggagctgaaggagaagatcgcctacctggaggccgagaacctggagatgcatgacaggatggagcacctgattgagaagcagatcagccacggcaacttcagcacccaggcccgggccaagacagaaaatcctggcagcatccgcatcagcaagccacccagccccaagcccatgcctgtgatccgggtggtggagacctag

SEQ ID NO: 3480 - DNA, 543 bp, synthetic construct
  misc_feature 1..543: note = source = /note="Description of Artificial Sequence: Synthetic coding sequence"
  source 1..543: mol_type = other DNA
atgaatggcaccaggaactggtgcaccctggtggatgtgcaccctgaggaccaggccgctgctggcaggaagacctacgccatggtgagcagccacagcgctggccacagcctggccagcgagctggtggagagccatgatggccacgaggagatcatcaaggtgtacctgaagggccgcagcggggacaagatgattcatgagaagaacatcaaccagctgaagtctgaggtgcagtacatccaggaggccaggaactgcctgcagaagctgcgggaggacatcagcagcaagctggacaggaacctgggggacagcctgcaccggcaggagatccaggtggtgctggagaagcccaacggcttcagccagagccccacagccctgaaggccggggacacagatgtgcagagcgactggaggatgtcctggggcaatgaggtgcccagcaccaacacagcccagttcctggccaccaactgcctcttcttctacctgctgcacctgcagcccaccctgccctggcccccagctgacagatag

SEQ ID NO: 3481 - DNA, 1182 bp, synthetic construct
  misc_feature 1..1182: note = source = /note="Description of Artificial Sequence: Synthetic coding sequence"
  source 1..1182: mol_type = other DNA
atggaggagccccagagcgaccccagcgtggagccccccctgagccaggagaccttcagtgacctgtggaagctgctgcctgagaacaacgtgctgagccccctgcccagccaggccatggatgacctgatgctgagcccagatgacatcgagcagtggttcacagaggaccccggcccagatgaggcccccaggatgcctgaggccgcccctcctgtggccccagccccagctgcccccaccccagctgccccagccccagcccccagctggcccctgagcagctctgtgcccagccagaagacctaccagggcagctatggcttccggctgggcttcctgcacagcggcacagccaagtctgtgacctgcacctacagccctgccctgaacaagatgttctgccagctggccaagacctgccctgtgcagctgtgggtggacagcaccccacctcctggcaccagggtgcgggccatggccatctacaagcagagccagcacatgacagaggtggtgcggcgctgcccccaccacgagcgctgcagcgacagtgatggcctggccccaccccagcacctgatccgggtggagggcaacctgcgggtggagtacctggatgacaggaacaccttccgccacagcgtggtggtgccctatgagcccccagaggtgggcagtgactgcaccaccatccactacaactacatgtgcaacagcagctgcatgggcggcatgaacagaagacccatcctgaccatcatcaccctggaggacagcagcggcaacctgctgggcagaaattcctttgaggtgcgggtgtgtgcctgccccggccgggacagaagaacagaggaggagaacctgaggaagaagggggagccccaccacgagctgcccccaggcagcaccaagagggccctgcccaacaacaccagcagcagcccccagcccaagaagaagcccctggatggagagtacttcaccctgcagatccggggccgggagagatttgagatgttccgggagctgaatgaggccctggagctgaaggatgcccaggccggcaaggagcccggcggcagccgggcccacagcagccacctgaagagcaagaagggccagagcaccagccgccacaagaagctgatgttcaagacagagggccctgacagcgactag

SEQ ID NO: 3482 - DNA, 1032 bp, synthetic construct
  misc_feature 1..1032: note = source = /note="Description of Artificial Sequence: Synthetic coding sequence"
  source 1..1032: mol_type = other DNA
atggaggagccccagagcgaccccagcgtggagccccccctgagccaggagaccttcagtgacctgtggaagctgctgcctgagaacaacgtgctgagccccctgcccagccaggccatggatgacctgatgctgagcccagatgacatcgagcagtggttcacagaggaccccggcccagatgaggcccccaggatgcctgaggccgcccctcctgtggccccagccccagctgcccccaccccagctgccccagccccagcccccagctggcccctgagcagctctgtgcccagccagaagacctaccagggcagctatggcttccggctgggcttcctgcacagcggcacagccaagtctgtgacctgcacctacagccctgccctgaacaagatgttctgccagctggccaagacctgccctgtgcagctgtgggtggacagcaccccacctcctggcaccagggtgcgggccatggccatctacaagcagagccagcacatgacagaggtggtgcggcgctgcccccaccacgagcgctgcagcgacagtgatggcctggccccaccccagcacctgatccgggtggagggcaacctgcgggtggagtacctggatgacaggaacaccttccgccacagcgtggtggtgccctatgagcccccagaggtgggcagtgactgcaccaccatccactacaactacatgtgcaacagcagctgcatgggcggcatgaacagaagacccatcctgaccatcatcaccctggaggacagcagcggcaacctgctgggcagaaattcctttgaggtgcgggtgtgtgcctgccccggccgggacagaagaacagaggaggagaacctgaggaagaagggggagccccaccacgagctgcccccaggcagcaccaagagggccctgcccaacaacaccagcagcagcccccagcccaagaagaagcccctggatggagagtacttcaccctgcagaagaccttccctgcccggcacggcggcagccacctgtag

SEQ ID NO: 3483 - DNA, 1149 bp, synthetic construct
  misc_feature 1..1149: note = source = /note="Description of Artificial Sequence: Synthetic coding sequence"
  source 1..1149: mol_type = other DNA
atggaggagccccagagcgaccccagcgtggagccccccctgagccaggagaccttcagtgacctgtggaagctgctgcctgagaacaacgtgctgagccccctgcccagccaggccatggatgacctgatgctgagcccagatgacatcgagcagtggttcacagaggaccccggcccagatgaggcccccaggatgcctgaggccgcccctcctgtggccccagccccagctgcccccaccccagctgccccagccccagcccccagctggcccctgagcagctctgtgcccagccagaagacctaccagggcagctatggcttccggctgacctgcacctacagccctgccctgaacaagatgttctgccagctggccaagacctgccctgtgcagctgtgggtggacagcaccccacctcctggcaccagggtgcgggccatggccatctacaagcagagccagcacatgacagaggtggtgcggcgctgcccccaccacgagcgctgcagcgacagtgatggcctggccccaccccagcacctgatccgggtggagggcaacctgcgggtggagtacctggatgacaggaacaccttccgccacagcgtggtggtgccctatgagcccccagaggtgggcagtgactgcaccaccatccactacaactacatgtgcaacagcagctgcatgggcggcatgaacagaagacccatcctgaccatcatcaccctggaggacagcagcggcaacctgctgggcaggaacagctttgaggtgcgggtgtgtgcctgccccggccgggacagaagaacagaggaggagaacctgaggaagaagggggagccccaccacgagctgcccccaggcagcaccaagagggccctgcccaacaacaccagcagcagcccccagcccaagaagaagcccctggatggagagtacttcaccctgcagatccggggccgggagagatttgagatgttccgggagctgaatgaggccctggagctgaaggatgcccaggccggcaaggagcccggcggcagccgggcccacagcagccacctgaagagcaagaagggccagagcaccagccgccacaagaagctgatgttcaagacagagggccctgacagcgactag

SEQ ID NO: 3484 - DNA, 858 bp, synthetic construct
  misc_feature 1..858: note = source = /note="Description of Artificial Sequence: Synthetic coding sequence"
  source 1..858: mol_type = other DNA
atggaggagccccagagcgaccccagcgtggagccccccctgagccaggagaccttcagtgacctgtggaagctgctgcctgagaacaacgtgctgagccccctgcccagccaggccatggatgacctgatgctgagcccagatgacatcgagcagtggttcacagaggaccccggcccagatgaggcccccaggatgcctgaggccgcccctcctgtggccccagccccagctgcccccaccccagctgccccagccccagcccccagctggcccctgagcagctctgtgcccagccagaagacctaccagggcagctatggcttccggctgggcttcctgcacagcggcacagccaagtctgtgacctgcacctacagccctgccctgaacaagatgttctgccagctggccaagacctgccctgtgcagctgtgggtggacagcaccccacctcctggcaccagggtgcgggccatggccatctacaagcagagccagcacatgacagaggtggtgcggcgctgcccccaccacgagcgctgcagcgacagtgatggcctggccccaccccagcacctgatccgggtggagggcaacctgcgggtggagtacctggatgacaggaacaccttccgccacagcgtggtggtgccctatgagcccccagaggtgggcagtgactgcaccaccatccactacaactacatgtgcaacagcagctgcatgggcggcatgaacagaagacccatcctgaccatcatcaccctggaggacagccggccccggcaggtggaccacctgcggtctggagtgcaggacagcctggccaacatcgccaagagccacctgtactag

SEQ ID NO: 3485 - DNA, 273 bp, synthetic construct
  misc_feature 1..273: note = source = /note="Description of Artificial Sequence: Synthetic coding sequence"
  source 1..273: mol_type = other DNA
atgttctgccagctggccaagacctgccctgtgcagctgtgggtggacagcaccccacctcctggcaccagggtgcgggccatggccatctacaagcagagccagcacatgacagaggtggtgcggcgctgcccccaccacgagcgctgcagcgacagtgatggcctggccccaccccagcacctgatccgggtggagggcaacctgcgggtggagtacctggatgacaggaacaccttccgccacagcgtggtgtctggccggcggggctag

SEQ ID NO: 3486 - DNA, 135 bp, synthetic construct
  misc_feature 1..135: note = source = /note="Description of Artificial Sequence: Synthetic coding sequence"
  source 1..135: mol_type = other DNA
cccctgcccagccagaggaggaaccactggatggagaacatcagccccttcagccacctgaagagcaagaagggccagagcaccagccgccacaagaagctgatgttcaagacagagggccctgacagcgactag

SEQ ID NO: 3487 - DNA, 1026 bp, synthetic construct
  misc_feature 1..1026: note = source = /note="Description of Artificial Sequence: Synthetic coding sequence"
  source 1..1026: mol_type = other DNA
atggaggagccccagagcgaccccagcgtggagccccccctgagccaggagaccttcagtgacctgtggaagctgctgcctgagaacaacgtgctgagccccctgcccagccaggccatggatgacctgatgctgagcccagatgacatcgagcagtggttcacagaggaccccggcccagatgaggcccccaggatgcctgaggccgcccctcctgtggccccagccccagctgcccccaccccagctgccccagccccagcccccagctggcccctgagcagctctgtgcccagccagaagacctaccagggcagctatggcttccggctgggcttcctgcacagcggcacagccaagtctgtgacctgcacctacagccctgccctgaacaagatgttctgccagctggccaagacctgccctgtgcagctgtgggtggacagcaccccacctcctggcaccagggtgcgggccatggccatctacaagcagagccagcacatgacagaggtggtgcggcgctgcccccaccacgagcgctgcagcgacagtgatggcctggccccaccccagcacctgatccgggtggagggcaacctgcgggtggagtacctggatgacaggaacaccttccgccacagcgtggtggtgccctatgagcccccagaggtgggcagtgactgcaccaccatccactacaactacatgtgcaacagcagctgcatgggcggcatgaacagaagacccatcctgaccatcatcaccctggaggacagcagcggcaacctgctgggcagaaattcctttgaggtgcgggtgtgtgcctgccccggccgggacagaagaacagaggaggagaacctgaggaagaagggggagccccaccacgagctgcccccaggcagcaccaagagggccctgcccaacaacaccagcagcagcccccagcccaagaagaagcccctggatggagagtacttcaccctgcaggaccagaccagcttccagaaggagaactgctag

SEQ ID NO: 3488 - DNA, 1182 bp, synthetic construct; identical to SEQ ID NO: 3481
  misc_feature 1..1182: note = source = /note="Description of Artificial Sequence: Synthetic coding sequence"
  source 1..1182: mol_type = other DNA

SEQ ID NO: 3489 - DNA, 1041 bp, synthetic construct
  misc_feature 1..1041: note = source = /note="Description of Artificial Sequence: Synthetic coding sequence"
  source 1..1041: mol_type = other DNA
atggaggagccccagagcgaccccagcgtggagccccccctgagccaggagaccttcagtgacctgtggaagctgctgcctgagaacaacgtgctgagccccctgcccagccaggccatggatgacctgatgctgagcccagatgacatcgagcagtggttcacagaggaccccggcccagatgaggcccccaggatgcctgaggccgcccctcctgtggccccagccccagctgcccccaccccagctgccccagccccagcccccagctggcccctgagcagctctgtgcccagccagaagacctaccagggcagctatggcttccggctgggcttcctgcacagcggcacagccaagtctgtgacctgcacctacagccctgccctgaacaagatgttctgccagctggccaagacctgccctgtgcagctgtgggtggacagcaccccacctcctggcaccagggtgcgggccatggccatctacaagcagagccagcacatgacagaggtggtgcggcgctgcccccaccacgagcgctgcagcgacagtgatggcctggccccaccccagcacctgatccgggtggagggcaacctgcgggtggagtacctggatgacaggaacaccttccgccacagcgtggtggtgccctatgagcccccagaggtgggcagtgactgcaccaccatccactacaactacatgtgcaacagcagctgcatgggcggcatgaacagaagacccatcctgaccatcatcaccctggaggacagcagcggcaacctgctgggcagaaattcctttgaggtgcgggtgtgtgcctgccccggccgggacagaagaacagaggaggagaacctgaggaagaagggggagccccaccacgagctgcccccaggcagcaccaagagggccctgcccaacaacaccagcagcagcccccagcccaagaagaagcccctggatggagagtacttcaccctgcagatgctgctggacctgcgctggtgctacttcctgatcaacagcagctag

SEQ ID NO: 3490 - DNA, 387 bp, synthetic construct
  misc_feature 1..387: note = source = /note="Description of Artificial Sequence: Synthetic coding sequence"
  source 1..387: mol_type = other DNA
atggaggagccccagagcgaccccagcgtggagccccccctgagccaggagaccttcagtgacctgtggaagctgctgcctgagaacaacgtgctgagccccctgcccagccaggccatggatgacctgatgctgagcccagatgacatcgagcagtggttcacagaggaccccggcccagatgaggcccccaggatgcctgaggccgcccctcctgtggccccagccccagctgcccccaccccagctgccccagccccagcccccagctggcccctgagcagctctgtgcccagccagaagacctaccagggcagctatggcttccggctgggcttcctgcacagcggcacagccaagtctgtgacctgcacctacagcccctag

SEQ ID NO: 3491 - DNA, 498 bp, synthetic construct
  misc_feature 1..498: note = source = /note="Description of Artificial Sequence: Synthetic coding sequence"
  source 1..498: mol_type = other DNA
atggaggagccccagagcgaccccagcgtggagccccccctgagccaggagaccttcagtgacctgtggaagctgctgcctgagaacaacgtgctgagccccctgcccagccaggccatggatgacctgatgctgagcccagatgacatcgagcagtggttcacagaggaccccggcccagatgaggcccccaggatgcctgaggccgcccctcctgtggccccagccccagctgcccccaccccagctgccccagccccagcccccagctggcccctgagcagctctgtgcccagccagaagacctaccagggcagctatggcttccggctgggcttcctgcacagcggcacagccaagtctgtgacctgcacctacagccctgccctgaacaagatgttctgccagctggccaagacctgccctgtgcagctgtgggtggacagcaccccacctcctggcaccagggtgcgggccatggccatctacaagcagtag

SEQ ID NO: 3492 - DNA, 600 bp, synthetic construct
  misc_feature 1..600: note = source = /note="Description of Artificial Sequence: Synthetic coding sequence"
  source 1..600: mol_type = other DNA
atgttctgccagctggccaagacctgccctgtgcagctgtgggtggacagcaccccacctcctggcaccagggtgcgggccatggccatctacaagcagagccagcacatgacagaggtggtgcggcgctgcccccaccacgagcgctgcagcgacagtgatggcctggccccaccccagcacctgatccgggtggagggcaacctgcgggtggagtacctggatgacaggaacaccttccgccacagcgtggtggtgccctatgagcccccagaggtgggcagtgactgcaccaccatccactacaactacatgtgcaacagcagctgcatgggcggcatgaacagaagacccatcctgaccatcatcaccctggaggacagcagcggcaacctgctgggcagaaattcctttgaggtgcgggtgtgtgcctgccccggccgggacagaagaacagaggaggagaacctgaggaagaagggggagccccaccacgagctgcccccaggcagcaccaagagggccctgcccaacaacaccagcagcagcccccagcccaagaagaagcccctggatggagagtacttcaccctgcagtag

SEQ ID NO: 3493 - DNA, 468 bp, synthetic construct
  misc_feature 1..468: note = source = /note="Description of Artificial Sequence: Synthetic coding sequence"
  source 1..468: mol_type = other DNA
atggaggagccccagagcgaccccagcgtggagccccccctgagccaggagaccttcagtgacctgtggaagctgctgcctgagaacaacgtgctgtacagccctgccctgaacaagatgttctgccagctggccaagacctgccctgtgcagctgtgggtggacagcaccccacctcctggcaccagggtgcgggccatggccatctacaagcagagccagcacatgacagaggtggtgcggcgctgcccccaccacgagcgctgcagcgacagtgatggcctggccccaccccagcacctgatccgggtggagggcaacctgcgggtggagtacctggatgacaggaacaccttccgccacagcgtggtggtgccctatgagcccccagaggtgggcagtgactgcaccaccatccactacaactacatgtgcaacagcagctgcatgggcggcatgaacagatag

SEQ ID NO: 3494 - DNA, 468 bp, synthetic construct; identical to SEQ ID NO: 3493
  misc_feature 1..468: note = source = /note="Description of Artificial Sequence: Synthetic coding sequence"
  source 1..468: mol_type = other DNA

SEQ ID NO: 3495 - DNA, 1590 bp, synthetic construct
  misc_feature 1..1590: note = source = /note="Description of Artificial Sequence: Synthetic coding sequence"
  source 1..1590: mol_type = other DNA
atgctgctggccgtgctgtactgcctgctgtggagcttccagaccagcgctggccacttcccccgggcctgtgtgagcagcaagaacctgatggagaaggagtgctgccccccctggagcggggacaggagcccctgtggccagctgagcggccggggcagctgccagaacatcctgctgagcaatgcccccctgggcccccagttccccttcaccggggtggatgaccgggagagctggcccagcgtcttctacaacagaacctgccagtgcagcggcaacttcatgggcttcaactgtggcaactgcaagtttggcttctggggccccaactgcacagaaagaaggctgctggtgagaagaaacatctttgacctgagcgcccctgagaaggacaagttctttgcctacctgaccctggccaagcacaccatcagcagtgactatgtgatccccatcggcacctacggccagatgaagaatggcagcacccccatgtttaatgacatcaacatctatgacctgtttgtgtggatgcactactacgtgtccatggatgccctgctgggcggcagcgagatctggagggacatcgactttgcccacgaggccccagccttcctgccctggcacaggctcttcctgctgcgctgggagcaggagatccagaagctgactggagatgagaacttcaccatcccctactgggactggagagatgctgagaagtgtgacatctgcacagatgagtacatgggcggccagcaccccaccaaccccaacctgctgagccctgccagcttcttcagctcctggcagatcgtgtgcagccggctggaggagtacaacagccaccagagcctgtgcaatggcaccccagagggccccctgcggagaaatcctggcaaccacgacaagagcaggaccccccggctgcccagcagcgcagatgtggagttctgcctgagcctgacccagtatgaaagtggctccatggacaaggccgccaacttctccttcaggaacaccctggagggctttgccagccccctgaccggcattgctgatgccagccagagctccatgcacaatgccctgcacatctacatgaatggcaccatgagccaggtgcagggcagcgccaatgaccccatcttcctgctgcaccacgcctttgtggacagcatctttgagcagtggctgcggcggcaccggcccctgcaggaggtgtacccagaggccaatgcccccatcggccacaaccgggagagctacatggtgcccttcatccccctgtacagaaatggagacttcttcatcagcagcaaggacctgggctatgactacagctacctgcaggacagcgaccctgacagcttccaggactacatcaagagctacctggagcaggccagccgcatctggagctggctgctgggcgccgccatggtgggcgctgtgctgacagccctgctggccggcctggtgtccctgctgtgccgccacaagaggaagcagctgcctgaggagaagcagcccctgctgatggagaaggaggactaccacagcctgtaccagagccacctgtag

SEQ ID NO: 3496 - DNA, 1365 bp, synthetic construct
  misc_feature 1..1365: note = source = /note="Description of Artificial Sequence: Synthetic coding sequence"
  source 1..1365: mol_type = other DNA
atggacccctacatgatccagatgagcagcaaaggaaacctgcccagcatcctggatgtgcacgtgaatgtgggcggccgcagctctgtgcctgggaagatgaagggcaggaaggcccgctggagcgtgcggcccagcgacatggccaagaagaccttcaaccccatccgggccatcgtggacaacatgaaggtgaagcccaaccccaacaagaccatgatcagcctgagcatcggggaccccaccgtgtttggaaacctgcccacagatcctgaggtgacccaggccatgaaggatgccctggacagcggcaagtacaacggctacgcccccagcatcggcttcctgagcagccgggaggagatcgccagctactaccactgcccagaggcccccctggaggccaaggatgtgatcctgaccagcggctgcagccaggccatcgacctgtgcctggccgtgctggccaaccctggccagaacatcctggtgcccaggcctggcttcagcctgtacaagaccctggccgagagcatgggcatcgaggtgaagctgtacaacctgctgcctgagaagtcctgggagattgacctgaagcagctggagtacctgattgatgagaagacagcctgcctgattgtgaacaaccccagcaacccctgtggctctgtgttcagcaagaggcacctgcagaagatcctggccgtggccgcccggcagtgtgtgcccatcctggctgatgagatctacggggacatggtgttcagtgactgcaagtatgagcccctggccaccctgagcacagatgtgcccatcctgagctgtggcggcctggccaagcgctggctggtgcccggctggaggctgggctggatcctgattcatgacagaagagacatctttggaaatgagatcagagatggcctggtgaagctgagccagaggatcctgggcccctgcaccatcgtgcagggcgccctgaagagcatcctgtgcaggaccccaggagagttctaccacaacaccctgtccttcctgaagagcaatgctgacctgtgctacggggccctggccgccatccctggcctgcggcctgtgcggcccagcggggccatgtacctgatggtgggcatcgagatggagcacttccctgagtttgaaaatgatgtggagttcacagagcggctggtggccgagcagagcgtgcactgcctgcctgccacctgctttgagtaccccaacttcatccgggtggtgatcaccgtgcctgaggtgatgatgctggaggcctgcagccgcatccaggagttctgtgagcagcactaccactgtgccgagggcagccaggaggagtgtgacaagtag

SEQ ID NO: 3497 - DNA, 1602 bp, synthetic construct
  misc_feature 1..1602: note = source = /note="Description of Artificial Sequence: Synthetic coding sequence"
  source 1..1602: mol_type = other DNA
atggctgtggagagccagggcggccggcccctggtgctgggcctgctgctgtgtgtgctgggccctgtggtgtcccatgctgggaagatcctgctgatccctgtggatggcagccactggctgtccatgctgggcgccatccagcagctgcagcagaggggccatgaaattgtggtgctggccccagatgccagcctgtacatcagagatggagccttctacaccctgaagacctaccctgtgcccttccagcgggaggatgtgaaggagagctttgtgtccctgggccacaacgtgtttgaaaatgacagcttcctgcagagggtcatcaagacctacaagaagatcaagaaggacagcgccatgctgctgagcggctgcagccacctgctgcacaacaaggagctgatggccagcctggccgagagcagctttgatgtgatgctgacagaccccttcctgccctgcagccccatcgtggcccagtacctgagcctgcccaccgtcttcttcctgcacgccctgccctgcagcctggagtttgaggccacccagtgccccaaccccttctcctatgtgccccggcccctgagcagccacagcgaccacatgaccttcctgcagagggtgaagaacatgctgattgccttcagccagaacttcctgtgtgatgtggtgtacagcccctatgccaccctggccagcgagttcctgcagcgggaggtgacagtgcaggacctgctgagcagcgcctctgtgtggctgttcagaagtgactttgtgaaggactacccccggcccatcatgcccaacatggtgtttgtgggcggcatcaactgcctgcaccagaaccccctgagccaggagtttgaggcctacatcaatgccagcggggagcacggcatcgtggtgttcagcctgggctccatggtgtctgagatccctgagaagaaggccatggccatcgcagatgccctgggcaagatcccccagacagtgctgtggagatacacaggcacccggcccagcaacctggccaacaacaccatcctggtgaagtggctgccccagaatgacctgctgggccaccccatgacccgggccttcatcacccatgctggcagccacggcgtgtatgagagcatctgcaatggagtgcccatggtgatgatgcccctgtttggagaccagatggacaatgccaagaggatggagaccaagggagctggggtgaccctgaatgtgctggagatgaccagcgaggacctggagaatgccctgaaggctgtgatcaatgacaagagctacaaggagaacatcatgaggctgagcagcctgcacaaggacaggcctgtggagcccctggacctggccgtgttctgggtggagtttgtgatgaggcacaagggggccccccacctgcggcctgctgcccatgacctgacctggtaccagtaccacagcctggatgtgattggcttcctgctggccgtggtgctgactgtggccttcatcaccttcaagtgctgtgcctacggctacaggaagtgcctgggcaagaagggccgggtgaagaaggcccacaagagcaagacccactag

SEQ ID NO: 3498 - DNA, 1335 bp, synthetic construct
  misc_feature 1..1335: note = source = /note="Description of Artificial Sequence: Synthetic coding sequence"
  source 1..1335: mol_type = other DNA
atggctgtggagagccagggcggccggcccctggtgctgggcctgctgctgtgtgtgctgggccctgtggtgtcccatgctgggaagatcctgctgatccctgtggatggcagccactggctgtccatgctgggcgccatccagcagctgcagcagaggggccatgaaattgtggtgctggccccagatgccagcctgtacatcagagatggagccttctacaccctgaagacctaccctgtgcccttccagcgggaggatgtgaaggagagctttgtgtccctgggccacaacgtgtttgaaaatgacagcttcctgcagagggtcatcaagacctacaagaagatcaagaaggacagcgccatgctgctgagcggctgcagccacctgctgcacaacaaggagctgatggccagcctggccgagagcagctttgatgtgatgctgacagaccccttcctgccctgcagccccatcgtggcccagtacctgagcctgcccaccgtcttcttcctgcacgccctgccctgcagcctggagtttgaggccacccagtgccccaaccccttctcctatgtgccccggcccctgagcagccacagcgaccacatgaccttcctgcagagggtgaagaacatgctgattgccttcagccagaacttcctgtgtgatgtggtgtacagcccctatgccaccctggccagcgagttcctgcagcgggaggtgacagtgcaggacctgctgagcagcgcctctgtgtggctgttcagaagtgactttgtgaaggactacccccggcccatcatgcccaacatggtgtttgtgggcggcatcaactgcctgcaccagaaccccctgagccaggagtttgaggcctacatcaatgccagcggggagcacggcatcgtggtgttcagcctgggctccatggtgtctgagatccctgagaagaaggccatggccatcgcagatgccctgggcaagatcccccagacagtgctgtggagatacacaggcacccggcccagcaacctggccaacaacaccatcctggtgaagtggctgccccagaatgacctgctgggccaccccatgacccgggccttcatcacccatgctggcagccacggcgtgtatgagagcatctgcaatggagtgcccatggtgatgatgcccctgtttggagaccagatggacaatgccaagaggatggagaccaagggagctggggtgaccctgaatgtgctggagatgaccagcgaggacctggagaatgccctgaaggctgtgatcaatgacaagaggaagaagcagcagagcggccggcagatgtag

SEQ ID NO: 3499 - DNA, 1593 bp, synthetic construct
  misc_feature 1..1593: note = source = /note="Description of Artificial Sequence: Synthetic coding sequence"
  source 1..1593: mol_type = other DNA
atggcccgggccggctggaccagccctgtgcccctgtgtgtgtgcctgctgctgacctgtggctttgctgaggccggcaagctgctggtggtgcccatggatggcagccactggttcaccatgcagagcgtggtggagaagctgatcctgcggggccacgaggtggtggtggtgatgcctgaggtgtcctggcagctggagaggagcctgaactgcaccgtgaagacctacagcaccagctacaccctggaggaccagaaccgggagttcatggtgtttgcccacgcccagtggaaggcccaggcccagagcatcttcagcctgctgatgagcagcagcagcggcttcctggacctcttcttcagccactgccgcagcctcttcaatgacaggaagctggtggagtacctgaaggagagcagctttgatgctgtgttcctggacccctttgacacctgtggcctcatcgtggccaagtacttcagcctgcccagcgtggtgttcacccggggcatcttctgccaccacctggaggagggcgcccagtgcccagcccccctgtcctatgtgcccaatgacctgctgggcttcagtgatgccatgaccttcaaggagcgggtgtggaaccacatcgtgcacctggaggaccacctgttctgccagtacctgttcagaaatgccctggagatcgccagcgagatcctgcagacccctgtgacagcctatgacctgtacagccacaccagcatctggctgctgaggacagactttgtgctggactaccccaagcctgtgatgcccaacatgatcttcatcggcggcatcaactgccaccagggcaagcccctgcccatggagtttgaggcctacatcaatgccagcggggagcacggcatcgtggtgttcagcctgggctccatggtgtctgagatccctgagaagaaggccatggccatcgcagatgccctgggcaagatcccccagacagtgctgtggagatacacaggcacccggcccagcaacctggccaacaacaccatcctggtgaagtggctgccccagaatgacctgctgggccaccccatgacccgggccttcatcacccacgccggcagccatggagtgtatgagagcatctgcaatggagtgcccatggtgatgatgcccctgtttggagaccagatggacaatgccaagaggatggagaccaagggggccggcgtgaccctgaatgtgctggagatgaccagcgaggacctggagaatgccctgaaggccgtcatcaatgacaagagctacaaggagaacatcatgaggctgagcagcctgcacaaggacaggcctgtggagcccctggacctggccgtgttctgggtggagtttgtgatgaggcacaagggggccccccacctgcggcctgctgcccatgacctgacctggtaccagtaccacagcctggatgtgattggcttcctgctggccgtggtgctgactgtggccttcatcaccttcaagtgctgtgcctacggctacaggaagtgcctgggcaagaagggccgggtgaagaaggcccacaagagcaagacccactag

SEQ ID NO: 3500 - DNA, 1605 bp, synthetic construct
  misc_feature 1..1605: note = source = /note="Description of Artificial Sequence: Synthetic coding sequence"
  source 1..1605: mol_type = other DNA
atggccaccggcctgcaggtgcccctgccctggctggccaccggcctgctgctgctgctgtctgtgcagccctgggccgagagcggcaaggtgctggtggtgcccattgatggcagccactggctgtccatgagggaggtgctgcgggagctgcacgcccggggccaccaggccgtggtgctgaccccagaggtgaacatgcacatcaaggaggagaacttcttcaccctgaccacctacgccatctcctggacccaggatgaatttgacagacatgtgctgggccacacccagctgtactttgaaacagagcacttcctgaagaagttcttccgctccatggccatgctgaacaacatgagcctggtgtaccacaggagctgtgtggagctgctgcacaatgaggccctgatccgccacctgaatgccaccagctttgatgtggtgctgacagatcctgtgaacctgtgtgccgctgtgctggccaagtacctgagcatccccaccgtcttcttcctgaggaacatcccctgtgacctggacttcaagggcacccagtgccccaaccccagcagctacatcccccggctgctgaccaccaacagcgaccacatgaccttcatgcagagggtgaagaacatgctgtaccccctggccctgagctacatctgccacgccttcagcgccccctatgccagcctggccagcgagctgttccagcgggaggtgtctgtggtggacatcctgagccacgcctctgtgtggctgttccggggggactttgtgatggactacccccggcccatcatgcccaacatggtgttcatcggcggcatcaactgtgccaacaggaagcccctgagccaggagtttgaggcctacatcaatgccagcggggagcacggcatcgtggtgttcagcctgggctccatggtgtctgagatccctgagaagaaggccatggccatcgcagatgccctgggcaagatcccccagacagtgctgtggagatacacaggcacccggcccagcaacctggccaacaacaccatcctggtgaagtggctgccccagaatgacctgctgggccaccccatgacccgggccttcatcacccacgccggcagccatggagtgtatgagagcatctgcaatggagtgcccatggtgatgatgcccctgtttggagaccagatggacaatgccaagaggatggagaccaagggggccggcgtgaccctgaatgtgctggagatgaccagcgaggacctggagaatgccctgaaggccgtcatcaatgacaagagctacaaggagaacatcatgaggctgagcagcctgcacaaggacaggcctgtggagcccctggacctggccgtgttctgggtggagtttgtgatgaggcacaagggggccccccacctgcggcctgctgcccatgacctgacctggtaccagtaccacagcctggatgtgattggcttcctgctggccgtggtgctgactgtggccttcatcaccttcaagtgctgtgcctacggctacaggaagtgcctgggcaagaagggccgggtgaagaaggcccacaagagcaagacccactag

SEQ ID NO: 3501 - DNA, 1470 bp, synthetic construct
  misc_feature 1..1470: note = source = /note="Description of Artificial Sequence: Synthetic coding sequence"
  source 1..1470: mol_type = other DNA
atggccggccagagggtgctgctgctggtgggcttcctgctgcccggggtgctgctgtctgaggccgccaagatcctgaccatcagcacagtggacttcaagaaggaggagaagagctaccaggtgatctcctggctggcccctgaggaccaccagcgggagttcaagaagagctttgacttcttcctggaggagaccctgggcggccggggcaagtttgagaacctgctgaatgtgctggagtacctggccctgcagtgcagccacttcctgaacaggaaggacatcatggacagcctgaagaatgaaaattttgacatggtgattgtggagacctttgactactgccccttcctgattgctgagaagctgggcaagccctttgtggccatcctgagcaccagctttggcagcctggagtttggcctgcccatccccctgtcctatgtgcctgtgttccgcagcctgctgacagaccacatggacttctggggccgggtgaagaacttcctgatgttcttctccttctgccggcggcagcagcacatgcagagcacctttgacaacaccatcaaggagcacttcacagagggcagcaggcctgtgctgagccacctgctgctgaaggccgagctgtggttcatcaacagcgactttgcctttgattttgcccggcccctgctgcccaacacagtgtatgtgggcggcctgatggagaagcccatcaagcctgtgccccaggacctggagaacttcatcgccaagtttggagacagcggctttgtgctggtgaccctgggctccatggtgaacacctgccagaaccctgagatcttcaaggagatgaacaatgcctttgcccacctgccccagggcgtcatctggaagtgccagtgcagccactggcccaaggatgtgcacctggccgccaacgtgaagatcgtggactggctgccccagagcgacctgctggcccaccccagcatccggctgtttgtgacccatggaggccagaacagcatcatggaggccatccagcacggcgtgcccatggtgggcatccccctgtttggagaccagcctgagaacatggtgcgggtggaggccaagaagtttggagtgtccatccagctgaagaagctgaaggccgagaccctggccctgaagatgaagcagatcatggaggacaagcgctacaagtctgctgctgtggccgccagcgtcatcctgcggagccaccccctgagccccacccagaggctggtgggctggattgaccacgtgctgcagacaggaggagccacccacctgaagccctacgtgttccagcagccctggcatgagcagtacctgctggatgtgtttgtgttcctgctgggcctgaccctgggcaccctgtggctgtgtgggaagctgctgggcatggctgtgtggtggctgcggggggccaggaaggtgaaggagacctag

SEQ ID NO: 3502 - DNA, 1572 bp, synthetic construct
  misc_feature 1..1572: note = source = /note="Description of Artificial Sequence: Synthetic coding sequence"
  source 1..1572: mol_type = other DNA
atggccggccagagggtgctgctgctggtgggcttcctgctgcccggggtgctgctgtctgaggccgccaagatcctgaccatcagcacagtgggcggcagccactacctgctgatggacagagtgtcccagatcctgcaggaccacggccacaacgtgaccatgctgaaccacaagaggggccccttcatgccagacttcaagaaggaggagaagagctaccaggtgatctcctggctggcccctgaggaccaccagcgggagttcaagaagagctttgacttcttcctggaggagaccctgggcggccggggcaagtttgagaacctgctgaatgtgctggagtacctggccctgcagtgcagccacttcctgaacaggaaggacatcatggacagcctgaagaatgaaaattttgacatggtgattgtggagacctttgactactgccccttcctgattgctgagaagctgggcaagccctttgtggccatcctgagcaccagctttggcagcctggagtttggcctgcccatccccctgtcctatgtgcctgtgttccgcagcctgctgacagaccacatggacttctggggccgggtgaagaacttcctgatgttcttctccttctgccggcggcagcagcacatgcagagcacctttgacaacaccatcaaggagcacttcacagagggcagcaggcctgtgctgagccacctgctgctgaaggccgagctgtggttcatcaacagcgactttgcctttgattttgcccggcccctgctgcccaacacagtgtatgtgggcggcctgatggagaagcccatcaagcctgtgccccaggacctggagaacttcatcgccaagtttggagacagcggctttgtgctggtgaccctgggctccatggtgaacacctgccagaaccctgagatcttcaaggagatgaacaatgcctttgcccacctgccccagggcgtcatctggaagtgccagtgcagccactggcccaaggatgtgcacctggccgccaacgtgaagatcgtggactggctgccccagagcgacctgctggcccaccccagcatccggctgtttgtgacccatggaggccagaacagcatcatggaggccatccagcacggcgtgcccatggtgggcatccccctgtttggagaccagcctgagaacatggtgcgggtggaggccaagaagtttggagtgtccatccagctgaagaagctgaaggccgagaccctggccctgaagatgaagcagatcatggaggacaagcgctacaagtctgctgctgtggccgccagcgtcatcctgcggagccaccccctgagccccacccagaggctggtgggctggattgaccacgtgctgcagacaggaggagccacccacctgaagccctacgtgttccagcagccctggcatgagcagtacctgctggatgtgtttgtgttcctgctgggcctgaccctgggcaccctgtggctgtgtgggaagctgctgggcatggctgtgtggtggctgcggggggccaggaaggtgaaggagacctag

SEQ ID NO: 3503 - DNA, 417 bp, synthetic construct
  misc_feature 1..417: note = source = /note="Description of Artificial Sequence: Synthetic coding sequence"
  source 1..417: mol_type = other DNA
atggccggccagagggtgctgctgctggtgggcttcctgctgcccggggtgctgctgtctgaggccgccaagatcctgaccatcagcacagtgggcggcagccactacctgctgatggacagagtgtcccagatcctgcaggaccacggccacaacgtgaccatgctgaaccacaagaggggccccttcatgccagacttcaagaaggaggagaagagctaccaggtgatctcctggctggcccctgaggaccaccagcgggagttcaagaagagctttgacttcttcctggaggagaccctgggcggccggggcaagtttgagaacctgctgaatgtgctggagtacctggccctgcagtgcagccacttcctgaacaggaaggacatcatggacagcctgaagaatgaaaattag

SEQ ID NO: 3504 - DNA, 666 bp, synthetic construct
  misc_feature 1..666: note = source = /note="Description of Artificial Sequence: Synthetic coding sequence"
  source 1..666: mol_type = other DNA
atggtgaacacctgccagaaccctgagatcttcaaggagatgaacaatgcctttgcccacctgccccagggcgtcatctggaagtgccagtgcagccactggcccaaggatgtgcacctggccgccaacgtgaagatcgtggactggctgccccagagcgacctgctggcccaccccagcatccggctgtttgtgacccatggaggccagaacagcatcatggaggccatccagcacggcgtgcccatggtgggcatccccctgtttggagaccagcctgagaacatggtgcgggtggaggccaagaagtttggagtgtccatccagctgaagaagctgaaggccgagaccctggccctgaagatgaagcagatcatggaggacaagcgctacaagtctgctgctgtggccgccagcgtcatcctgcggagccaccccctgagccccacccagaggctggtgggctggattgaccacgtgctgcagacaggaggagccacccacctgaagccctacgtgttccagcagccctggcatgagcagtacctgctggatgtgtttgtgttcctgctgggcctgaccctgggcaccctgtggctgtgtgggaagctgctgggcatggctgtgtggtggctgcggggggccaggaaggtgaaggagacctag

SEQ ID NO: 3505 - DNA, 1086 bp, synthetic construct
  misc_feature 1..1086: note = source = /note="Description of Artificial Sequence: Synthetic coding sequence"
  source 1..1086: mol_type = other DNA
atggccatgaactacaatgccaaggatgaggtggatggcggccccccctgtgcccctgggggcacagccaagacccggcggccagacaacacagccttcaagcagcagaggctgcctgcctggcagcccatcctgacagctggcaccgtgctgcccatcttcttcatcatcggcctcatcttcatccccatcggcatcggcatctttgtgaccagcaacaacatccgggagattgaaattgactacacaggaacagagcccagcagcccctgcaacaagtgcctgagcccagatgtgaccccctgcttctgcaccatcaacttcaccctggagaagagctttgagggcaatgtgttcatgtactacggcctgagcaacttctaccagaaccaccggcgctacgtgaagagcagagatgacagccagctgaatggagacagcagcgccctgctgaaccccagcaaagaatgtgagccctacagaagaaatgaagacaagcccatcgccccctgtggggccatcgccaacagcatgtttaatgacaccctggagctgttcctgattggaaatgacagctaccccatccccatcgccctgaagaagaagggcatcgcctggtggacagacaagaatgtgaagttcagaaatcctcctggaggagacaacctggaggagcgcttcaagggcaccaccaagcctgtgaactggctgaagcctgtgtacatgctggacagcgaccctgacaacaacggcttcatcaatgaagacttcatcgtgtggatgaggacagctgccctgcccaccttcaggaagctgtaccgcctcatcgagaggaagagtgacctgcaccccaccctgcctgctggccgctacagcctgaatgtgacctacaactaccctgtgcactactttgatggcaggaagaggatgatcctgagcaccatctcctggatgggcggcaagaaccccttcctgggcatcgcctacatcgctgtgggcagcatctccttcctgctgggcgtggtgctgctggtgatcaaccacaagtacagaaacagcagcaacacagctgacatcaccatctag

SEQ ID NO: 3506 - DNA, 954 bp, synthetic construct
  misc_feature 1..954: note = source = /note="Description of Artificial Sequence: Synthetic coding sequence"
  source 1..954: mol_type = other DNA
ctgacagaccggcagacagacacagcccccagccccagctaccacctgctgcccggcagaagaagaacagtggatgctgctgccagccggggccagggccctgagcccgcccctgggggcggcgtggagggcgtgggcgcccggggcgtggccctgaagctgtttgtgcagctgctgggctgcagcagatttggaggagctgtggtgcgggccggggaggccgagcccagcggggccgcccggagcgccagcagcggccgggaggagccccagcctgaggagggggaggaggaggaggagaaggaggaggagcggggcccccagtggaggctgggcgccaggaagccaggctcctggacaggagaggccgctgtgtgtgccgacagcgccccagctgcccgggccccccaggccctggcccgggccagcggccggggcggccgggtggccaggagaggagctgaggagagcggccccccccacagccccagcagaagaggcagcgccagccgggccggccctggccgggccagcgagaccatgaacttcctgctgtcctgggtgcactggagcctggccctgctgctgtacctgcaccacgccaagtggagccaggccgcccccatggccgagggcggcggccagaaccaccacgaggtggtgaagttcatggatgtgtaccagaggagctactgccaccccatcgagaccctggtggacatcttccaggagtacccagatgaaattgagtacatcttcaagcccagctgtgtgcccctgatgagatgtggcggctgctgcaatgatgagggcctggagtgtgtgcccacagaggagagcaacatcaccatgcagatcatgaggatcaagccccaccagggccagcacatcggggagatgtccttcctgcagcacaacaagtgtgaatgtcgctgtgacaagcccaggaggtag

SEQ ID NO: 3507 - DNA, 1239 bp, synthetic construct
  misc_feature 1..1239: note = source = /note="Description of Artificial Sequence: Synthetic coding sequence"
  source 1..1239: mol_type = other DNA
ctgacagaccggcagacagacacagcccccagccccagctaccacctgctgcccggcagaagaagaacagtggatgctgctgccagccggggccagggccctgagcccgcccctgggggcggcgtggagggcgtgggcgcccggggcgtggccctgaagctgtttgtgcagctgctgggctgcagcagatttggaggagctgtggtgcgggccggggaggccgagcccagcggggccgcccggagcgccagcagcggccgggaggagccccagcctgaggagggggaggaggaggaggagaaggaggaggagcggggcccccagtggaggctgggcgccaggaagccaggctcctggacaggagaggccgctgtgtgtgccgacagcgccccagctgcccgggccccccaggccctggcccgggccagcggccggggcggccgggtggccaggagaggagctgaggagagcggccccccccacagccccagcagaagaggcagcgccagccgggccggccctggccgggccagcgagaccatgaacttcctgctgtcctgggtgcactggagcctggccctgctgctgtacctgcaccacgccaagtggagccaggccgcccccatggccgagggcggcggccagaaccaccacgaggtggtgaagttcatggatgtgtaccagaggagctactgccaccccatcgagaccctggtggacatcttccaggagtacccagatgaaattgagtacatcttcaagcccagctgtgtgcccctgatgagatgtggcggctgctgcaatgatgagggcctggagtgtgtgcccacagaggagagcaacatcaccatgcagatcatgaggatcaagccccaccagggccagcacatcggggagatgtccttcctgcagcacaacaagtgtgaatgtcggcccaagaaggaccgggcccggcaggagaagaagtctgtgcggggcaagggcaagggccagaagaggaagaggaagaagagccgctacaagtcctggagcgtgtatgtgggcgcccgctgctgcctgatgccctggagcctgcccggcccccacccctgtggcccctgcagcgagaggaggaagcacctgtttgtgcaggacccccagacctgcaagtgcagctgcaagaacacagacagccgctgcaaggcccggcagctggagctgaatgaaagaacctgccgctgtgacaagcccaggaggtag

SEQ ID NO: 3508 - DNA, 984 bp, synthetic construct
  misc_feature 1..984: note = source = /note="Description of Artificial Sequence: Synthetic coding sequence"
  source 1..984: mol_type = other DNA
ctgacagaccggcagacagacacagcccccagccccagctaccacctgctgcccggcagaagaagaacagtggatgctgctgccagccggggccagggccctgagcccgcccctgggggcggcgtggagggcgtgggcgcccggggcgtggccctgaagctgtttgtgcagctgctgggctgcagcagatttggaggagctgtggtgcgggccggggaggccgagcccagcggggccgcccggagcgccagcagcggccgggaggagccccagcctgaggagggggaggaggaggaggagaaggaggaggagcggggcccccagtggaggctgggcgccaggaagccaggctcctggacaggagaggccgctgtgtgtgccgacagcgccccagctgcccgggccccccaggccctggcccgggccagcggccggggcggccgggtggccaggagaggagctgaggagagcggccccccccacagccccagcagaagaggcagcgccagccgggccggccctggccgggccagcgagaccatgaacttcctgctgtcctgggtgcactggagcctggccctgctgctgtacctgcaccacgccaagtggagccaggccgcccccatggccgagggcggcggccagaaccaccacgaggtggtgaagttcatggatgtgtaccagaggagctactgccaccccatcgagaccctggtggacatcttccaggagtacccagatgaaattgagtacatcttcaagcccagctgtgtgcccctgatgagatgtggcggctgctgcaatgatgagggcctggagtgtgtgcccacagaggagagcaacatcaccatgcagatcatgaggatcaagccccaccagggccagcacatcggggagatgtccttcctgcagcacaacaagtgtgaatgtcggcccaagaaggaccgggcccggcaggagaagtgtgacaagcccaggaggtag

SEQ ID NO: 3509 - DNA, 1116 bp, synthetic construct
  misc_feature 1..1116: note = source = /note="Description of Artificial Sequence: Synthetic coding sequence"
  source 1..1116: mol_type = other DNA
ctgacagaccggcagacagacacagcccccagccccagctaccacctgctgcccggcagaagaagaacagtggatgctgctgccagccggggccagggccctgagcccgcccctgggggcggcgtggagggcgtgggcgcccggggcgtggccctgaagctgtttgtgcagctgctgggctgcagcagatttggaggagctgtggtgcgggccggggaggccgagcccagcggggccgcccggagcgccagcagcggccgggaggagccccagcctgaggagggggaggaggaggaggagaaggaggaggagcggggcccccagtggaggctgggcgccaggaagccaggctcctggacaggagaggccgctgtgtgtgccgacagcgccccagctgcccgggccccccaggccctggcccgggccagcggccggggcggccgggtggccaggagaggagctgaggagagcggccccccccacagccccagcagaagaggcagcgccagccgggccggccctggccgggccagcgagaccatgaacttcctgctgtcctgggtgcactggagcctggccctgctgctgtacctgcaccacgccaagtggagccaggccgcccccatggccgagggcggcggccagaaccaccacgaggtggtgaagttcatggatgtgtaccagaggagctactgccaccccatcgagaccctggtggacatcttccaggagtacccagatgaaattgagtacatcttcaagcccagctgtgtgcccctgatgagatgtggcggctgctgcaatgatgagggcctggagtgtgtgcccacagaggagagcaacatcaccatgcagatcatgaggatcaagccccaccagggccagcacatcggggagatgtccttcctgcagcacaacaagtgtgaatgtcggcccaagaaggaccgggcccggcaggagaacccctgtggcccctgcagcgagaggaggaagcacctgtttgtgcaggacccccagacctgcaagtgcagctgcaagaacacagacagccgctgcaaggcccggcagctggagctgaatgaaagaacctgccgctgtgacaagcccaggaggtag

SEQ ID NO: 3510 - DNA, 444 bp, synthetic construct
  misc_feature 1..444: note = source = /note="Description of Artificial Sequence: Synthetic coding sequence"
  source 1..444: mol_type = other DNA
atgaacttcctgctgtcctgggtgcactggagcctggccctgctgctgtacctgcaccacgccaagtggagccaggccgcccccatggccgagggcggcggccagaaccaccacgaggtggtgaagttcatggatgtgtaccagaggagctactgccaccccatcgagaccctggtggacatcttccaggagtacccagatgaaattgagtacatcttcaagcccagctgtgtgcccctgatgagatgtggcggctgctgcaatgatgagggcctggagtgtgtgcccacagaggagagcaacatcaccatgcagatcatgaggatcaagccccaccagggccagcacatcggggagatgtccttcctgcagcacaacaagtgtgaatgtcggcccaagaaggaccgggcccggcaggagaagtgtgacaagcccaggaggtag

SEQ ID NO: 3511 - DNA, 1170 bp, synthetic construct
  misc_feature 1..1170: note = source = /note="Description of Artificial Sequence: Synthetic coding sequence"
  source 1..1170: mol_type = other DNA
ctgacagaccggcagacagacacagcccccagccccagctaccacctgctgcccggcagaagaagaacagtggatgctgctgccagccggggccagggccctgagcccgcccctgggggcggcgtggagggcgtgggcgcccggggcgtggccctgaagctgtttgtgcagctgctgggctgcagcagatttggaggagctgtggtgcgggccggggaggccgagcccagcggggccgcccggagcgccagcagcggccgggaggagccccagcctgaggagggggaggaggaggaggagaaggaggaggagcggggcccccagtggaggctgggcgccaggaagccaggctcctggacaggagaggccgctgtgtgtgccgacagcgccccagctgcccgggccccccaggccctggcccgggccagcggccggggcggccgggtggccaggagaggagctgaggagagcggccccccccacagccccagcagaagaggcagcgccagccgggccggccctggccgggccagcgagaccatgaacttcctgctgtcctgggtgcactggagcctggccctgctgctgtacctgcaccacgccaagtggagccaggccgcccccatggccgagggcggcggccagaaccaccacgaggtggtgaagttcatggatgtgtaccagaggagctactgccaccccatcgagaccctggtggacatcttccaggagtacccagatgaaattgagtacatcttcaagcccagctgtgtgcccctgatgagatgtggcggctgctgcaatgatgagggcctggagtgtgtgcccacagaggagagcaacatcaccatgcagatcatgaggatcaagccccaccagggccagcacatcggggagatgtccttcctgcagcacaacaagtgtgaatgtcggcccaagaaggaccgggcccggcaggagaagaagtctgtgcggggcaagggcaagggccagaagaggaagaggaagaagagccggccctgtggcccctgcagcgagaggaggaagcacctgtttgtgcaggacccccagacctgcaagtgcagctgcaagaacacagacagccgctgcaaggcccggcagctggagctgaatgaaagaacctgccgctgtgacaagcccaggaggtag

SEQ ID NO: 3512 - DNA, 1065 bp, synthetic construct
  misc_feature 1..1065: note = source = /note="Description of Artificial Sequence: Synthetic coding sequence"
  source 1..1065: mol_type = other DNA
ctgacagaccggcagacagacacagcccccagccccagctaccacctgctgcccggcagaagaagaacagtggatgctgctgccagccggggccagggccctgagcccgcccctgggggcggcgtggagggcgtgggcgcccggggcgtggccctgaagctgtttgtgcagctgctgggctgcagcagatttggaggagctgtggtgcgggccggggaggccgagcccagcggggccgcccggagcgccagcagcggccgggaggagccccagcctgaggagggggaggaggaggaggagaaggaggaggagcggggcccccagtggaggctgggcgccaggaagccaggctcctggacaggagaggccgctgtgtgtgccgacagcgccccagctgcccgggccccccaggccctggcccgggccagcggccggggcggccgggtggccaggagaggagctgaggagagcggccccccccacagccccagcagaagaggcagcgccagccgggccggccctggccgggccagcgagaccatgaacttcctgctgtcctgggtgcactggagcctggccctgctgctgtacctgcaccacgccaagtggagccaggccgcccccatggccgagggcggcggccagaaccaccacgaggtggtgaagttcatggatgtgtaccagaggagctactgccaccccatcgagaccctggtggacatcttccaggagtacccagatgaaattgagtacatcttcaagcccagctgtgtgcccctgatgagatgtggcggctgctgcaatgatgagggcctggagtgtgtgcccacagaggagagcaacatcaccatgcagatcatgaggatcaagccccaccagggccagcacatcggggagatgtccttcctgcagcacaacaagtgtgaatgtcggcccaagaaggaccgggcccggcaggagaacccctgtggcccctgcagcgagaggaggaagcacctgtttgtgcaggacccccagacctgcaagtgcagctgcaagaacacagacagccgctgcaagatgtag

SEQ ID NO: 3513 - DNA, 1188 bp, synthetic construct
  misc_feature 1..1188: note = source = /note="Description of Artificial Sequence: Synthetic coding sequence"
  source 1..1188: mol_type = other DNA
ctgacagaccggcagacagacacagcccccagccccagctaccacctgctgcccggcagaagaagaacagtggatgctgctgccagccggggccagggccctgagcccgcccctgggggcggcgtggagggcgtgggcgcccggggcgtggccctgaagctgtttgtgcagctgctgggctgcagcagatttggaggagctgtggtgcgggccggggaggccgagcccagcggggccgcccggagcgccagcagcggccgggaggagccccagcctgaggagggggaggaggaggaggagaaggaggaggagcggggcccccagtggaggctgggcgccaggaagccaggctcctggacaggagaggccgctgtgtgtgccgacagcgccccagctgcccgggccccccaggccctggcccgggccagcggccggggcggccgggtggccaggagaggagctgaggagagcggccccccccacagccccagcagaagaggcagcgccagccgggccggccctggccgggccagcgagaccatgaacttcctgctgtcctgggtgcactggagcctggccctgctgctgtacctgcaccacgccaagtggagccaggccgcccccatggccgagggcggcggccagaaccaccacgaggtggtgaagttcatggatgtgtaccagaggagctactgccaccccatcgagaccctggtggacatcttccaggagtacccagatgaaattgagtacatcttcaagcccagctgtgtgcccctgatgagatgtggcggctgctgcaatgatgagggcctggagtgtgtgcccacagaggagagcaacatcaccatgcagatcatgaggatcaagccccaccagggccagcacatcggggagatgtccttcctgcagcacaacaagtgtgaatgtcggcccaagaaggaccgggcccggcaggagaagaagtctgtgcggggcaagggcaagggccagaagaggaagaggaagaagagccgctacaagtcctggagcgtgccctgtggcccctgcagcgagaggaggaagcacctgtttgtgcaggacccccagacctgcaagtgcagctgcaagaacacagacagccgctgcaaggcccggcagctggagctgaatgaaagaacctgccgctgtgacaagcccaggaggtag

SEQ ID NO: 3514 - DNA, 414 bp, synthetic construct
  misc_feature 1..414: note = source = /note="Description of Artificial Sequence: Synthetic coding sequence"
  source 1..414: mol_type = other DNA
atgaacttcctgctgtcctgggtgcactggagcctggccctgctgctgtacctgcaccacgccaagtggagccaggccgcccccatggccgagggcggcggccagaaccaccacgaggtggtgaagttcatggatgtgtaccagaggagctactgccaccccatcgagaccctggtggacatcttccaggagtacccagatgaaattgagtacatcttcaagcccagctgtgtgcccctgatgagatgtggcggctgctgcaatgatgagggcctggagtgtgtgcccacagaggagagcaacatcaccatgcagatcatgaggatcaagccccaccagggccagcacatcggggagatgtccttcctgcagcacaacaagtgtgaatgtcgctgtgacaagcccaggaggtag

SEQ ID NO: 3515 - DNA, 1116 bp, synthetic construct
  misc_feature 1..1116: note = source = /note="Description of Artificial Sequence: Synthetic coding sequence"
  source 1..1116: mol_type = other DNA
ctgacagaccggcagacagacacagcccccagccccagctaccacctgctgcccggcagaagaagaacagtggatgctgctgccagccggggccagggccctgagcccgcccctgggggcggcgtggagggcgtgggcgcccggggcgtggccctgaagctgtttgtgcagctgctgggctgcagcagatttggaggagctgtggtgcgggccggggaggccgagcccagcggggccgcccggagcgccagcagcggccgggaggagccccagcctgaggagggggaggaggaggaggagaaggaggaggagcggggcccccagtggaggctgggcgccaggaagccaggctcctggacaggagaggccgctgtgtgtgccgacagcgccccagctgcccgggccccccaggccctggcccgggccagcggccggggcggccgggtggccaggagaggagctgaggagagcggccccccccacagccccagcagaagaggcagcgccagccgggccggccctggccgggccagcgagaccatgaacttcctgctgtcctgggtgcactggagcctggccctgctgctgtacctgcaccacgccaagtggagccaggccgcccccatggccgagggcggcggccagaaccaccacgaggtggtgaagttcatggatgtgtaccagaggagctactgccaccccatcgagaccctggtggacatcttccaggagtacccagatgaaattgagtacatcttcaagcccagctgtgtgcccctgatgagatgtggcggctgctgcaatgatgagggcctggagtgtgtgcccacagaggagagcaacatcaccatgcagatcatgaggatcaagccccaccagggccagcacatcggggagatgtccttcctgcagcacaacaagtgtgaatgtcggcccaagaaggaccgggcccggcaggagaacccctgtggcccctgcagcgagaggaggaagcacctgtttgtgcaggacccccagacctgcaagtgcagctgcaagaacacagacagccgctgcaaggcccggcagctggagctgaatgaaagaacctgccgcagcctgaccaggaaggactag

SEQ ID NO: 3516 - DNA, 630 bp, synthetic construct
  misc_feature 1..630: note = source = /note="Description of Artificial Sequence: Synthetic coding sequence"
  source 1..630: mol_type = other DNA
atgaacttcctgctgtcctgggtgcactggagcctggccctgctgctgtacctgcaccacgccaagtggagccaggccgcccccatggccgagggcggcggccagaaccaccacgaggtggtgaagttcatggatgtgtaccagaggagctactgccaccccatcgagaccctggtggacatcttccaggagtacccagatgaaattgagtacatcttcaagcccagctgtgtgcccctgatgagatgtggcggctgctgcaatgatgagggcctggagtgtgtgcccacagaggagagcaacatcaccatgcagatcatgaggatcaagccccaccagggccagcacatcggggagatgtccttcctgcagcacaacaagtgtgaatgtcggcccaagaaggaccgggcccggcaggagaagaagtctgtgcggggcaagggcaagggccagaagaggaagaggaagaagagccggccctgtggcccctgcagcgagaggaggaagcacctgtttgtgcaggacccccagacctgcaagtgcagctgcaagaacacagacagccgctgcaaggcccggcagctggagctgaatgaaagaacctgccgctgtgacaagcccaggaggtag

SEQ ID NO: 3517 - DNA, 576 bp, synthetic construct
  misc_feature 1..576: note = source = /note="Description of Artificial Sequence: Synthetic coding sequence"
  source 1..576: mol_type = other DNA
atgaacttcctgctgtcctgggtgcactggagcctggccctgctgctgtacctgcaccacgccaagtggagccaggccgcccccatggccgagggcggcggccagaaccaccacgaggtggtgaagttcatggatgtgtaccagaggagctactgccaccccatcgagaccctggtggacatcttccaggagtacccagatgaaattgagtacatcttcaagcccagctgtgtgcccctgatgagatgtggcggctgctgcaatgatgagggcctggagtgtgtgcccacagaggagagcaacatcaccatgcagatcatgaggatcaagccccaccagggccagcacatcggggagatgtccttcctgcagcacaacaagtgtgaatgtcggcccaagaaggaccgggcccggcaggagaacccctgtggcccctgcagcgagaggaggaagcacctgtttgtgcaggacccccagacctgcaagtgcagctgcaagaacacagacagccgctgcaaggcccggcagctggagctgaatgaaagaacctgccgcagcctgaccaggaaggactag

SEQ ID NO: 3518 - DNA, 972 bp, synthetic construct
  misc_feature 1..972: note = source = /note="Description of Artificial Sequence: Synthetic coding sequence"
  source 1..972: mol_type = other DNA
tgaagaggccagggccctgagcccgcccctgggggcggcgtggagggcgtgggcgcccggggcgtggccctgaagctgtttgtgcagctgctgggctgcagcagatttggaggagctgtggtgcgggccggggaggccgagcccagcggggccgcccggagcgccagcagcggccgggaggagccccagcctgaggagggggaggaggaggaggagaaggaggaggagcggggcccccagtggaggctgggcgccaggaagccaggctcctggacaggagaggccgctgtgtgtgccgacagcgccccagctgcccgggccccccaggccctggcccgggccagcggccggggcggccgggtggccaggagaggagctgaggagagcggccccccccacagccccagcagaagaggcagcgccagccgggccggccctggccgggccagcgagaccatgaacttcctgctgtcctgggtgcactggagcctggccctgctgctgtacctgcaccacgccaagtggagccaggccgcccccatggccgagggcggcggccagaaccaccacgaggtggtgaagttcatggatgtgtaccagaggagctactgccaccccatcgagaccctggtggacatcttccaggagtacccagatgaaattgagtacatcttcaagcccagctgtgtgcccctgatgagatgtggcggctgctgcaatgatgagggcctggagtgtgtgcccacagaggagagcaacatcaccatgcagatcatgaggatcaagccccaccagggccagcacatcggggagatgtccttcctgcagcacaacaagtgtgaatgtcggcccaagaaggaccgggcccggcaggagaagaagtctgtgcggggcaagggcaagggccagaagaggaagaggaagaagagccgctacaagtcctggagcgtgtgtgacaagcccaggaggtag

SEQ ID NO: 3519 - DNA, 648 bp, synthetic construct
  misc_feature 1..648: note = source = /note="Description of Artificial Sequence: Synthetic coding sequence"
  source 1..648: mol_type = other DNA
atgaacttcctgctgtcctgggtgcactggagcctggccctgctgctgtacctgcaccacgccaagtggagccaggccgcccccatggccgagggcggcggccagaaccaccacgaggtggtgaagttcatggatgtgtaccagaggagctactgccaccccatcgagaccctggtggacatcttccaggagtacccagatgaaattgagtacatcttcaagcccagctgtgtgcccctgatgagatgtggcggctgctgcaatgatgagggcctggagtgtgtgcccacagaggagagcaacatcaccatgcagatcatgaggatcaagccccaccagggccagcacatcggggagatgtccttcctgcagcacaacaagtgtgaatgtcggcccaagaaggaccgggcccggcaggagaagaagtctgtgcggggcaagggcaagggccagaagaggaagaggaagaagagccgctacaagtcctggagcgtgccctgtggcccctgcagcgagaggaggaagcacctgtttgtgcaggacccccagacctgcaagtgcagctgcaagaacacagacagccgctgcaaggcccggcagctggagctgaatgaaagaacctgccgctgtgacaagcccaggaggtag

SEQ ID NO: 3520 - DNA, 525 bp, synthetic construct
  misc_feature 1..525: note = source = /note="Description of Artificial Sequence: Synthetic coding sequence"
  source 1..525: mol_type = other DNA
atgaacttcctgctgtcctgggtgcactggagcctggccctgctgctgtacctgcaccacgccaagtggagccaggccgcccccatggccgagggcggcggccagaaccaccacgaggtggtgaagttcatggatgtgtaccagaggagctactgccaccccatcgagaccctggtggacatcttccaggagtacccagatgaaattgagtacatcttcaagcccagctgtgtgcccctgatgagatgtggcggctgctgcaatgatgagggcctggagtgtgtgcccacagaggagagcaacatcaccatgcagatcatgaggatcaagccccaccagggccagcacatcggggagatgtccttcctgcagcacaacaagtgtgaatgtcggcccaagaaggaccgggcccggcaggagaacccctgtggcccctgcagcgagaggaggaagcacctgtttgtgcaggacccccagacctgcaagtgcagctgcaagaacacagacagccgctgcaagatgtag

SEQ ID NO: 3521 - DNA, 699 bp, synthetic construct
  misc_feature 1..699: note = source = /note="Description of Artificial Sequence: Synthetic coding sequence"
  source 1..699: mol_type = other DNA
atgaacttcctgctgtcctgggtgcactggagcctggccctgctgctgtacctgcaccacgccaagtggagccaggccgcccccatggccgagggcggcggccagaaccaccacgaggtggtgaagttcatggatgtgtaccagaggagctactgccaccccatcgagaccctggtggacatcttccaggagtacccagatgaaattgagtacatcttcaagcccagctgtgtgcccctgatgagatgtggcggctgctgcaatgatgagggcctggagtgtgtgcccacagaggagagcaacatcaccatgcagatcatgaggatcaagccccaccagggccagcacatcggggagatgtccttcctgcagcacaacaagtgtgaatgtcggcccaagaaggaccgggcccggcaggagaagaagtctgtgcggggcaagggcaagggccagaagaggaagaggaagaagagccgctacaagtcctggagcgtgtatgtgggcgcccgctgctgcctgatgccctggagcctgcccggcccccacccctgtggcccctgcagcgagaggaggaagcacctgtttgtgcaggacccccagacctgcaagtgcagctgcaagaacacagacagccgctgcaaggcccggcagctggagctgaatgaaagaacctgccgctgtgacaagcccaggaggtag

SEQ ID NO: 3522 - DNA, 576 bp, synthetic construct
  misc_feature 1..576: note = source = /note="Description of Artificial Sequence: Synthetic coding sequence"
  source 1..576: mol_type = other DNA
atgaacttcctgctgtcctgggtgcactggagcctggccctgctgctgtacctgcaccacgccaagtggagccaggccgcccccatggccgagggcggcggccagaaccaccacgaggtggtgaagttcatggatgtgtaccagaggagctactgccaccccatcgagaccctggtggacatcttccaggagtacccagatgaaattgagtacatcttcaagcccagctgtgtgcccctgatgagatgtggcggctgctgcaatgatgagggcctggagtgtgtgcccacagaggagagcaacatcaccatgcagatcatgaggatcaagccccaccagggccagcacatcggggagatgtccttcctgcagcacaacaagtgtgaatgtcggcccaagaaggaccgggcccggcaggagaacccctgtggcccctgcagcgagaggaggaagcacctgtttgtgcaggacccccagacctgcaagtgcagctgcaagaacacagacagccgctgcaaggcccggcagctggagctgaatgaaagaacctgccgctgtgacaagcccaggaggtag

SEQ ID NO: 3523 - DNA, 1263 bp, synthetic construct
  misc_feature 1..1263: note = source = /note="Description of Artificial Sequence: Synthetic coding sequence"
  source 1..1263: mol_type = other DNA
atgcacctgctgggcttcttctctgtggcctgcagcctgctggccgccgccctgctgcccggcccccgggaggccccagctgctgctgctgcctttgagagcggcctggacctgagtgatgctgagccagatgctggggaggccacagcctatgccagcaaggacctggaggagcagctgcggtctgtgtcctctgtggatgagctgatgacagtgctgtacccagagtactggaagatgtacaagtgccagctgaggaaaggaggctggcagcacaaccgggagcaggccaacctgaacagcaggacagaggagaccatcaagtttgctgctgcccactacaacacagagatcctgaagagcattgacaatgagtggaggaagacccagtgcatgccccgggaggtgtgcattgatgtgggcaaggagtttggagtggccaccaacaccttcttcaagccaccctgtgtgtctgtgtaccgctgtggcggctgctgcaacagcgagggcctgcagtgcatgaacaccagcaccagctacctgagcaagaccctgtttgagatcaccgtgcccctgagccagggccccaagcctgtgaccatcagctttgccaaccacaccagctgccgctgcatgagcaagctggatgtgtaccggcaggtgcacagcatcatccgccgcagcctgcctgccaccctgccccagtgccaggccgccaacaagacctgccccaccaactacatgtggaacaaccacatctgccgctgcctggcccaggaggacttcatgttcagcagtgatgctggagatgacagcacagatggcttccatgacatctgtggccccaacaaggagctggatgaggagacctgccagtgtgtgtgcagagctggcctgcggcctgccagctgtggcccccacaaggagctggacaggaacagctgccagtgtgtgtgcaagaacaagctgttccccagccagtgtggggccaaccgggagtttgatgagaacacctgccagtgtgtgtgcaagaggacctgccccaggaaccagcccctgaaccctggaaaatgtgcctgtgaatgtacagagagcccccagaagtgcctgctgaagggcaagaagttccaccaccagacctgcagctgctacagaagaccctgcaccaaccggcagaaggcctgtgagcccggcttctcctacagcgaggaggtgtgccgctgtgtgcccagctactggaagaggccccagatgatgtcctag

SEQ ID NO: 3524 - DNA, 510 bp, synthetic construct
  misc_feature 1..510: note = source = /note="Description of Artificial Sequence: Synthetic coding sequence"
  source 1..510: mol_type = other DNA
atggacaccaggaacaaggcccagctgctggtgctgctgaccctgctgtctgtgctcttcagccagaccagcgcctggcccctgtaccgggcccccagcgccctgcggctgggggaccgcatcccctttgaaggagccaatgaaccagaccaggtgtccctgaaggaggacatcgacatgctgcagaatgccctggctgaaaatgacaccccctactatgatgtgtccagaaatgcccggcatgctgatggagtcttcaccagtgacttcagcaagctgctgggccagctgagcgccaagaagtacctggagagcctgatgggcaagagggtgagcaacatcagcgaggaccctgtgcctgtgaagaggcacagtgatgctgtgttcacagacaactacacccggctgaggaagcagatggctgtgaagaagtacctgaacagcatcctgaatggcaagaggagcagcgagggggagagcccagacttccctgaggagctggagaagtag

SEQ ID NO: 3525 - DNA, 513 bp, synthetic construct
  misc_feature 1..513: note = source = /note="Description of Artificial Sequence: Synthetic coding sequence"
  source 1..513: mol_type = other DNA
atggacaccaggaacaaggcccagctgctggtgctgctgaccctgctgtctgtgctcttcagccagaccagcgcctggcccctgtaccgggcccccagcgccctgcggctgggggaccgcatcccctttgaaggagccaatgaaccagaccaggtgtccctgaaggaggacatcgacatgctgcagaatgccctggctgaaaatgacaccccctactatgatgtgtccagaaatgcccggcatgctgatggagtcttcaccagtgacttcagcaagctgctgggccagctgagcgccaagaagtacctggagagcctgatgggcaagagggtgagcagcaacatcagtgaagatcctgtgcctgtgaagaggcacagtgatgctgtgttcacagacaactacacccggctgaggaagcagatggctgtgaagaagtacctgaacagcatcctgaatggcaagaggagcagcgagggggagagcccagacttccctgaggagctggagaagtag

SEQ ID NO: 3526 - DNA, 360 bp, synthetic construct
  misc_feature 1..360: note = source = /note="Description of Artificial Sequence: Synthetic coding sequence"
  source 1..360: mol_type = other DNA
tgagtgtccctgaaggaggacatcgacatgctgcagaatgccctggctgaaaatgacaccccctactatgatgtgtccagaaatgcccggcatgctgatggagtcttcaccagtgacttcagcaagctgctgggccagctgagcgccaagaagtacctggagagcctgatgggcaagagggtgagcagcaacatcagtgaagatcctgtgcctgtgaagaggcacagtgatgctgtgttcacagacaactacacccggctgaggaagcagatggctgtgaagaagtacctgaacagcatcctgaatggcaagaggtctgagggggagagcccagacttccctgaggagctggagaagtag

SEQ ID NO: 3527 - DNA, 774 bp, synthetic construct
  misc_feature 1..774: note = source = /note="Description of Artificial Sequence: Synthetic coding sequence"
  source 1..774: mol_type = other DNA
atgcccctgaatgtgtccttcaccaacagaaattatgacctggactatgacagcgtgcagccctacttctactgtgatgaggaggagaacttctaccagcagcagcagcagagcgagctgcagcccccagcccccagcgaggacatctggaagaagtttgagctgctgcccaccccacccctgagccccagcagaagaagtggcctgtgcagccccagctatgtggccgtgacccccttcagcctgcggggggacaatgatggcggcggcggcagcttcagcacagctgaccagctggagatggtgacagagctgctgggcggggacatggtgaaccagagcttcatctgtgaccctgatgatgagaccttcatcaagaacatcatcatccaggactgcatgtggagcggcttctctgctgctgccaagctggtgtctgagaagctggccagctaccaggccgccaggaaggacagcggcagccccaacccagcccggggccacagcgtgtgcagcaccagcagcctgtacctgcaggacctgtctgctgctgcctctgaatgtattgaccccagcgtggtgttcccctaccccctgaatgacagcagcagccccaagagctgtgccagccaggacagcagcgccttcagccccagcagtgacagcctgctgagcagcacagagagcagcccccagggcagccctgagcccctggtgctgcacgaggagaccccacccaccaccagcagtgacagcggcggcaccaggaggtag

SEQ ID NO: 3528 - DNA, 1365 bp, synthetic construct
  misc_feature 1..1365: note = source = /note="Description of Artificial Sequence: Synthetic coding sequence"
  source 1..1365: mol_type = other DNA
ctggacttcttccgggtggtggagaaccagcagcccccagccaccatgcccctgaatgtgtccttcaccaacagaaattatgacctggactatgattctgtgcagccctacttctactgtgatgaggaggagaacttctaccagcagcagcagcagagcgagctgcagcccccagcccccagcgaggacatctggaagaagtttgagctgctgcccaccccacccctgagccccagccgccgcagcggcctgtgcagccccagctatgtggccgtgacccccttcagcctgcggggggacaatgatggcggcggcggcagcttcagcacagctgaccagctggagatggtgacagagctgctgggcggggacatggtgaaccagagcttcatctgtgaccctgatgatgagaccttcatcaagaacatcatcatccaggactgcatgtggagcggcttctctgctgctgccaagctggtgtctgagaagctggccagctaccaggccgccaggaaggacagcggcagccccaacccagcccggggccacagcgtgtgcagcaccagcagcctgtacctgcaggacctgtctgctgctgccagcgagtgcatcgaccccagcgtggtgttcccctaccccctgaatgacagcagcagccccaagagctgtgccagccaggacagcagcgccttcagccccagcagtgacagcctgctgagcagcacagagagcagcccccagggcagccctgagcccctggtgctgcacgaggagaccccacccaccaccagcagtgacagcgaggaggagcaggaggatgaggaggagattgatgtggtgtctgtggagaagaggcaggcccctgggaagaggtctgagagcggcagccccagcgctgggggccacagcaagccaccccacagccccctggtgctgaagcgctgccacgtgtccacccaccagcacaactatgctgccccacccagcaccaggaaggactacccagctgccaagagggtgaagctggacagcgtgcgggtgctgcggcagatcagcaacaacaggaagtgcaccagccccaggagcagtgacacagaagaaaatgtgaagaggaggacccacaacgtgctggagcggcagaggagaaatgagctgaagaggagcttctttgccctgcgggaccagatccctgagctggagaacaatgagaaggcccccaaggtggtgatcctgaagaaggccacagcctacatcctgtctgtgcaggccgaggagcagaagctgatcagcgaggaggacctgctgaggaagaggcgggagcagctgaagcacaagctggagcagctgaggaacagctgtgcctag

SEQ ID NO: 3529 - DNA, 1263 bp, synthetic construct
  misc_feature 1..1263: note = source = /note="Description of Artificial Sequence: Synthetic coding sequence"
  source 1..1263: mol_type = other DNA
atgcccctgaatgtgtccttcaccaacagaaattatgacctggactatgacagcgtgcagccctacttctactgtgatgaggaggacatctggaagaagtttgagctgctgcccaccccacccctgagccccagccgccgcagcggcctgtgcagccccagctatgtggccgtgacccccttcagcctgcggggggacaatgatggcggcggcggcagcttcagcacagctgaccagctggagatggtgacagagctgctgggcggggacatggtgaaccagagcttcatctgtgaccctgatgatgagaccttcatcaagaacatcatcatccaggactgcatgtggagcggcttctctgctgctgccaagctggtgtctgagaagctggccagctaccaggccgccaggaaggacagcggcagccccaacccagcccggggccacagcgtgtgcagcaccagcagcctgtacctgcaggacctgtctgctgctgccagcgagtgcatcgaccccagcgtggtgttcccctaccccctgaatgacagcagcagccccaagagctgtgccagccaggacagcagcgccttcagccccagcagtgacagcctgctgagcagcacagagagcagcccccagggcagccctgagcccctggtgctgcacgaggagaccccacccaccaccagcagtgacagcgaggaggagcaggaggatgaggaggagattgatgtggtgtctgtggagaagaggcaggcccctgggaagaggtctgagagcggcagccccagcgctgggggccacagcaagccaccccacagccccctggtgctgaagcgctgccacgtgtccacccaccagcacaactatgctgccccacccagcaccaggaaggactacccagctgccaagagggtgaagctggacagcgtgcgggtgctgcggcagatcagcaacaacaggaagtgcaccagccccaggagcagtgacacagaagaaaatgtgaagaggaggacccacaacgtgctggagcggcagaggagaaatgagctgaagaggagcttctttgccctgcgggaccagatccctgagctggagaacaatgagaaggcccccaaggtggtgatcctgaagaaggccacagcctacatcctgtctgtgcaggccgaggagcagaagctgatcagcgaggaggacctgctgaggaagaggcgggagcagctgaagcacaagctggagcagctgaggaacagctgtgcctag

SEQ ID NO: 3530 - DNA, 1362 bp, synthetic construct
  misc_feature 1..1362: note = source = /note="Description of Artificial Sequence: Synthetic coding sequence"
  source 1..1362: mol_type = other DNA
ctggacttcttccgggtggtggagaaccagcccccagccaccatgcccctgaatgtgtccttcaccaacagaaattatgacctggactatgacagcgtgcagccctacttctactgtgatgaggaggagaacttctaccagcagcagcagcagagcgagctgcagcccccagcccccagcgaggacatctggaagaagtttgagctgctgcccaccccacccctgagccccagcagaagaagtggcctgtgcagccccagctatgtggccgtgacccccttcagcctgcggggggacaatgatggcggcggcggcagcttcagcacagctgaccagctggagatggtgacagagctgctgggcggggacatggtgaaccagagcttcatctgtgaccctgatgatgagaccttcatcaagaacatcatcatccaggactgcatgtggagcggcttctctgctgctgccaagctggtgtctgagaagctggccagctaccaggccgccaggaaggacagcggcagccccaacccagcccggggccacagcgtgtgcagcaccagcagcctgtacctgcaggacctgtctgctgctgcctctgaatgtattgaccccagcgtggtgttcccctaccccctgaatgacagcagcagccccaagagctgtgccagccaggacagcagcgccttcagccccagcagtgacagcctgctgagcagcacagagagcagcccccagggcagccctgagcccctggtgctgcacgaggagaccccacccaccaccagcagtgacagcgaggaggagcaggaggatgaggaggagattgatgtggtgtctgtggagaagaggcaggcccctgggaagaggtctgagagcggcagccccagcgctgggggccacagcaagccaccccacagccccctggtgctgaagcgctgccacgtgtccacccaccagcacaactatgctgccccacccagcaccaggaaggactacccagctgccaagagggtgaagctggacagcgtgcgggtgctgcggcagatcagcaacaacaggaagtgcaccagccccaggagcagtgacacagaggagaatgtgaagaggaggacccacaacgtgctggagcggcagaggagaaatgagctgaagaggagcttctttgccctgcgggaccagatccctgagctggagaacaatgagaaggcccccaaggtggtgatcctgaagaaggccacagcctacatcctgtctgtgcaggccgaggagcagaagctgatcagcgaggaggacctgctgaggaagagaagagagcagctgaagcacaagctggagcagctgaggaacagctgtgcctag
